United States Patent Application Publication US 2007/0105122 A1 - sequence listing, part 7

SEQ ID NO: 14300 - DNA, 2395 bp, Homo sapiens
  CDS (363)..(1625)
aggaagggcccgtcccgccttccccggcgcgccatggagccccgggcggttgcagaagccgtggagacgggtgaggaggatgtgattatggaagctctgcggtcatacaaccaggagcactcccagagcttcacgtttgatgatgcccaacaggaggaccggaagagactggcgtgctgctggtctccgtcctggaacagggcttgccaccctcccaccgtgtcatctggctgcagagtgtccgaatcctgtcccgggaccgcaactgcctggacccgttcaccagccgccagagcctgcaggcactagcctgctatgctgacatctctgtctctgaggggtccgtcccagagtccgcagacatggatgttgtactggagtccctcaagtgcctgtgcaacctcgtgctcagcagccctgtggcacagatgctggcagcagaggcccgcctagtggtgaagctcacagagcgtgtggggctgtaccgtgagaggagcttcccccacgatgtccagttctttgacttgcggctcctcttcctgctaacggcactccgcaccgatgtgcgccagcagctgtttcaggagctgaaaggagtgcgcctgctaactgacacactggagctgacgctgggggtgactcctgaagggaaccccccacccacgctccttccttcccaagagactgagcgggccatggagatcctcaaagtgctcttcaacatcaccctggactccatcaagggggaggtggacgaggaagacgctgccctttaccgacacctggggacccttctccggcactgtgtgatgatcgctactgctggagaccgcacagaggagttccacggccacgcagtgaacctcctggggaacttgcccctcaagtgtctggatgttctcctcaccctggagccacatggagactccacggagttcatgggagtgaatatggatgtgattcgtgccctcctcatcttcctagagaagcgtttgcacaagacacacaggctgaaggagagtgtagctcccgtgctgagcgtgctgactgaatgtgcccggatgcaccgcccagccaggaagttcctgaaggcccaggtgctgccccctctgcgggatgtgaggacacggcctgaggttggggagatgctgcggaacaagcttgtccgcctcatgacacacctggacacagatgtgaagagggtggctgccgagttcttgtttgtcctgtgctctgagagtgtgccccgattcatcaagtacacaggctatgggaatgctgctggccttctggctgccaggggcctcatggcaggaggccggcccgagggccagtactcagaggatgaggacacagacacagatgagtacaaggaagccaaagccagcataaaccctgtgaccgggagggtggaggagaagccgcctaaccctatggagggcatgacagaggagcagaaggagcacgaggccatgaagctggtgaccatgtttgacaagctctccaggaacagagtcatccagccaatggggatgagtccccggggtcatcttacgtccctgcaggatgccatgtgcgagactatggagcagcagctctcctcggaccctgactcggaccctgactgaggatggcagctcttctgctcccccatcaggactggtgctgcttccagagacttccttggggttgcaacctcgggaagccacatcccactggatccacacccgcccccacttctccatcttagaaaccccttctcttgactcccgttctgttcatgatttgcctctggtccagtttctcatctctggactgcaacggtcttcttgtgctagaactcaggctcagcctcgaattccacagacgaagtactttcttttgtctgcgccaagaggaatgtgttcagaagctgctgcctgagggcagggcctacctgggcacacagaagagcatatgggagggcaggggtttgggtgtgggtgcacacaaagcaagcaccatctgggattggcacactggcagagccagtgtgttggggtatgtgctgcacttcccagggagaaaacctgtcagaactttccatacgagtatatcagaacacacccttccaaggtatgtatgctctgttgttcctgtcctgtcttcactgagcgcagggctggaggcctcttagacattctccttggtcctcgttcagctgcccactgtagtatccacagtgcccgagttctcgctggttttggcaattaaacctccttcctactggtttagactacacttacaacaaggaaaatgcccctcgtgtgaccatagattgagatttataccacataccacacatagccacagaaacatcatcttgaaataaagaagagttttggacaaaaaaaac

SEQ ID NO: 14301 - protein, 421 aa, Homo sapiens
MDVVLESLKCLCNLVLSSPVAQMLAAEARLVVKLTERVGLYRERSFPHDVQFFDLRLLFLLTALRTDVRQQLFQELKGVRLLTDTLELTLGVTPEGNPPPTLLPSQETERAMEILKVLFNITLDSIKGEVDEEDAALYRHLGTLLRHCVMIATAGDRTEEFHGHAVNLLGNLPLKCLDVLLTLEPHGDSTEFMGVNMDVIRALLIFLEKRLHKTHRLKESVAPVLSVLTECARMHRPARKFLKAQVLPPLRDVRTRPEVGEMLRNKLVRLMTHLDTDVKRVAAEFLFVLCSESVPRFIKYTGYGNAAGLLAARGLMAGGRPEGQYSEDEDTDTDEYKEAKASINPVTGRVEEKPPNPMEGMTEEQKEHEAMKLVTMFDKLSRNRVIQPMGMSPRGHLTSLQDAMCETMEQQLSSDPDSDPD

SEQ ID NO: 14302 - DNA, 1598 bp, Homo sapiens
  CDS (239)..(1231)
aaaaaaaaactgggaagatggacgcagctactctgacctacgacactctccggtttgctgagtttgaagattttcctgagacctcagagcccgtttggatactgggtagaaaatacagcattttcacagaaaaggacgagatcttgtctgatgtggcatctagactttggtttacatacaggaaaactttccagccattggggggacaggccccacctcggacacaggctggggctgcatgctgcggtgtggacagatgatctttgcccaagccctggtgtgccggcacctaggccgagattggaggtggacacaaaggaagaggcagccagacagctacttcagcgtcctcaacgcattcatcgacaggaaggacagttactactccattcaccagatagcgcaaatgggagttggcgaaggcaagtccataggccagtggtacgggcccaacactgtcgcccaggtcctgaagaagcttgctgtcttcgatacgtggagctccttggcggtccacattgcaatggacaacactgttgtgatggaggaaatcagaaggttgtgcaggaccagcgttctctgtgcaggcgccactgcgtttcctgcagattccgaccggcactgcaacggattccctgccggagctgaggtcaccaacaggccgtcgccatggagacccctggtacttctcattcccctgcgcctggggctcacggacatcaacgaggcctacgtggagacgctgaagcactgcttcatgatgccccagtccctgggcgtcatcggagggaagcccaacagcgcccactacttcatcggctacgttggtgaggagctcatctacctggacccccacaccacgcagccagccgtggagcccactgatggctgcttcatcccggacgagagcttccactgccagcacccgccgtgccgcatgagcatcgcggagcttgacccgtccatcgctgtggggtttttctgtaagactgaagatgacttcaatgattggtgccagcaagtcaaaaagctgtctctgcttggaggtgccctgcccatgtttgagctggtggagctgcagccttcacatctggcctgccccgacgtcctgaacctgtccctaggtgagagctgccaagtccaggtggggtccctcggagattcttctgatgtagagcgactggaaagattcttcgactcagaagatgaagactttgaaatcctgtccctttgaaaatcctggggtcgggggtggcacctgtgagagcctggggctcctggtgccgctgcgtttcatccatcccgcccgctcgcctgccgagggctgcgccccgtgctgcctccccccagagggccacccgctgtgctcgtggactgaggctgcgctgcccgggaggccttactgcttggtgtcagactgcccagctcagagtgcccgtcagggcctgtgcatccgcacgcggagccgtctgttaggagcttccagagtgttctctcgacactgccagccccgtgttagcacctgggcctcagtcccacttgctcccaggcgccggttctgtggttggtttggaattaaagtcctgtttgaagttgtc

SEQ ID NO: 14303 - protein, 331 aa, Homo sapiens [sequence omitted]

SEQ ID NO: 14304 - DNA, 1884 bp, Homo sapiens
cttgtatgcaaccacttctaaactataggaaaacatttgatgtaattgtgatagatccaccatggcagaacaaatcagttaaaagaagtaataggtacagttatttgtcacccctgcaaataaagcaaatacctatccctaaattggctgctccaaactgtcttcttgttacttgggtgaccaatagacagaagcacctacgttttataaaggaagaactttatccctcttggtctgtggaggtagttgctgagtggcactgggtaaaaaggttttaaaagactacatcaagccagatggggaatatttggagttgtttgctcgaaatttacagccaggttggactagttggggcaatgaagttctcaaatttcagcatgtggattattttattgctctggagtctggaagctgactatgatcttgattaaagtagtggtttcttcattgtttcctcaccacttttcccttaattctaagtcatttttttattttgttaccaacccatattcttagaatataaacaggacttgtttttttcagtaagggaccagaagtgactagccttcatgtaattttaagatgaattttacttgagttgcactaacattctatgttattctagactatacaaattaagtggtaagcagttataaagacggcaagaccatgctattgaaaaagttcagaaaacatacaccgtggaccagaggtcttaatcctatctatggatgtgttttgtgtgacccatacagtgttgtaaaaaacacttagaaccattattctaaaaaatggggctatttcacattaaagtccagatttctgcttctttttaaacatcagaggctctggctacacagaggccttttttctttcctggcatcagtctgcaggaccaagcggtggtggctcacttgggaagagccttgtgctctccactttgccacagtaccactgccaccatgctgctcacttatgtcatccacttggcccttgtatgacctgaatttgcaacctctggtatactgttatgttctggagaaaatattcaaagatctgccaaatactgcattagtatactgagtttatacagcatttttgtagggttttaaattgcattcaaggtcactttccaagcactttctggttttgcttgtttttctagaagaaaatgaaaagctattccttataataaacatggcagcaagtaaacagtgtgattgtgaaaaaaatattatttatagattttctacaaataaatatttgtctaccaagtaaaatattttgactgaaatgattctttgaaatgcatattgatttattatgtattgactttttaaaaattgaggtataattttcacaaaattctccaattttcagtgtcgaattcagtgaattttgaaaacatatatacagttgtctgtctgccacagtgatcatgatacagaacactttctttaccctgaaaacttctcatttttccttttgcagtcaatcccctgctcctatccttggcccctggcaaacactggtttgctttctatcattagttctgctgtttgagaatttcatataaatggaatcatgcaatgtgtaatctattgtgcctggcttctttcacgtagcattttgagaaaagcatttatactatttacagattgttgacaaatatttatccactaagtaaaatgttagactgaaatgattctttgacaagcttgccaatttactgattttgtcaaagaaaaatatgttatttttgaagtttgttcatcctttgagtgtgtgagtatagtatcagaggcttaattttgtatttatggagctattctaacttgttatttaaaaggaaaaaggtattaaacttgaagcaaacttctcatg

SEQ ID NO: 14305 - DNA, 1654 bp, Homo sapiens
  CDS (4)..(1095)
atcatgccgctgggactggggcggcggaaaaaggcgccccctctagtggaaaatgaggaggctgagccaggccgtggagggctgggcgtgggggagccagggcctctgggcggaggtgggtcggggggcccccaaatgggcttgcccccccctcccccagccctgcggccccgcctcgtgttccacacccagctggcccatggcagtcccactggccgcatcgagggcttcaccaacgtcaaggagctgtatggcaagatcgccgaggccttccgcctgccaactgccgaggtgatgttctgcaccctgaacacccacaaagtggacatggacaagctcctggggggccagatcgggctggaggacttcatcttcgcccacgtgaaggggcagcgcaaggaggtggaggtgttcaagtcggaggatgcactcgggctcaccatcacggacaacggggctggctacgccttcatcaagcgcatcaaggagggcagcgtgatcgaccacatccacctcatcagcgtgggcgacatgatcgaggccattaacgggcagagcctgctgggctgccggcactacgaggtggcccggctgctcaaggagctgccccgaggccgtaccttcacgctgaagctcacggagcctcgcaaggccttcgacatgatcagccagcgttcagcgggtggccgccctggctctggcccacaactgggcactggccgagggaccctgcggctccgatcccggggcccgccacagtggaggatctgccctctgcctttgaagagaaggccattgagaaggtggatgacctgctggagagttacatgggtatcagggacacggagctggcggccaccatggtggagctgggaaaggacaaaaggaacccggatgagctggccgaggccctggacgaacggctgggtgactttgccttccctgacgagttcgtctttgacgtctggggcgccattggggacgccaaggtcggccgctactaggactgcccccggaccctgcgatgatgacccgggcgcaacctggtgggggcccccagcagggacactgacgtctggacccgagcctccagcctgagcctagctcagcagcccaaggacgatggtgaggggaggtggggccaggccccctgccccgctccaatcggtaccatcccctccctggttcccagtctggccggggtccccggcccccctgtgccctgttccccacctacctcagctgggtcaggcacagggaggggagggatcagccaaattgggcggccacccccgcctccaccactttccaccatcagctgccaaactggtccctctgtctccctggggccttgggttctgtttgggggtcatgaccttcctagtttcctgacgcagggaatacaggggagggggttgtccttccccccagcaaatgcaataatgccctcacccctcctgagaggagccccctccctgtggagcctgttacctccgcatttgacacgagtctgctgtgaaccccgcaacctcctccccacctcccatctctccttccaggcccatccctggcccagagcaggagggagggagggacgatggcggtgggtttttgtatctgaatttgctgtcttgaacataaagaatctatctgc

SEQ ID NO: 14306 - protein, 364 aa, Homo sapiens
MPLGLGRRKKAPPLVENEEAEPGRGGLGVGEPGPLGGGGSGGPQMGLPPPPPALRPRLVFHTQLAHGSPTGRIEGFTNVKELYGKIAEAFRLPTAEVMFCTLNTHKVDMDKLLGGQIGLEDFIFAHVKGQRKEVEVFKSEDALGLTITDNGAGYAFIKRIKEGSVIDHIHLISVGDMIEAINGQSLLGCRHYEVARLLKELPRGRTFTLKLTEPRKAFDMISQRSAGGRPGSGPQLGTGRGTLRLRSRGPPQWRICPLPLKRRPLRRWMTCWRVTWVSGTRSWRPPWWSWERTKGTRMSWPRPWTNGWVTLPSLTSSSLTSGAPLGTPRSAATRTAPGPCDDDPGATWWGPPAGTLTSGPEPPA

SEQ ID NO: 14307 - DNA, 2058 bp, Homo sapiens
  CDS (24)..(1088)
gctaatgttttggccgcttcaagatggcggtgcaggagtcggcggctcagttgtccatgaccctgaaggtccaggagtacccgaccctcaaggtgccctacgagacgctgaacaaacgctttcgcgccgctcagaagaacattgaccgggagaccagccacgtcaccatggtggtggccgagctggagaagacgttgagcggctgccccgccgtggactccgtggtcagcctgctggacggcgtggtggagaagctcagcgtcctcaagaggaaggcggtggaatccatccaggccgaggacgagagcgccaagctgtgcaagcgccggatcgagcacctcaaagagcatagcagcgaccagcccgcggcggccagcgtgtggaagaggaagcgcatggatcgcatgatggtggagcacctgctgcgttgcggctactacaacacggctgtcaagctggcgcgccagagcggcatcgagagctgcctggagttcagcctcagaatccaggagttcattgaactcatccggcagaataagagactggacgctgtgagacatgcaagaaagcacttcagccaagcagaagggagccagctggacgaggtgcgccaggccatgggcatgctggccttcccgcccgacacgcacatctccccgtacaaggaccttctggaccctgcacggtggcggatgctgatccagcagttccggtacgacaactaccgactacaccagctgggaaacaattctgtgttcaccctcaccctgcaggctggcctctcagccatcaagacaccacagtgctacaaggaggacggcagctccaagagccctgactgccctgtgtgcagccgctccctgaacaagctggcgcagcccctgcccatggcccactgtgccaactcccgcctggtctgcaagatttctggcgacgtgatgaacgagaacaatccgcccatgatgctgcccaacggctacgtctacggctacaattctctgctttctatccgtcaagatgataaagtcgtgtgcccgagaaccaaagaagtcttccacttctcacaagccgagaaggtgtacatcatgtaggccccacgtcgtgaagcgcacgcctcggggacgggctgcagtgggcggggaggccacgccttcctcctgtcccacgctccagcctgccgcggtgtttctgtttcttgcgaccaaagatccgtgagcaacgataaatactcttaggaagagagaaaataaggtttcataagtttgtacttgaaaacatttggattggtaggattttgtaacacgtcaaccatttgatgcttctgaaaagtactttcaacttgcgaaggaaactcttctttaaagactgacctaaacaccgagggaaacttaagaacgtttaaaatataggagtccgtgatttccctgtgttttcagtttctttccttctgtgaacgatgagacttggagaacgggctggtccttcaccacttcctgttggccctggcctggccggggaaggtggcagcggcaccggactgacctgcagtgacccgcgatgccgcgccacgagggacacttatggcttcattcgagagctgctgccaaaacgcctggcgccgccaccgtcgggggctggcttcgaggacgcccgcctgcctcgcgggtcgtgtccgcgggactgtgttcgtacgtgcatagtttcgatatcacatcgcggggctgtgttcgtagctgcgtcgtttcgatatcacaccctctgtgtgccgccttacttcctgcttcgagaatgtataacgtggaaatccacgggaccaaatttctgcagaggccttgccggatggttccataactgtagagtctaattgctatccattacagaaattaatcgttcagttgaaagaagtactgatgacttttcaaaacaaatgaaccaccgtagctgacagagaaccgtatcgtagaggtttgtagttagtgcttatttttgcatgttgatgttgactagctaataaactgtaaatgtaaaccatgcgaataaaatagttttctatttctc

SEQ ID NO: 14308 - protein, 355 aa, Homo sapiens
MAVQESAAQLSMTLKVQEYPTLKVPYETLNKRFRAAQKNIDRETSHVTMVVAELEKTLSGCPAVDSVVSLLDGVVEKLSVLKRKAVESIQAEDESAKLCKRRIEHLKEHSSDQPAAASVWKRKRMDRMMVEHLLRCGYYNTAVKLARQSGIESCLEFSLRIQEFIELIRQNKRLDAVRHARKHFSQAEGSQLDEVRQAMGMLAFPPDTHISPYKDLLDPARWRMLIQQFRYDNYRLHQLGNNSVFTLTLQAGLSAIKTPQCYKEDGSSKSPDCPVCSRSLNKLAQPLPMAHCANSRLVCKISGDVMNENNPPMMLPNGYVYGYNSLLSIRQDDKVVCPRTKEVFHFSQAEKVYIM

SEQ ID NO: 14309 - DNA, 2005 bp, Homo sapiens
  CDS (137)..(844)
tggatttggtgattctacaaaaaaagacactgaggttgagaccttgaagcatgacactgctgcagtcgatcgttccgtcaagcgtcttttcaaagttcggagtgatcttgattttgctgagcaactgtggtgcaaaatgagcagtagtgtgatttcataccaagacttggtgaagtgtttcacattgatcatccagagtctacaacgtggtgatatacagccatggctccatagtggaagtaacagtttactaagtaagctcattcatcagtcttatcatggaaccatggacacagtttctctcagtgggactattccagttcaaatgcttttggaaattggtttggacaaactaaagaaagattatatcagttttttcataggtcaggaacttgcatctttgaatcatttggaatacttcattgctccatcagtagatatacaagaacaggtttatcgtgtccaaaaactccaccatattctagaaatattagtcagttgcatgcctttcattaaatctcaacatgaactcctcttttctttaacacagatctgcataaagtattacaaacaaaatcctcttgatgagcaacacatttttcagctgccagtcagaccaactgctgtaaagaacttatatcaaagtgagaagccacagaaatggagagtggaaatatatagtggtcaaaagaagattaagacagtttggcaactgagtgacagctcacccatagaccatctgaattttcacaaacctgatttttcggaattaacactaaacggtagcctggaagaaaggatattctttactaacatggttacctgcagccaggtgcatttcaagtgaagtgtgctgatgaagtcctctataagcacaagccaaaaagagaaagagaaaaaaaggtaattattgtagaacctgaaaacagcaatgtatggaaaccctcaaagcagaaaagggaggaagatcctgaagattctcttatgaagctccaaaattgataatcctgtctcagctctgcctcctcaggaggagcattagtagaacagcagtgatgaggacacagagggagcagacagtgggtaccacgatctccgtaaccatttgcatgtgacttagcaagggctctgaaatgacaaagagaacgagcaccacaaatgagaacaggatcattttagtaaatacagctttatcccaaaagctttaactgtattgggaaaacttaaaaaatagcatcctcaaattttctgattcttatttgccatgaaatagaacttagtaaattaaatgttatttgaaaatgttataagagctttgtaaatatttcagaaaatatgggataaatgcctgaatttggttcttctacaggtgctataataaagtccatctctcaatacttatactttctaaattcatctcagaatattagcagccatattccacagttcctataatttttactgggggggatttgtgataggaaagtccttgggaaacatttccaatctttcaaaatattattgtgtatcttaagaagtataggaacttgtatgttgaaatgttgtatggtagttcttgtatagttaaataataatctttttaagagttaatgataagcatatgttatgtgcattattaataaaatagtggccacttaggtaatacccacttttatcttgtgtgctgggtactctggttactgagataaataaggcactggacatcctcacgtggagttcacaggctcatcagtgaattctgtaccacatttcaaccttgtttattttagtttaatggaatatacattcttagtattgcctgattatttaaatttgttgagggggattgcatgttgctttattggcctgtaaaaatagctagtttggtaagatttggtctcgcaccttccatctttgctaccacattaaagatgagcttgttaaaaaggaaagcatatttctctgattgcccttatggagaaataaagataaaattcaaagaaac

SEQ ID NO: 14310 - protein, 236 aa, Homo sapiens
MSSSVISYQDLVKCFTLIIQSLQRGDIQPWLHSGSNSLLSKLIHQSYHGTMDTVSLSGTIPVQMLLEIGLDKLKKDYISFFIGQELASLNHLEYFIAPSVDIQEQVYRVQKLHHILEILVSCMPFIKSQHELLFSLTQICIKYYKQNPLDEQHIFQLPVRPTAVKNLYQSEKPQKWRVEIYSGQKKIKTVWQLSDSSPIDHLNFHKPDFSELTLNGSLEERIFFTNMVTCSQVHFK

SEQ ID NO: 14311 - DNA, 2438 bp, Homo sapiens
  CDS (42)..(2243)
gtgcggagcggcgcggcacagagcctgttgttgagctcagtatgtcgtgggaatccggggccgggccaggtctaggttcccaggggatggatctcgtgtggagtgcgtggtacggaaagtgcgttaaagggaaagggtcgttgccactctcggcccacggcatcgtggtcgcctggctcagcagggccgagtgggaccaggtgacggtttatctgttctgtgacgaccataagttgcagcggtacgcgcttaaccgcatcacggtgtggaggagcaggtcaggcaacgaactccctctggcagtggcttctactgctgacctgatacgctgtaagctcttggatgtaactggtggcttgggcactgatgaacttagactgctctatggcatggcattggtcaggtttgtgaatcttatctcagagaggaagacaaagtttgccaaggtccccctcaagtgtctggctcaagaggtaaatattccggattggattgttgaccttcgccatgagttgacccacaagaaaatgccccatataaatgactgccgcagaggctgctactttgtcctggattggctccagaagacctattggtgccgccaactggagaacagcctgagagagacctgggagttggaggagttcagggaagggatagaggaagaggatcaagaggaagataagaacattgttgttgatgacatcacagaacagaaaccagagcctcaggatgatgggaaaagtacggagtcagatgtaaaggccgatggagacagcaaaggcagcgaagaggtggattctcattgcaaaaaggccctgagtcataaagagctatatgaaagagcccgagaactgctggtatcatacgaagaggagcagtttacggtgctggagaaatttaggtatttacctaaggccattaaggcgtggaataacccgtccccacgtgtagaatgtgtcctggcagagctcaagggcgttacatgcgagaacagggaggctgtgctggatgcttttctggatgatggcttccttgtccccacatttgaacagttggcagctttgcagatagaatatgaagatggtcagactgaggtccagagaggggaaggtactgacccaaagtcacacaaaaacgtggacttgaatgacgtcctggtgccaaagccgttctctcagttctggcagcccctgctcaggggcctgcactcccagaacttcacgcaggccctattggagaggatgctctctgaactgccagccttggggatcagcgggatccggcctacctacatcctcagatggaccgttgaactgatcgtggccaacaccaagactggacggaatgctcgccgattttctgcaggccagtgggaagcaagaaggggctggaggctgttcaactgctccgcctcccttgactggccccggatggttgagtcctgcttgggctcaccttgctgggccagcccccaactccttcggatcatcttcaaagccatggggcagggcctgccagacgaggagcaggagaagctgctgcgcatctgttccatttatacccagagtggagaaaacagcctggtgcaggagggctctgaggcctcccccattgggaagtctccatatacactagacagcctgtattggagcgtcaagccagccagctccagcttcgggtctgaagcaaaggcccagcaacaggaggagcagggcagtgttaatgatgtcaaggaagaggagaaggaggagaaagaggtcttgccagaccaggtagaggaggaggaagaaaatgatgaccaagaggaggaagaggaggatgaagatgatgaagatgatgaagaggaagacagaatggaggtggggcctttctctacagggcaagagtcccccactgccgagaatgctaggcttctggcccagaaaagaggagctttgcagggctctgcatggcaggttagctcagaagacgtgcgatgggacacatttcccctaggccgaatgccaggtcagaccgaggacccagcagagctcatgctggagaattatgacaccatgtatcttttggaccagcctgtgctagagcagcggctggaaccctcaacatgcaagactgacaccttgggcctgagctgtggtgtcggcagtggcaactgcagcaacagcagcagcagcaacttcgagggccttctctggagccaggggcagctgcatgggctcaaaactggcctgcagctcttctgatggccatccctggtgcaagtgttcatccagccgtgccagggcaacagcccaccccctagtacaactgatgctccctgagacaacctgggagacagcctggatcagccacatcaactcagttgtccaccacaggggaattttgaatgtcttttgtttttgttttgttttgaaaaataataaacaggcaactgt

SEQ ID NO: 14312 - protein, 734 aa, Homo sapiens
MSWESGAGPGLGSQGMDLVWSAWYGKCVKGKGSLPLSAHGIVVAWLSRAEWDQVTVYLFCDDHKLQRYALNRITVWRSRSGNELPLAVASTADLIRCKLLDVTGGLGTDELRLLYGMALVRFVNLISERKTKFAKVPLKCLAQEVNIPDWIVDLRHELTHKKMPHINDCRRGCYFVLDWLQKTYWCRQLENSLRETWELEEFREGIEEEDQEEDKNIVVDDITEQKPEPQDDGKSTESDVKADGDSKGSEEVDSHCKKALSHKELYERARELLVSYEEEQFTVLEKFRYLPKAIKAWNNPSPRVECVLAELKGVTCENREAVLDAFLDDGFLVPTFEQLAALQIEYEDGQTEVQRGEGTDPKSHKNVDLNDVLVPKPFSQFWQPLLRGLHSQNFTQALLERMLSELPALGISGIRPTYILRWTVELIVANTKTGRNARRFSAGQWEARRGWRLFNCSASLDWPRMVESCLGSPCWASPQLLRIIFKAMGQGLPDEEQEKLLRICSIYTQSGENSLVQEGSEASPIGKSPYTLDSLYWSVKPASSSFGSEAKAQQQEEQGSVNDVKEEEKEEKEVLPDQVEEEEENDDQEEEEEDEDDEDDEEEDRMEVGPFSTGQESPTAENARLLAQKRGALQGSAWQVSSEDVRWDTFPLGRMPGQTEDPAELMLENYDTMYLLDQPVLEQRLEPSTCKTDTLGLSCGVGSGNCSNSSSSNFEGLLWSQGQLHGLKTGLQLF

SEQ ID NO: 14313 - DNA, 1869 bp, Homo sapiens
  CDS (403)..(867)
agtttcggaaccccagccagctcacctctgcgccgctgaacccgatccgagcctccggcaaaggtttttccctcctcccccggccgagggcttctgccgcccgggcacccccgccccgcggcgccccacattcccccagcccggggcccttggcgcgtgcgctccgtgcggctgtgctccgcgggactttgtttgtttcctcctcgtccctctttgttgggctgaacaccagcctcgtcaaagccccccactccggagggagttcggcttctccagcagggcggctgcagcgcgctgccccgaccccgcctgcggcccctcacgccgctagtgctcccaccccgccctcctggcaccccgcctgcgtccgttcgcccgaggaagccaaccgcgacttcattgatgcacccattccagtggtgtaacgggtgtttctgtggcctgggactggttagcaccaacaagtcctgctcgatgccacccatcagtttccaagaccttccgctcaacatctatatggtcatctttggcacaggcatctttgtcttcatgctcagccttatcttctgctgctattttatcagcaaactgcggaaccaggcacagagtgatcgatacggatataaggaggtggtgcttaaaggtgatgccaagaagttacaattatatgggcagacctgcgcagtctgtctggaagacttcaaggggaaggatgagttaggcgtgctcccgtgccaacacgcctttcaccgcaagtgtctggtgaaatggctggaagttcgctgtgtctgccccatgtgtaacaagcccattgctagtccctcagaggccacgcagaacattgggattctattggatgagctggtgtgagtgctgccgctacaccgagacctggagaagacctcttgcctcatggatgtctggtccctctgcacagctccaaccaacaggactgtagggtgatgacgatcactttcccagtgatgagaagggtggtctaggactgggcttctaccctcagtgcaagaccagtgccagatgtgcccccacttcctgcctcctgaagccttcttccctgctactccatgctggtggcctcacccatcaagaccactgtctcctggtactggactatctacctgccttgtccctgttctgggggaaggtgtccaccccgatcaagaacatggagaaagccctctttcaaggctcccattaggaggatgagctgccttgacccagaagggatgagacgggctcttacctctctacaaccttccctccccttcccactccttccggagtaaggttagaagggaaggaaggaaagatcaaggaaccaagcgcctccacgggaggcgagggaggctctgtatgaaacagaagagcagggacataaaggaaaatgtcagtgtttacatgggacctatggaaacaaaggctggcgggcgccagctgactccagagtaagagagggcccttcccctgccaggacccacggtgctatccattcagtctcttcctcagttaatctcggagcttcctattccatgttgaggtttgtgggcccctctagaggagggctagttctatacttaaattgattcccaggggcctttttttttttttttttttttttttttgatcaaaaggggtgtggggatgggggtgtctacggttaagcaacagatacctccttccctttgtaaatagtatttttatacttcatcctcgcctctcaggctttagatacgaaatctccagaatggaagggggtggggattttctgttcctccctggagtgggtgagggtgggagaaagttacatatttaaagaaaaataaatttaataacaagtttctctaacct

SEQ ID NO: 14314 - protein, 155 aa, Homo sapiens
MHPFQWCNGCFCGLGLVSTNKSCSMPPISFQDLPLNIYMVIFGTGIFVFMLSLIFCCYFISKLRNQAQSDRYGYKEVVLKGDAKKLQLYGQTCAVCLEDFKGKDELGVLPCQHAFHRKCLVKWLEVRCVCPMCNKPIASPSEATQNIGILLDELV

SEQ ID NO: 14315 - DNA, 1998 bp, Homo sapiens
  CDS (38)..(1801)
aatctgtttgaggatgtaggcactggtgtgaaggaacatggccctgtatcagaggtggcggtgtctccggctccaaggtttacaggcttgcaggctacacacggcagttgtgtcgacccctccacgctggttggcagagcggcttggcctttttgaggagctgtgggctgctcaggtaaagagattagcaagcatggcacagaaggaaccccggactattaagatatcacttcctggaggccagaaaattgatgctgtggcatggaacacaaccccctaccaactagcccggcagatcagttcaacactggcagatactgcagtggctgctcaagtgaatggagaaccttatgatctggagcggcccttggagacagattctgacctcagatttctgacattcgattccccagaggggaaagcagtgttctggcactccagcacccatgtcctgggggcagcagctgaacaattcctaggtgctgttctctgcagaggtccaagtacagaatatggcttttaccatgatttcttcctgggaaaggagaggacaatccggggctcagagctgcctgttttggagcggatttgccaggaacttacagctgctgctcgacccttccggaggctagaggcttcacgggatcagcttcgccagttgttcaaggctgagtatgcccatcgtggtttctccgaggtgaaaactcccacactgttttctacgaagctctgggaacagtcagggcactgggagcattatcaggaagacatgtttgccgtgcagcccccaggctctgacaggcctcccagctcccagagtgacgattctaccaggcatatcacagatacactcgccctcaagcctatgaactgccctgcacactgcctgatgttcgcccaccggcccagatcctggcgggaactgcccctgcgactagctgactttggggctctacaccgggccgaagcctctggtggtctggggggactgacccgactgcggtgcttccagcaggatgacgctcacatcttctgtacaacagatcagctggaagcagagatccaaagctgtcttgatttcctccgttccgtctatgccgttcttggcttctccttccgcctggcactgtccacccggccatctggcttcctgggggacccttgcctttgggaccaggccgaacaggtccttaaacaggccctgaaggaatttggagaaccctgggacctcaactctggagatggtgccttctatggacctaagattgacgtgcacctccacgatgccctgggccggccacatcagtgtgggacaattcagcttgacttccaactgcccctgagatttgacctccagtataaggggcaggcgggtgccctggagcgtccagtcctcattcaccgagcagtgctcggttctgtggaaagactgttgggagtgctggcagaaagctgcggggggaaatggccactgtggctgtccccgttccaggtggtggtcatccctgtggggagtgagcaagaggaatacgccaaagaggcacagcagagcctgcgggctgcaggactggtcagtgacctggatgcagactctggactgaccctcagccggagaatccgccgggcccagcttgcccactacaattttcagtttgtggttggccagaaagagcaaagtaagagaacagtgaacattcggactcgagataatcgtcgccttggggagtgggacttgcctgaggctgtgcagcgactggtggagctacagaacacgagggtcccaaatgccgaagaaattttctgagcctttgtgcatagatgaggcaaaaacctgcgagtgccatcagcctccctcacatgggagaccccaacccagctgacaatgtggagcccccagaacttcagaactgtgtggaggcacatgtctgctctcctgaaaagagacttggtttggggaccccacaaaaggagggaagctgtagctgtttggatgtgagg

SEQ ID NO: 14316 - protein, 588 aa, Homo sapiens
MALYQRWRCLRLQGLQACRLHTAVVSTPPRWLAERLGLFEELWAAQVKRLASMAQKEPRTIKISLPGGQKIDAVAWNTTPYQLARQISSTLADTAVAAQVNGEPYDLERPLETDSDLRFLTFDSPEGKAVFWHSSTHVLGAAAEQFLGAVLCRGPSTEYGFYHDFFLGKERTIRGSELPVLERICQELTAAARPFRRLEASRDQLRQLFKAEYAHRGFSEVKTPTLFSTKLWEQSGHWEHYQEDMFAVQPPGSDRPPSSQSDDSTRHITDTLALKPMNCPAHCLMFAHRPRSWRELPLRLADFGALHRAEASGGLGGLTRLRCFQQDDAHIFCTTDQLEAEIQSCLDFLRSVYAVLGFSFRLALSTRPSGFLGDPCLWDQAEQVLKQALKEFGEPWDLNSGDGAFYGPKIDVHLHDALGRPHQCGTIQLDFQLPLRFDLQYKGQAGALERPVLIHRAVLGSVERLLGVLAESCGGKWPLWLSPFQVVVIPVGSEQEEYAKEAQQSLRAAGLVSDLDADSGLTLSRRIRRAQLAHYNFQFVVGQKEQSKRTVNIRTRDNRRLGEWDLPEAVQRLVELQNTRVPNAEEIF

SEQ ID NO: 14317 - DNA, 2854 bp, Homo sapiens
  CDS (105)..(815)
gacgggccacaccctctgagaaccttgtaccctcatctgctcgtgtggataagccccccagtgtgctgccctacttcaatcgtcctccttcggcccttcccctgatgggtctgcccccaccaccaattccacccccaccacctctctcctcaagctttggggtccctcctcctcctcctggtatccactaccagcatctcatgcccccacctcctcgattacctcctcatcttgctgtacctccccctggggccatcccacctgcccttcacctcaatccagccttcttccccccaccaaacgctacagtggggcctccaccagatacttacatgaaggcctctgccccctataaccaccatggcagccgagattcgggccctccaccctctacagtgagtgaagccgaatttgaagatatcatgaagcgaaacagagcaatttccagcagtgccatttccaaagcagtatctggagccagtgcaggggattacagtgacgcaattgagacgttgctcacagccattgcggttatcaaacagtcccgggttgccaatgatgatcgttgccgtgtcctcatctcctctcttaaggactgtcttcatggcattgaagccaagtcctacagtgtgggtgccagtgggagctcttccaggaaaagacatcgctcccgggaaaggtcacctagccggtcccgggagagcagcaggaggcaccgggatctgcttcataatgaagatcggcatgatgattatttccaagaaaggaaccgggagcatgagagacaccgggatagagaacgggaccggcaccactgagaaaggagtctggttggaagcaaatgtttttttaatggacttgcatctcctcaccttgatcaggactaaaggacggaggccgccccacccccttccctttcctccaaacccctaactccctccagacacccagggaataccctctgccccacaggattgaagactgcttggcagtcctcccaatcccacacctcctgtttgccaggggaaagaacctaaagacttcgtgtgattgggaggggtggcagacaggaagaaaacatgtccaggcccctggtctccatagagaatggtgctttgtccaagaaaacgtatgagtttctgattctccgggagccgttcaatggtgaggttgatgggaagacttccttcccaaagaaaatagatcctccatgcaggatctaggagagtgactgggtgtgccaaaatatgcccagggtcctgccctcagcactagatttaatggggccaagagggtccaaaccccttgctaacataccacttctttgtttaactcctttacctttccagccctttgaggagggaccatgagaacagaaattaccttatgaaaagctacttctgttcctgctttccctctcacgtattgacggtttatttctttgacctcccagagggctgaactctttcaactctgcgctgcccagccttctcagtggacttgcccctcctaagcagagaaggcctatgaggttgcttgctgctgggaagcctggcagagccaattaccaccctctgctgcttagtgcttgggtacctcttgcaataaccagctcttagttgttccctttccctggggcttttccatttaacacatggagcccttcccccagaaggctacttccttgttttagaggaaggtactgcccattgggagatggggacattgggacctcagcaatgaagaacccttgtgaagtaaccaggaggaatgaggaaagaagcaagttgggcaggatatggcctacttccataggcttttcttttttcaggtttgatgtaagcatgggcttacatcccccaggtacatacttttacttattgtgggataacctggcactagtaggcaggtaaagtcacaaatttggtgtcttttcaccttttgactgttgacttaatagctcctctcactctgcctggagatacttcctgcctcagatgaggagccagaagaaacagagcccgacttgaatgaactcagctcagagttctaaggaccagcattctgggggccattttctctacaggcaaatggaattgcttttccataacatccaaattgtaatgtggttgctgctgaaggaggaggcagcagcgaggtcctgcggtacccatggggtgatgctacttctgcatgcatctacagggcatctgacacctaacatgagacgtggcatgtgagatgagacttggcatgtgagacatagggtcactagagacccttctgggtcagaggagagagactgaattggactaaacccgtcctctgttcccagcacgtttctcatatagccctcagtcactgagggagtcccccgcaggattggagaggcacattcccttgggacagaggctacaggttggagctttttttcccctgtcccccaaccccatccccacctccacttcagaacatggcaccccacccaactggccaagtgttaagtgatgtgcttattgagagcaactccgggtgtcttttaaaatgtagagaaaaggtgacagtttaaggaaaaatatatatagaataccagaaatgccgtttacccggagaatttttttctccccatttgttttgtttttactcaatgacaccatttttagttttatttcctgatagcaaaaggaaaaaaaacacccatccctcaaaaaggccaaggtcccgtccccctgttgtcggtgatttgtttgtctttctgataggttgaaaattgtgtaataaacttgatgacgctgtcaatcttttatactgcattgtatttttttccttttgtaacaaaatatttttaaataat

SEQ ID NO: 14318 - protein, 237 aa, Homo sapiens
MGLPPPPIPPPPPLSSSFGVPPPPPGIHYQHLMPPPPRLPPHLAVPPPGAIPPALHLNPAFFPPPNATVGPPPDTYMKASAPYNHHGSRDSGPPPSTVSEAEFEDIMKRNRAISSSAISKAVSGASAGDYSDAIETLLTAIAVIKQSRVANDDRCRVLISSLKDCLHGIEAKSYSVGASGSSSRKRHRSRERSPSRSRESSRRHRDLLHNEDRHDDYFQERNREHERHRDRERDRHH

SEQ ID NO: 14319 - DNA, 1950 bp, Homo sapiens
  CDS (216)..(1949)
caactactctgaaagtgtcttacttagagatttacaatgaagaaattttggatcttctatgcccatctcgtgagaaagctcaaataaatatacgagaggatcctaaggaaggcataaagattgtgggactcactgagaagactgttttggttgccttggatactgtttcctgtttggaacagggcaacaactctaggactgtggcctccacggctatgaactcccagtcgtcccgatctcatgccatctttacaatctccttagagcaaagaaagaaaagtgacaagaatagcagctttcgctccaagctgcatcttgtagacctcgctggatcagaaagacagaagaaaaccaaggctgaaggggatcgtctaaaagagggtattaatattaaccgaggcctcctatgcttgggaaatgtaatcagtgctcttggagatgacaaaaagggtggctttgtgccctacagagattccaagttgactcgactgcttcaagattctctaggaggtaatagccatactcttatgatagcctgtgtgagtcctgctgactccaatctagaggaaacattaaatacccttcgctatgctgacagagcaagaaaaatcaagaacaaacctattgttaatattgatccccagacagctgaacttaatcatctaaagcaacaggtacaacagctacaagtcttgttgctacaggcccatggaggtaccctgcctggatctataactgtggaaccatcagagaatctacaatccctgatggagaagaatcagtccctggtagaggagaatgaaaaattaagtcgtggtctgagcgaggcagctggtcagacagcccagatgttggagaggatcatttggacagagcaagcgaatgaaaaaatgaacgccaagctagaagagctcaggcagcatgcggcctgcaaactggatcttcaaaagctagtggagactttggaagaccaggaattgaaagaaaatgtagagataatttgtaacctgcagcaattgattacccagttatcggatgaaactgttgcttgcatggctgcagccattgatactgcggtggagcaagaagcccaagtagaaaccagtccagagacgagcaggtcttctgacgcttttaccactcagcatgctctccgtcaagcgcagatgtctaaggagctggttgagttgaataaagcgcttgcactgaaagaggccctggctaggaagatgactcagaatgacagccaactgcagcctattcagtaccaataccaggataacataaaagagctagaattagaagtcatcaatctgcaaaaggaaaaggaagaattggttcttgaacttcagacagcaaagaaggatgccaaccaagccaagttgagtgagcgccgccgcaaacgtctccaggagctggagggtcaaattgctgatctgaagaagaaactgaatgagcagtccaaacttctgaaactaaaggaatccacagagcgtactgtctccaaactgaaccaggagatacggatgatgaaaaaccagcgggtacagttaatgcgtcaaatgaaagaagatgctgagaagtttagacagtggaagcagaaaaaagacaaagaagtaatacagttaaaagaacgagaccgtaagaggcaatatgagctgctgaaacttgaaagaaacttccagaaacaatccaatgtgctcagacgtaaaacggaggaggcagcagctgccaacaagcgtctcaaggatgctctccagaaacaacgggaggttgcagataagcggaaagagactcagagccgtggaatggaaggcactgcagctcgagtgaagaattggcttggaaacgaaattgaggttatggtcagtactgaggaagccaaacgccatctgaatgacctccttgaagatagaaagatcctggctcaagatgtggctcaactcaaag

SEQ ID NO: 14320 - protein, 578 aa, Homo sapiens
MNSQSSRSHAIFTISLEQRKKSDKNSSFRSKLHLVDLAGSERQKKTKAEGDRLKEGININRGLLCLGNVISALGDDKKGGFVPYRDSKLTRLLQDSLGGNSHTLMIACVSPADSNLEETLNTLRYADRARKIKNKPIVNIDPQTAELNHLKQQVQQLQVLLLQAHGGTLPGSITVEPSENLQSLMEKNQSLVEENEKLSRGLSEAAGQTAQMLERIIWTEQANEKMNAKLEELRQHAACKLDLQKLVETLEDQELKENVEIICNLQQLITQLSDETVACMAAAIDTAVEQEAQVETSPETSRSSDAFTTQHALRQAQMSKELVELNKALALKEALARKMTQNDSQLQPIQYQYQDNIKELELEVINLQKEKEELVLELQTAKKDANQAKLSERRRKRLQELEGQIADLKKKLNEQSKLLKLKESTERTVSKLNQEIRMMKNQRVQLMRQMKEDAEKFRQWKQKKDKEVIQLKERDRKRQYELLKLERNFQKQSNVLRRKTEEAAAANKRLKDALQKQREVADKRKETQSRGMEGTAARVKNWLGNEIEVMVSTEEAKRHLNDLLEDRKILAQDVAQLK

SEQ ID NO: 14321 - DNA, 2730 bp, Homo sapiens
  CDS (348)..(1427)
cacacttggactcttttcaaacattaggttagtttgtaatgaaagcaaaaaatttgtgaatagagagcagtagaaacacatccagcaacagctcaccttttaacctaaaaggctcctccgagcagctccatggccggtctgagagcttcagcagcgaagacctgatccccagcagggacctggccactttgccccgggaagccagcacaccgggacgcaacgccctcggccgccacgagtaccccttgcctcggaacgggcctctcccacaggagggtgcccagaagaggggcacagcccctccctacgtcggagtgcggccctgctcggcctcccccagcagtgagatggtcaccttggaggagttcctggaggagagcaaccgcagctcccccacccatgacactcccagttgccgggatgacctgctgagtgactacttccgaaaggccagcgatcccccagccatcggaggccaaccaggaccacctgccaagaaagaaggggccaagatgcccaccaactttgtggcccccaccgtcaaaatggccgcccccacctcggaggggaggccgctgaagcccgggcagtacgtaaagccaaacttcagactgactgaggccgaggccccacccagcgtggccccgagacaggcccagcctccccagagcctgtctctgggcagaccccggcaggctccggtgcccccagcttcccatgcacctgccagccgcagtgcctccttgagccgggccttcagcctggcctcagctgaccttctccgggccagcgggccagaggcctgcaaacaggagtcccctcagaagctgggggctcctgaggccttagggggcagagagacaggcagccacaccctgcaaagccccgcaccccccagctcccatagcctggcccgggagcggaccccacttgtgggaaaggctggcagctcctgtcagggcccaggtccccgcagccggccgctggacacgaggcgcttctccctggctcccccaaaggaggagaggctggcccccctgcatcagtctgccacagcccccgccattgccactgcaggtgctggtgctgctgctgctggcagtggcagcaactcccagctcctgcacttctcacctgctgcagccccggctgccaggaccaagcccaaggcgcccccacgctcaggggaggtggccaccatcacccctgtccgggcagggctcagcctctcagagggagacggggtcccggggcagggctgcagtgaggggcttccggccaagagcccaggtcggtctcccgatttggctccccaccccggccgggccctggaggactgcagtcgagggagcgtctcaaagagcagtccggcctccccggagcccggcggggatccgcagaccgtgtggtatgagtacggctgtgtgtgactgtctcgtggttgagctcgcaaacctgaaaactactgacgcgccttccgactctcacggccttttctcttgcttgcctgcggtgccaggagagggtttggaatgaggaaaggggttcccacgcatttctgctgtttgttctgtgaatggaaacactgtgccaagccccaagaggattacgcttccaggtgtgtaacgtgttttctgtgtctgccgcttccagcagctgatatctttggaacaaataatccacgtcagcatggggaccaattcggatgcaatgacaaactgacttcccccaaagcagacactactccagtatgtcccagtagaacactcatttgcaatgtgttgagctccgttaagcacacacacactcacacaacaggctcacgaggctcaggcctggcgggtcagaaagcccactccctctcccaaggccactggatcccaggagaagcccagactggcgatactacaaaggtctccagggcctggcagaccccagagtcaggcctgctgttaaaaagtgagagtgctgctgttccattcctggggtcccaagcacttccctttaccccaggacccagggcagcctgcagggcagctggcggtggccttggccatttgcccccagcctccagctggctcctgagctctgcaccagggggtttggggaccacacaggcacctgccttcctagatttccctggctcacttttctgcaaacactggatctgccaggcctggggattggggggcaggaaagaggcccccatccagccccctccaggccagtgtgcacagtgcaccgaggggtcatccgcacagagcgaggtgcaagctcgatgtgtaacctggctgcggcacccgacatccccggtctcggggtgttgatttatttctgaataactttttgggtatagaaaccaattttttttaatatatgacatgtatatgtacacactcatgtgaaatatgtatactttggggggatctatttatgttccagtgggagtcactctcttctgtcgggaatcttatctgctgctttgtgtctttggtcagattcctgacaatttagtttcctgttgtaaaggtgcttttcctggggtgaactaaacctattgattttttttttttaagatttttttttccttttgatttaatatactgagaaagaaatgggagacttttgaatgttaacaagatccattttaggagtgtttggggttgtgtattaaatagccattcattctggaactcaaggacaggactgtaataaaatggaatggaaccg

SEQ ID NO: 14322 - protein, 360 aa, Homo sapiens
MVTLEEFLEESNRSSPTHDTPSCRDDLLSDYFRKASDPPAIGGQPGPPAKKEGAKMPTNFVAPTVKMAAPTSEGRPLKPGQYVKPNFRLTEAEAPPSVAPRQAQPPQSLSLGRPRQAPVPPASHAPASRSASLSRAFSLASADLLRASGPEACKQESPQKLGAPEALGGRETGSHTLQSPAPPSSHSLARERTPLVGKAGSSCQGPGPRSRPLDTRRFSLAPPKEERLAPLHQSATAPAIATAGAGAAAAGSGSNSQLLHFSPAAAPAARTKPKAPPRSGEVATITPVRAGLSLSEGDGVPGQGCSEGLPAKSPGRSPDLAPHPGRALEDCSRGSVSKSSPASPEPGGDPQTVWYEYGCV

SEQ ID NO: 14323 - DNA, 2368 bp, Homo sapiens
  CDS (595)..(915)
ctgctccagttatgtaacccatgggcttccctttgcacagctcctcatgtgctcatctccatgctgatcaaaccaccccacctcattccttgccttctgcaaggggaagtgcctcaggctggagtttgtcctgtctacagactgaatatgcattttgcccagtggctggagatgtgctggtggtggaatgtgctggtgattgtttctggatggagagccacagccccccagtgttctgccatgactgactcctgaccttggcaaattgcctcctctctcccagcctcctccataacaggtggcgatgagtcccatttcctccctacctcacaggaaggcacgcattataaagggcacacttatcagatgtgcccagatgtggctggaacttttggagacagatacttggttcacaaccgcaaaggtgggctttcaccagagaagaaaatctctgggctgctgagttcagtgggctccttgcaggctggtccaggaagtctggtgttcctcctgaaggtggctgctatgtccagcaggtgatcaagctgacagtaccacaagaaccaagaaacagaatctgttcccaaggaatgaatgttctatctctctgacccaaaagcaagagcaagagagagctgtcaccatcatcaccctgctcccaacacaaacacagccccccaagtccatattgctgacaagggtatctgccttgtcagggtgaatcctctggacccccaggccatccctggagtggtcagtgcccactgtgccggggttattgtggccagtccgcctgggttcgcttctctaaatttccatgggataggaactatagatcatgaagaagaaacaggaaccttgactcttcacggaggagcccaggaggtcagaaccatccaccaggagggtgagcggtagctgcccagggcatccctggaggaagtcgtcatactgaggaagaaattgccaaagccaagagctcccagacctgggcagctcaggagctgacagaaaccaccccccaagtctggagttcaagggttttcctcgtgggctgctggtctgtctctttcccttctggggcagccgtctctcctccttcagctcattcccgtgttccatctgaggggcgggaggaaggcaggagggggagatggcaggacccagacagatcctcaggactctcccagcctctgttgccatggcaacactgctatttttatcccgttgttcatgatgctcaaagctctaactttctctgttccagagaggccaggctggtttctgccctcattctttaacacagcatcttctcccagaggcctgaggatgggaaaaagtgatggagaaaaggggaacccctaaggtcacccctcagccagggggaactgtttaacaggggtttgtctctgcccttttgagcctttggttttctacctggctcaggcacccaggtttatgttttctagatcaaaactctgcatggtctccctgagagactggagaagagctgccaatcaggatggattttttcctacacaggtatgacactgcagccacttcccttcttgggaaaattaaacttcattctgaagaatgtcctgttggtggtataagccaacccctgccctcctaaaaggggatagataattaaatttggttaattagcaatcagattcactggggaattgaaacccgtacttccctttcttctgtccctccaccaaagaaccggaacaaatggcttcatgtctttgtccagtctttctgcctaaagcaaaatagcatatattctccaggctgaaaagtagattcctcctcacccctactcaagacggccacatttcaatccaggctcttgaagacagggtctaatgaaaggatttctgttctttctctgtctgttccctctggcccagcttctagtcctctccttatgtccccacctccatggcagtggcaagagacccctgagagtcaatggtgctaacgttccccacctatatacccctatgtagtttatcgagatttgaacccagcacctgggtggctgtgttgggcggatacatttcacgtcctcaagaccacaaccctggcgacaggtctggattaattctgtaaagtagcaatctatatcatgctaaattcctgcactgaggttctacctcggctgaactgactcgtggatggttaagtttcctggggtggctggaacccatttactaagcctctaattggtttcattttggctcaagttgcatggtttcccgaatctatgcacctggagtaagcacttttctggttgccactgaaaagcatgccggcaaacgctgctctgttaattgctgtaataaacagactttattat

SEQ ID NO: 14324 - protein, 107 aa, Homo sapiens [sequence omitted]

SEQ ID NO: 14325 - DNA, 2210 bp, Homo sapiens
  CDS (203)..(1915)
aattccctaccctcgacctgtcgatgccccgcggccccgcccgccctcttaagcctggctcagccctcagggcccgcccgaagtctaccgagcccgagtggcctaccgagcccgagtggccccgcagcgtccaggaggcgcccgctccgcggtggcgctcttggaggtggtgtcggagagccgccgagcgtgcggtcccgggatggctctaccccggccaagtgaggccgtgcctcaggacaaggtgtgctacccgccggagagcagcccgcagaacctggccgcgtactacacgcctttcccgtcctatggacactacagaaacagcctggccaccgtggaggaagacttccaacctttccggcagctggaggccgcagcgtctgctgcccccgccatgccccccttccccttccggatggcgcctcccttgctgagcccgggtctgggcctacagagggagcctctctacgatctgccctggtacagcaagctgccaccgtggtacccaattccccacgtccccagggaagtgccgcccttcctgagcagcagccacgagtacgcgggtgccagcagtgaagatctgggccaccaaatcattggtggcgacaacgagagtggcccgtgttgtggacctgacactttaattccaccgccccctgcggatgcttctctgttacctgaggggctgaggacctcccagttattaccttgctcacccagcaagcagtcagaggatggtcccaaaccctccaaccaagaagggaagtcccctgctcggttccagttcacggaggaggacctgcacttcgttctgtacggggtcactcccagcctggagcacccagccagcctgcaccatgcgatttcaggcctcctggtccccccagacagctctggatctgattctcttcctcaaactctggataaagactcccttcaacttccagaaggtctatgcctcatgcagacggtgtttggtgaagtcccacattttggtgtgttctgcagtagttttatcgccaaaggagtcaggtttgggccctttcaaggtaaagtggtcaatgccagtgaagtgaagacctacggagacaattctgtgatgtgggagatctttgaagatggtcatttgagccactttatagatggaaaaggaggtacggggaactggatgtcctatgtcaactgtgcccgcttccccaaggagcagaacctagttgctgtgcagtgtcaagggcatatattttatgagagctgcaaagagatccatcagaaccaagagctccttgtgtggtatggagactgctatgagaaatttctggatattcctgtgagccttcaggtcacagagccggggaagcagccatctgggccctctgaagagtctgcagaaggctacagatgtgaaagatgtgggaaggtatttacctacaaatattacagagataagcacctcaagtacaccccctgtgtggacaagggcgataggaaatttccctgttctctctgcaaacgatcctttgagaagcgggaccggcttcggatccacattcttcatgttcatgagaagcaccggcctcacaagtgttctacatgtgggaaatgtttctctcagtcttccagcctaaacaaacacatgcgagtccactctggagacagaccataccagtgtgtgtattgtactaagaggttcacagcctccagcatactccgcacacacatcaggcagcactctggggagaagcccttcaaatgcaagtactgtggtaaatcttttgcatcccatgctgcccatgacagccatgtccggcgttcacacaaggaggacgatggctgctcatgcagcatctgtgggaaaatcttctcagatcaagaaacattctactcccacatgaagtttcatgaagactactagccctgccaggcacaatgactcacgcctgtaatcccagcactttgggaggcagaggtgggtggatcactcaagtccaggagttcgagaccagcctgggcaacatggtgaaatcctgtctctaccaaaaaaatacaaaaatcagctgggggtggtggcacatgcctgtggttccagccactcaggaggtcgaggtggcgggatggtttgagcacaggagacggaggttgctgtgagctgagatcgccccactgcttttcaacctgggtgacagaaccagaccctgtctcaaaac

SEQ ID NO: 14326 - protein, 571 aa, Homo sapiens
MALPRPSEAVPQDKVCYPPESSPQNLAAYYTPFPSYGHYRNSLATVEEDFQPFRQLEAAASAAPAMPPFPFRMAPPLLSPGLGLQREPLYDLPWYSKLPPWYPIPHVPREVPPFLSSSHEYAGASSEDLGHQIIGGDNESGPCCGPDTLIPPPPADASLLPEGLRTSQLLPCSPSKQSEDGPKPSNQEGKSPARFQFTEEDLHFVLYGVTPSLEHPASLHHAISGLLVPPDSSGSDSLPQTLDKDSLQLPEGLCLMQTVFGEVPHFGVFCSSFIAKGVRFGPFQGKVVNASEVKTYGDNSVMWEIFEDGHLSHFIDGKGGTGNWMSYVNCARFPKEQNLVAVQCQGHIFYESCKEIHQNQELLVWYGDCYEKFLDIPVSLQVTEPGKQPSGPSEESAEGYRCERCGKVFTYKYYRDKHLKYTPCVDKGDRKFPCSLCKRSFEKRDRLRIHILHVHEKHRPHKCSTCGKCFSQSSSLNKHMRVHSGDRPYQCVYCTKRFTASSILRTHIRQHSGEKPFKCKYCGKSFASHAAHDSHVRRSHKEDDGCSCSICGKIFSDQETFYSHMKFHEDY

SEQ ID NO: 14327 - DNA, 2293 bp, Homo sapiens
  CDS (138)..(1823)
ttgcagtggacacagctgctgggccatatcagaatcacactgtggtttttctgggatcagagaagggaatcatcttgaagtttttggccagaataggaaatagtggttttctaaatgacagccttttcctggaggagatgagtgtttacaactctgaaaaatgcagctatgatggagtcgaagacaaaaggatcatgggcatgcagctggacagagcaagcagctctctgtatgttgcgttctctacctgtgtgataaaggttccccttggccggtgtgaacgacatgggaagtgtaaaaaaacctgtattgcctccagagacccatattgtggatggataaaggaaggtggtgcctgcagccatttatcacccaacagcagactgacttttgagcaggacatagagcgtggcaatacagatggtctgggggactgtcacaattcctttgtggcactgaatgggcattccagttccctcttgcccagcacaaccacatcagattcgacggctcaagaggggtatgagtctaggggaggaatgctggactggaagcatttgcttgactcacctgacagcacagaccctttgggggcagtgtcttcccataatcaccaagacaagaagggagtgattcgggaaagttacctcaaaggccacgaccagctggttcccgtcaccctcttggccattgcagtcatcctggctttcgtcatgggggccgtcttctcgggcatcaccgtctactgcgtctgtgatcatcggcgcaaagacgtggctgtggtgcagcgcaaggagaaggagctcacccactcgcgccggggctccatgagcagcgtcaccaagctcagcggcctctttggggacactcaatccaaagacccaaagccggaggccatcctcacgccactcatgcacaacggcaagctcgccactcccggcaacacggccaagatgctcattaaagcagaccagcaccacctggacctgacggccctccccaccccagagtcaaccccaacgctgcagcagaagcggaagcccagccgcggcagccgcgagtgggagaggaaccagaacctcatcaatgcctgcacaaaggacatgccccccatgggctcccctgtgattcccacggacctgcccctgcgggcctcccccagccacatccccagcgtggtggtcctgcccatcacgcagcagggctaccagcatgagtacgtggaccagcccaaaatgagcgaggtggcccagatggcgctggaggaccaggccgccacactggagtataagaccatcaaggaacatctcagcagcaagagtcccaaccatggggtgaaccttgtggagaacctggacagcctgccccccaaagttccacagcgggaggcctccctgggtcccccgggagcctccctgtctcagaccggtctaagcaagcggctggaaatgcaccactcctcttcctacggggttgactataagaggagctaccccacgaactcgctcacgagaagccaccaggccaccactctcaaaagaaacaacactaactcctccaattcctctcacctctccagaaaccagagctttggcaggggagacaacccgccgcccgccccgcagagggtggactccatccaggtgcacagctcccagccatctggccaggccgtgactgtctcgaggcagcccagcctcaacgcctacaactcactgacaaggtcggggctgaagcgtacgccctcgctaaagccggacgtaccccccaaaccatcctttgctcccctttccacatccatgaagcccaatgatgcgtgtacataatcccagggggagggggtcaggtgtcgaaccagcaggcaaggcgaggtgcccgctcagctcagcaaggttctcaactgcctcgagtacccaccagaccaagaaggcctgcggcagagccgaggacgctgggtcctcctctctgggacacaggggtactcacgaaaactgggccgcgtggtttggtgaaggtttgcaacggcggggactcaccttcattctcttccttcactttcccccacaccctacaacaggtcggacccacaaaagacttcagttatcatcacaaacatgagccaaaagcacatacctaccccatcccccacccccccacacacacacacatgcacacaacacatacacacacacgcacagaggtgaacagaaactgaaacattttgtccacaacttcacgggacgtggccagactgggtttgcgttccaacctgcaaaacacaaatacatttttt

SEQ ID NO: 14328 - protein, 562 aa, Homo sapiens
MSVYNSEKCSYDGVEDKRIMGMQLDRASSSLYVAFSTCVIKVPLGRCERHGKCKKTCIASRDPYCGWIKEGGACSHLSPNSRLTFEQDIERGNTDGLGDCHNSFVALNGHSSSLLPSTTTSDSTAQEGYESRGGMLDWKHLLDSPDSTDPLGAVSSHNHQDKKGVIRESYLKGHDQLVPVTLLAIAVILAFVMGAVFSGITVYCVCDHRRKDVAVVQRKEKELTHSRRGSMSSVTKLSGLFGDTQSKDPKPEAILTPLMHNGKLATPGNTAKMLIKADQHHLDLTALPTPESTPTLQQKRKPSRGSREWERNQNLINACTKDMPPMGSPVIPTDLPLRASPSHIPSVVVLPITQQGYQHEYVDQPKMSEVAQMALEDQAATLEYKTIKEHLSSKSPNHGVNLVENLDSLPPKVPQREASLGPPGASLSQTGLSKRLEMHHSSSYGVDYKRSYPTNSLTRSHQATTLKRNNTNSSNSSHLSRNQSFGRGDNPPPAPQRVDSIQVHSSQPSGQAVTVSRQPSLNAYNSLTRSGLKRTPSLKPDVPPKPSFAPLSTSMKPNDACT

SEQ ID NO: 14329 - DNA, 2425 bp, Homo sapiens
tataattatatgttaaataaggcacataaccagtttccaaggtcatcatggttgcttaaagtctttccccttctgtactccatggaaatattctcagtaaaccaaaaacaaaaatggaaaaataatcaccaacccccatcccgacacacacacacagtccaaagcaaaagtcagtgtgtattgaatttaacaagtaatgcagtttgggatgcttttgctacattttggtggcattttaactagttatctgaatatttattaatcgtacttcctcttgtaaagttaactacttacttttttgttgttgtttttttaacatcaggttctgtatctaataggagatgtaacactttatttcatggcaggtttttattgcagagacttgaagtcttagttttttaaactggcacataaaacactttttgctgttatttttatttatgtcaatactgcagagtatctttatgccttattcaagtggattctgagcctgtatgtcacaatgtaaacactggaggttcactcacctacgcactcacccaccacctctgaaagaaacagaaactgcagagaaagacagcatcttagctcattttgtttttaaatgaggttttagacgcttgccacttcctaagggaaatcctaaaacagagcaagtgatgctcccaggtatcactgtgaacttttttctttcaaagtgtgaatttttacactggctttttcatttttttaaagtaattgaagcttgtggctttacaacttagtgttttttgctatccagataacaagtttcattgtttagaacccagtgacacttaataggtagataaattgtcctttaaaatatcccagatgatatacacaatatggtacatttgtgctctctctctctgtttttctctctttctctttctagttagatcaagataacgatgacttgtaccctccctgattctgttacagtagggcccgggcagatctgtgtttgttaaacaggccttgtttgtgcatgctttgctatgaatgaagttcctttaaggacaaagaaaagcacacttttcttcttttgagcatatctgcttttactttaaatctgctaatttctaaaatgtagagtccttcaccaatcccagagactcaatttggaaatgaactgatttcaagccgttactgtgaataaagcaccccagcattttgtataagctcttaattaaacctgtacagcttctttacctgatttaagaaagggagacaagcaataggggggaataagcttcttcaaaattcattccaagcacaaaagaaattttttccctttgcatataaacttgacatcagttgattctgttggggtcggggtgggtatgcagggattgccttttattatcaagtgatttatttcaagagcctttgaggggattcaggtgaaggaacccccatctgtgctggagagttggatactcctttaaatagcccccaccacagtcataacaataatgataatgctggattatttgttaagccaaggttgtctgcctcatatccatcatgctgtttgcaatattcttgctttcaatcaatttatactgagtgtaactttaggatttctgctattaaatgcatgctctctatcctgcttcagtttctggctttgctttgtctgtttcaaaatatgtagcttcctcttttgtacaacaaaaaactcattctcacttttactaaatatactgtaggagtcatcattgatgttatttttcccttatgtatctgtaaagatttttggcatatgaatgtaatattaaagtcaatgatgctataacttgcgatgtttgcatcatgtcaacctttttgaaggagtgaaaaagccctactatgtttttaaatagcaagtgtaagctcagtgctagagtggatatacacaccgcatgttttcatatgtggcacttttatgtatcatgttgggttattgttctagactggactgttaaatactatgtttgaggctgggttgtcatttttataactgtcttggtgttttatggccattatttattacttttgatacacagaatgagctgcatgcatttatagagcaataagaggatgtatttaatgtgccttgtttttaactgaataagaactggaagcatgaatcaataaaactgattaaaatggtctatttgctagcattttgatgttacttgcagtcagataactttgattactgttgaagtttaaaaaaagtttgaaaatatttttacaaactgtgtttttgatgacacaaaagtgaaatatctacagagatagatgtaattttataagactgccagaattatttgtattaatttgttgctgtagcctttagggcatgacttctgtatttgtgcaatcctattctacaattacattcatcctattacaactc

SEQ ID NO: 14330 - DNA, 1999 bp, Homo sapiens
  CDS (997)..(1467)
tgccagacccaaaaccgccagggccacctgtggcctcctcgtcctcggccactagcctgccgtggcccgtggtcatcggcatcccagccggcgctgtcttcatcctgggcaccctgctcctgtggctttgccaggcccagaagaagccgtgcacccccgcgcctgcccctcccctgcctgggcaccgcccgccggggacggcccgcgaccgcagcggagacaaggaccttccctcgttggccgccctcagcgctggccctggtgtggggctgtgtgaggagcatgggtctccggcagccccccagcacttactgggcccaggcccagttgctggccctaagttgtaccccaaactctacacagacatccacacacacacacacacacactctcacacacactcacacgtggagggcaaggtccaccagcacatccactatcagtgctagacggcaccgtatctgcagtgggcacgggggggccggccagacaggcagactgggaggatggaggacggagctgcagacgaaggcaggggacccatggcgaggaggaatggccagcaccccaggcagtctgtgtgtgaggcatagcccctggacacacacacacagacacacacactgcctggatgcatgtatgcacacacatgcgcgcacacgtgctccctgaaggcacacgtacgcacacacgcacatgcacagatatgccgcctgggcacacagataagctgcccaaatgcacgcacacgcacagagacatgccagaacatacaaggacatgctgcctgaacatacacacgcacacccatgcgcagatgtgctgcctggacacacacacacacacggatatgctgtctggacgcacacacgtgcagatatggtatccggacacacacgtgcacagatatgctgcctggacacacagataatgctgccttgacacacacatgcacggatattgcctggacacacacacacacacgtgtgcacagatatgctgtctggacacgcacacacatgcagatatgctgcctggacacacacttccagacacacgtgcacaggcgcagatatgctgcctggacacacgcagatatgctgtctagtcacacacacacgcagacatgctgtccggacacacacacgcatgcacagatatgctgtccggacacacacacgcacgcagatatgctgcctggacacacacacagataatgctgcctcaacactcacacacgtgcagatattgcctggacacacacatgtgcacagatatgctgtctggacatgcacacacgtgcagatatgctgtccggatacacacgcacgcacacatgcagatatgctgcctgggcacacacttccggacacacatgcacacacaggtgcagatatgctgcctggacacacgcagactgacgtgcttttgggagggtgtgccgtgaagcctgcagtacgtgtgccgtgaggctcatagttgatgagggactttccctgctccaccgtcactcccccaactctgcccgcctctgtccccgcctcagtccccgcctccatccccgcctctgtcccctggccttggcggctatttttgccacctgccttgggtgcccaggagtcccctactgctgtgggctggggttgggggcacagcagccccaagcctgagaggctggagcccatggctagtggctcatccccactgcattctccccctgacacagagaaggggccttggtatttatatttaagaaatgaagataatattaataatgatggaaggaagactgggttgcagggactgtggtctctcctggggcccgggacccgcctggtctttcagccatgctgatgaccacaccccgtccaggccagacaccaccccccaccccactgtcgtggtggccccagatctctgtaattttatgtagagtttgagctgaagccccgtatatttaatttattttgttaaacatgaaagtgcatcctttccctcc

SEQ ID NO: 14331 - protein, 157 aa, Homo sapiens
MLSGHAHTCRYAAWTHTSRHTCTGADMLPGHTQICCLVTHTRRHAVRTHTRMHRYAVRTHTRTQICCLDTHTDNAASTLTHVQILPGHTHVHRYAVWTCTHVQICCPDTHARTHADMLPGHTLPDTHAHTGADMLPGHTQTDVLLGGCAVKPAVRVP

SEQ ID NO: 14332 - DNA, 2102 bp, Homo sapiens
ttcaagagcagcctggccaacatggtgaaaccctgtctctactaaaaatacaaaagttggcctgttgtggtggcgcgcacctgtaatcccagctactcgggtggctggggcaggagaatcgcttgaacccaggaggcggagggtgcagtgagccgggatcacgccactgcacttcagcctgggtgacagagtgtgactccatctcaagaaaaacgagggagattagaaacctatgatcaggcattggctgaaacaaatggtaaattcttttggcagccttgagcttccccaggcagggacccaaaggggcctgggttatccctgagacagggccttgagctgctagaaactatgctagtgtttgttcaagtctctccgtgtccggggtgagcaaaattgtttgtgctgaaaatcaatgatttgcagctctcaagattccagtgggcagtctgggtgcctgagtttctgctttttttttttctttatgtacagggtcttgctctgtcacctaggctagagtgtaattagtggccccagtcatggctcactgcagctgcaaactggctgcaagctgttctggctcagcctaccaggttactgggcttacaggtggatgccaccgtacccaacagattttatttttgtagggatgggggtctccctgtattgcccaggctggtctcaaactcctggcctcccagggtgtttagattgcaggtgtaagccaccacacgtggccagcctctgcatttctaacaggttccaggtgatcttgatgttctgctggtccatgggtcacactttgagaagcatggttctaaaggactatacagattaaagtcattaatctctgtgggctttggacttgaagtttcagcagcctttgacaagcatttgcaggtttcctttttatttatttgataaactgagaatccacatgcaaagaaatgcaagaaaattcaaagaacgtaagaaaatgtccttgctgtaaagctggtggttctcaatctcggatacacagtagaatcacctggtgcgggggttgggggcggggtgcagtgtaaaaattattaaatcagaatctctggggtaggccccaagcaactttttttttttttttttagatagagtcttgcttgtcacctaggctggagtgcagtggtgcgatcatggctcactgccgccttaacttctgggctcaagtgatatcctcccgcctcggcctccctagtagctgggactacaggcgtggactaccacacccaacaaatttttaaattttttgtagaggcaagctcttatactatcttgcacaggctggtctcgaactcctgggctcaagcagtcatcctgcctcggccttccaaagctcggggattacagacatgagccacagcaccaggccaacaatatttcttaaagctcctggagtgattccaatatgcagccaaggttgaaaaccaccctttaaaaggctcggcatccagtgtggaagaccagcacactcacgtcaggagaccttacctggagccaggatgcccctgatcatctctgataactttaaaaggaagtcctcagaagcagccccagaagcaaaagtttctctctgaccttctcctgccctcttgtttctggcttttcattctcccccaaggctacccatagaaactagaatccctcttccccaaggcaggtcatcagaaaccagaaccggttttacccaaagccagccataaaacctaaaaatagtcctctcactccccattcccctttctgtgtaaaaactggttggaaagaaatgatctgacctaccgtgtttgactgtcgtaagatacccattccagagagggtcccaccccgtgcccagaaggaaggaatcctgcacagagaggccaagaagaatctagacagccttgctgggtttcccctctcagtctattactattagatcatacccttcttgtccaatcatatttctacacagtccataatctgttgaacctaaacataaaaatggacaattcccctgtatcttggggtcttcattctgagggctcacatacaattatgatcaaataaatttgtttgctttttctcctgtt

SEQ ID NO: 14333 - DNA, 1810 bp, Homo sapiens
  CDS (40)..(1353)
ttcaacttcgtggagctgcctgctgctgccctgcgcttcatgcccaagccggtgttcgtgccagacgtggccctcatcgccaaccgcttcaaccccgacaacctcatgcacgtctttcatgacgacctgctgccactcttctacaccctgcggcagtttcccggcctggcccacgaggcacggctcttcttcatggagggctggggcgagggtgcacacttcgacctctacaagctgctcagccccaagcagcctctcctgcgggcacagctgaagaccctgggccggctgctgtgcttctcccatgcttttgtgggcctctccaagatcactacctggtaccagtatggctttgtgcagccccagggcccgaaggccaacatcctcgtctcaggcaatgagatccggcagtttgcacggttcatgacagaaaagctgaacgtgagccacacaggagtccccctaggcgaggagtacattctggtctttagccgaacccagaacagactcattctgaatgaggcagagctgctgctggcactggcccaggagttccagatgaagacagtgacagtgtccctggaggaccacacctttgctgatgtcgtgcggctggtcagcaatgcctccatgctggtcagcatgcatggggcccagctggtcaccaccctcttcctgccccgtggggcaactgtggtagagctcttcccatatgctgtcaatcccgaccactacactccctataagacgctggccatgctgcctggcatggacctccagtatgtagcctggcggaacatgatgccagagaacacagtcacacaccctgagcggccctgggatcaggggggcatcacccatctggaccgggctgagcaagcccgtatcctacaaagccgtgaggtcccacggcatctctgttgccggaaccccgagtggctcttccgaatctaccaggacaccaaggtggacatcccatccctcattcaaaccatacggcgcgtggtgaagggccggccaggaccacggaagcagaagtggacagtcggcctatatccaggcaaggtgcgggaggcacggtgccaggcgtcagtgcatggcgcctccgaggcccgcctcactgtctcctggcagatcccatggaaccttaaatacctgaaggtgagggaggtgaagtacgaggtgtggctgcaggagcagggggagaacacctacgtgccttacatcctggctctgcagaaccacaccttcactgagaacatcaagcccttcaccacctacctggtgtgggtccgctgcatcttcaacaagatcctcctgggaccctttgcagatgtgctggtgtgcaacacgtagcgagcaggccacagcctggcctcgggaaggtggctcctgcagttcagcgtccctgggcccattaatcccactgtggagacttctgggaactatttattgagcaggcctgtgcctccacatcatcttgttgtctctggggtgtggtgtcacagcactcctctttgccctagagataagggacctgacttccccttctcccatcctgaacatttgtacccctggagaagttccttagcagggaggaggaagaggagaggaggaagcaaagaatcacaaggaacctctggctaggtgatcctgatgtttcctactgagtttttctggtatccagatttctggaaaccgagtaatcatgtactgtttgattgggtggttcatctgcttccatcccagtgaaatttacctgtagcccagtgaagggtgtgtttggaacattcattaaatgattctaagc

SEQ ID NO: 14334 - protein, 438 aa, Homo sapiens
MPKPVFVPDVALIANRFNPDNLMHVFHDDLLPLFYTLRQFPGLAHEARLFFMEGWGEGAHFDLYKLLSPKQPLLRAQLKTLGRLLCFSHAFVGLSKITTWYQYGFVQPQGPKANILVSGNEIRQFARFMTEKLNVSHTGVPLGEEYILVFSRTQNRLILNEAELLLALAQEFQMKTVTVSLEDHTFADVVRLVSNASMLVSMHGAQLVTTLFLPRGATVVELFPYAVNPDHYTPYKTLAMLPGMDLQYVAWRNMMPENTVTHPERPWDQGGITHLDRAEQARILQSREVPRHLCCRNPEWLFRIYQDTKVDIPSLIQTIRRVVKGRPGPRKQKWTVGLYPGKVREARCQASVHGASEARLTVSWQIPWNLKYLKVREVKYEVWLQEQGENTYVPYILALQNHTFTENIKPFTTYLVWVRCIFNKILLGPFADVLVCNT

SEQ ID NO: 14335 - DNA, 1995 bp, Homo sapiens
tgtcatacatattcgttctccattgatatatctggagaaatcaatgctacagcctatagctgtgaaaaaattctaccttatatttgcaggtgaagatttttctattagattatctacaaaaacaagctttcagtaaactaccaaaaaaaagtgggggtggaggaaaaaaggcaaaggcgccttctgagatcaaaaggaccagtgtattaatttgaggggttgggttattttaaccttggtgaattgttgtgtgtactcagagtgtattttctttgtgtagagcagaatgtacacattatagcagctcgccattgtgtttgcattttttaagaagtacatctttaactttgtatacacaagaaatgtcatatttttgagttttgtaatggaagaaccaggcacagaaacagacagaaatgatactgtatgtgtgtgtatttatgtctgaagaaagtccccttgaattctgatatctctttgaatctaagagatcctgatagcttcatgtttaagagcattgacaggtggggcacctctgaggggagttcattgtttctcatgcatcatttgccatatactattaatcaaagtgcttgctttcagtcctttgaggggacagataatctgaaggccagagattagagatttcactgatattttggacatacataagaaacatcattataattaataaaaagtaggtaatagcatataaatggttcttgacattttaaaagcctggttatgatcagttgacactttgagtacccccctaaatagctggactttccttttcatttcgtatttggaactaagtttgtagcgtatactcatctttcagaagtttggtaaacattgggattgtccctgcatctgaacatctttcccagtgctatcagtatacatctagagaggaaatgcaatgtgacagtgttacatttggagagaagtgtgaaatctaaccaatcgctagcacatatttgttgtaatacggtggtttatttcatgtttgcatactataaaatctgaattgatgtgaaatatctgtgcctttaaatttcttaaacctttaagctttttgttctgttttgcaacattttgtagtatttcttcccttccttagcacaaaatactggtttctaagtggttttgcttcaaaggatgtctagatgtaagtgattccacttaaagccaaaataaaaattcctaaagcagttcttaaaggagttagagagctatattaaacagtttttctgtggtataataatgtgtctcttactagaagtcccccacgaccaagttaaagatacttttcctgttggattctcttttacaaataagtctaaatgactgataatagaagattgttagtcttgcttgatggtaaagtcttggattattctgatatatagacgtgcattgttttgtaacttagttacttttcagataggtctgtgttaacttttgaacatgtgtaacttaacctaaatactcccaaactttacctctaaatttttgtttttatgttgtgaatgtgctaatatgtgcatcaactgtaaagatgtatcagttttattaaaatcagttgacaattagaataataaagtggataaaggcaaattaagatataggaccaaaacagaatattgtagatggcagttatgaatgtatatttatattttgattaagatttctattaactttttggctgggcagagtggcttacacctataatcccagcaatttgggaggccggggtgggcggatcacttgaggtcaggagttcgcgaccagcctacccaacatggtgaaaccccatctcttctaagaatacaaacattagccgggcgtggtggcacattcctgtagtcccagctactcgggaggctggggcaggagattcgcctgaacccgggaggcagaggttgcagtgagccgagattgtgccactgcactccagcctaggcgacagagtgagactccatctcaaattgg

SEQ ID NO: 14336 - DNA, 1982 bp, Homo sapiens
  CDS (647)..(1282)
aaaaaaaaaaaaaaaaactcagttgcctctggccagtgcagggctcagccagggatggcttctagctgacagtgggaggaattaattcatctgaccggaatattcttttctcttctgggctgttggtttttcaagtgcaacaaagattccatacagctccaaggaaggagccaagaaaaacattctgtgccaaagtgagatcctggaagtgaaaccccggaataaagctgaaaagcgggctccagttgggtgccaggaaatgcaggactggaatgtgacttgacttccggcagcgcgcaggtgctcccgggtcacctgctttgaggtccagcctcctgccctgcctcaggtgaccacatgaccactgtggactttgccctgaaaccttctgggaggagaagaggcctgaccttggcgctggggtccagtgggcattgctctggtccgaggctgctgctcttgacctctgctctgcggctgttttccattggagtagaggctcctcctgtcctgtcctgcctgtggagggaagcaaaccttcccctggaccagagagaggagaaagcggagacaggtagcaacgctgtggactggtgatgacaggctcttcagctccctgcaagtgaccgggcctggggaacagggcatggcacaggcacacaggaccccccagcccagggctgcccccagccagccccgtgtgttcaagctggttctcctgggaagtggctccgtgggtaagtccagcttggctcttcggtacgtgaagaacgacttcaagagtatcctgcctacggtgggctgtgcgttcttcacaaaggtggtggatgtgggtgccacctctctgaagcttgagatctgggacacagctggccaggagaagtaccacagcgtctgccacctctacttcaggggtgccaacgctgcgcttctggtgtacgacatcaccaggaaggattccttcctcaaggctcagcagtggctgaaggacctggaggaggagctgcacccaggagaagtcctggtgatgctggtgggcaacaagacggacctcagccaggagcgggaggtgaccttccaggaagggaaggagtttgccgacagccagaagttgctgttcatggaaacttcggccaaactgaaccaccaggtgtcggaggtgttcaatacagtggcccaagagctactgcagagaagcgacgaggagggccaggctctacggggggatgcagctgtggctctgaacaaggggcccgcgaggcaggccaaatgctgcgcccactaggtgcagccactcctgggggctgtggggaagacaccccctgcctgggccatggccagctctaggtggattctgattcactgtcaatgctgggttgctcccgagccctagatgttcctggaagttggccccctttatgaaaaccacttcccacagccagtgggaactgccagaggaagatctggcgtcacatggctcccaggaaagtgctgtgccctatccccactgataccatctgattccccgatgcctgtgcctgttccacctggacggtggccccctcagcctggcagcctctggacagagaggaaggaaggattggaaaagtccccgcagcacagcgacggtgggaagatgccttacgtctgatcttgatgggggcactggcctggagcctgggcccacctgcttctggggggttggggagcaggccagatggaggtggtggtgccaggaagaaatggagcgatgactgactgtggggtgggcccaggatttccacatcttggtgaagttgcccctgggaagggcagctgggggcagtggcgccagttcccttccatggtctcccggctggcaatgtggtgaagctgagtttctgtccaatgagcaggaagattctgagacatttcgcctgagatataagttgtactgcgtatgcagtttttcctccaaaaattaaattgcttttgacaatctg

SEQ ID NO: 14337 - protein, 212 aa, Homo sapiens
MAQAHRTPQPRAAPSQPRVFKLVLLGSGSVGKSSLALRYVKNDFKSILPTVGCAFFTKVVDVGATSLKLEIWDTAGQEKYHSVCHLYFRGANAALLVYDITRKDSFLKAQQWLKDLEEELHPGEVLVMLVGNKTDLSQEREVTFQEGKEFADSQKLLFMETSAKLNHQVSEVFNTVAQELLQRSDEEGQALRGDAAVALNKGPARQAKCCAH

SEQ ID NO: 14338 - DNA, 2248 bp, Homo sapiens
tttttttatgtgtttgtttaaagatacatattaagcttgtagaccatagggacatacggagagtccattgctaatatctcactcagtattgtgaaattctatctcaccaccgtgaaactcttcagttttctaattgctttatcagcagggggtataaaaggtcatgaaagcaatttccacatgctgtggctccaggtctctgggtgtgaagcagagcaagcctggtttgtcctcctcctgtctccacacagacggcttctgcaggtttggtaatctacagtacactccttgcagggaaaaggtgatgagtcatcatggacttatttgaccactttttatgcatgcttagaggaaaacagaatactgttaagagattcatctgctagttattaagtaaagaaatatcacaataggccgggcgcagtggctcacacctgtaatcccagcattttgggaggccaaggtgggcggatcacctgaggtcaggagttcgagaccagcctagccaacatggtgaaaccccgtctctactaaaattataaaaaattagccgggtgtagtggtacacgcctgtagtcccagttacttgggaggctgaggcatgagaattgcttgaacccaggaagtggaggtggaggtgagccgaaattgtgccactgtactccagcctgcaacagagtgagacactgtcacacaaaaaaagaaagaaatatcacaatatgtcacaataggccgggcgcagtggctcacacctgcagtcccagcactttgggaggccaaggcagatggatcacctgaggtcaggagtttgagaccagcctggccaacgtgacaaaacccagtctactaaaaatacaaaaattagccaggcgtgatggtgggcacctgtaatcccagctactcaggaggctgagacatgagaatcgcttgaacccaggaggtggagattgcactgagctgagatcctgccactgggctccagcctgggtgacagaatgagactctgtctttaaaaaaaaaaaaaaaaaaaaaaaatcacaataagtcctagggtaaagatgggggtacagaaaacaattaaatagaacaaaaacaactgtttccttttcctgtgattcaagaagggcttagatcttctactcagcatccttttactaatgccctccattggctctcaccccaacatttccttttttatagcttattttgtaatgcctccttaattatcctttaatagaagccaccgctgataagctacctacactcatacagaagcattaatataatgccccagatgtactgtttcagggcaaaaaggaaaataatttccaacaaagtggtgtgtgtctcactgtcagatgcttgcacttacacacggaatcgctgtgcatccgacagaggctgattggcacatggggcacggggattgtcagctcaaacaccgtcagcagcgttgcccttggaaatgggatttcccagaacagtaaacgtgtctgtccttgatttacagagtagctacattcctaggaaatccagggtacattaaaactcaccatgttacccaggctggtctcgaactccaggcctcaagcaatcctcccacatcagcttcccagaattttgggattacaggcatgagccaccacacccagccagaatattttatttctgttagacacagagcgttcgttgactcgtctgggcgttagtgttaatattctgtacttgaagcaagcccaccaagcggctgaactgggtggataatggaaaatgtcctgtggatttgggagtgagacaaaccggcttgagtctaacctctcagttagtctaaggctccaagcttgaaagggttaaatgaagtactatatttgttttgtttcgttttcgttttgtttgaggctttgctctgttgcccaggctggagtgtagtggcacaatctctgctcactgcaacctccatctcccaggttcaggcgattctcttgcctcagcctccagagtagctgggattacaggtgcccgccaccacacccggctaagttttttttggtatttttagtagacacagggtttcaccatgttggctagactggtctcgaactcctgacctcaagtgatccacctgccttggcctcccaaagtgctgggagtataggtggtgagccaccacgcctggcctaaatgaagtaccacatgaccgaccgaccgacctggggaacatagcaagaccccatctctacaaaaatgt

SEQ ID NO: 14339 - DNA, 2345 bp, Homo sapiens
  CDS (54)..(1733)
ctgtggatttcttggctggggacaggccccgggcagtgcctgctgctgttttcatggtcctcctgagctccctgtgtttgctgctccccgacgaggacgcattgcccttcctgactctcgcctcagcacccagccaagatgggaaaactgaggctccaagaggggcctggaagatactgggactgttctattatgctgccctctactaccctctggctgcctgtgccacggctggccacacagctgcacacctgctcggcagcacgctgtcctgggcccaccttggggtccaggtctggcagagggcagagtgtccccaggtgcccaagatctacaagtactactccctgctggcctccctgcctctcctgctgggcctcggattcctgagcctttggtaccctgtgcagctggtgagaagcttcagccgtaggacaggagcaggctccaaggggctgcagagcagctactctgaggaatatctgaggaacctcctttgcaggaagaagctgggaagcagctaccacacctccaagcatggcttcctgtcctgggcccgcgtctgcttgagacactgcatctacactccacagccaggattccatctcccgctgaagctggtgctttcagctacactgacagggacggccatttaccaggtggccctgctgctgctggtgggcgtggtacccactatccagaaggtgagggcaggggtcaccacggatgtctcctacctgctggccggctttggaatcgtgctctccgaggacaagcaggaggtggtggagctggtgaagcaccatctgtgggctctggaagtgtgctacatctcagccttggtcttgtcctgcttactcaccttcctggtcctgatgcgctcactggtgacacacaggaccaaccttcgagctctgcaccgaggagctgccctggacttgagtcccttgcatcggagtccccatccctcccgccaagccatattctgttggatgagcttcagtgcctaccagacagcctttatctgccttgggctcctggtgcagcagatcatcttcttcctgggaaccacggccctggccttcctggtgctcatgcctgtgctccatggcaggaacctcctgctcttccgttccctggagtcctcgtggcccttctggctgactttggccctggctgtgatcctgcagaacatggcagcccattgggtcttcctggagactcatgatggacacccacagctgaccaaccggcgagtgctctatgcagccacctttcttctcttccccctcaatgtgctggtgggtgccatggtggccacctggcgagtgctcctctctgccctctacaacgccatccaccttggccagatggacctcagcctgctgccaccgagagccgccactctcgaccccggctactacacgtaccgaaacttcttgaagattgaagtcagccagtcgcatccagccatgacagccttctgctccctgctcctgcaagcgcagagcctcctacccaggaccatggcagccccccaggacagcctcagaccaggggaggaagacgaagggatgcagctgctacagacaaaggactccatggccaagggagctaggcccggggccagccgcggcagggctcgctggggtctggcctacacgctgctgcacaacccaaccctgcaggtcttccgcaagacggccctgttgggtgccaatggtgcccagccctgagggcagggaaggtcaacccacctgcccatctgtgctgaggcatgttcctgcctaccatcctcctccctccccggctctcctcccagcatcacaccagccatgcagccagcaggtcctccggatcactgtggttgggtggaggtctgtctgcactgggagcctcaggagggctctgctccacccacttggctatgggagagccagcaggggttctggagaaaaaaactggtgggttagggccttggtccaggagccagttgagccagggcagccacatccaggcgtctccctaccctggctctgccatcagccttgaagggcctcgatgaagccttctctggaaccactccagcccagctccacctcagccttggccttcacgctgtggaagcagccaaggcacttcctcaccccctcagcgccacggacctctctggggagtggccggaaagctcccgggcctctggcctgcagggcagcccaagtcatgactcagaccaggtcccacactgagctgcccacactcgagagccagatatttttgtagtttttatgcctttggctattatgaaagaggttagtgtgttccctgcaataaacttgttcctg

SEQ ID NO: 14340 - protein, 560 aa, Homo sapiens
MVLLSSLCLLLPDEDALPFLTLASAPSQDGKTEAPRGAWKILGLFYYAALYYPLAACATAGHTAAHLLGSTLSWAHLGVQVWQRAECPQVPKIYKYYSLLASLPLLLGLGFLSLWYPVQLVRSFSRRTGAGSKGLQSSYSEEYLRNLLCRKKLGSSYHTSKHGFLSWARVCLRHCIYTPQPGFHLPLKLVLSATLTGTAIYQVALLLLVGVVPTIQKVRAGVTTDVSYLLAGFGIVLSEDKQEVVELVKHHLWALEVCYISALVLSCLLTFLVLMRSLVTHRTNLRALHRGAALDLSPLHRSPHPSRQAIFCWMSFSAYQTAFICLGLLVQQIIFFLGTTALAFLVLMPVLHGRNLLLFRSLESSWPFWLTLALAVILQNMAAHWVFLETHDGHPQLTNRRVLYAATFLLFPLNVLVGAMVATWRVLLSALYNAIHLGQMDLSLLPPRAATLDPGYYTYRNFLKIEVSQSHPAMTAFCSLLLQAQSLLPRTMAAPQDSLRPGEEDEGMQLLQTKDSMAKGARPGASRGRARWGLAYTLLHNPTLQVFRKTALLGANGAQP

SEQ ID NO: 14341 - DNA, 2279 bp, Homo sapiens
  CDS (97)..(1650)
atgccgacggactgtgtccggcgatgggcacgggcatttcttcgtttatagctgtctgtttgcattctgattgggaacactgggatcattttcatcatgccgacagtggtggtaatggatgtatccctttccatgacccgacctgtgtctattgaggggtccgaggaataccagcgtaagcacctagcagcccatggtttaacgatgctgtttgagcacatggccacaaattacaagcttgaatttacagcacttgtggttttttcatcactttgggagttgatggtccccttcacgagagattataataccctacaggaagcactaagtaatatggatgattatgacaaaacctgcttggagtctgcattagttggtgtttgcaatatcgttcagcaagaatggggtggtgcaattccttgccaggttgtcctggtgacagacggctgtcttggcattggtagagggtcactgcgacattccctagccactcaaaatcaacgaagtgagagcaacaggtttccactaccttttcctttcccatctaagttatatatcatgtgcatggcgaatttggaggagctccagagcaccgattccttggaatgccttgaacgtctcatatatttaaacaatggtgaagggcagatttttactattgatggccccctgtgcttgaagaatgtacagtctatgtttggaaaactgatagatttggcatatacgcctttccatgctgttctcaagtgtggccacctaactgctgatgtacaagtcttccccaggccagaaccttttgttgtagatgaagaaattgatcctatccctaaagtcattaacacagatttggaaatagtgggatttattgatatagctgatatttcaagtcccccagttctgtccagacatctggtcttacctatagcacttaacaaagaaggtgatgaggtgggtactggcatcactgatgacaatgaagatgaaaattcagccaatcagattgcaggcaaaatacccaacttttgtgtcctgctccatggtagcctaaaagtggaaggaatggtagcgattgttcaattaggtcctgaatggcatggaatgctctactcccaagctgacagcaagaagaaatcaaacctcatgatgtctctctttgagcctggcccagaacctctcccatggctagggaaaatggcacagttgggtcctatttcagatgctaaagaaaacccttatggcgaggatgacaataagagtccattccccctgcagcccaaaaacaaacgcagttatgcccagaatgtgactgtctggatcaaacccagcggcctgcagacagatgtacagaagattttaagaaatgcaaggaaactacctgaaaaaacacagacattctataaggagctgaaccgtttgcgaaaggccgctctagcctttggtttcctggacctgctgaaaggggtggctgacatgctggaaagggaatgcacactgctgcctgagacagcccaccctgatgctgcattccagctgacccatgctgcccagcagctcaagctggccagtaccggcacctctgagtatgccgcttatgaccagaacatcacacctttgcacacggacttctctgggagcagcactgaaagaatttgaaactgacttttggagctttccttcttttttcatttcaactgaaaatgctttaggtaaaaacctttccagtatgttcacctctagaatagccacccaaagaccttcctgaggctgcctcagaagcaccacttgctgttttgaatgactctactagtatgagaaggatgtgaaggtggttggctggttgggctttaacttcctgggattcataatttttaagcttggaagatagctgctgttcccatgatgggcacatttcctgagaagcttgaatgactgatgagcatagagcacccctgccttcctcaggaaacctgaccggcaggggctctctggcttcctgaaagcttcacctcttccctcgtttatatctcaactgtaagggcattttcaagcttctgttcatggaatgagcaactcagactgtctggagcttgctgagtacaaacacaccaccactaagtttcagaactttccttagaacttgggcaaaatgtggtggtaactcttaagtgcttttggtatctcttgagattctaacttttaaagagcaaccattaatgtgtaaaatgattcctattattcaaggtttttttttaatgaaaataaaatatttgattttctag

SEQ ID NO: 14342 - protein, 518 aa, Homo sapiens [sequence omitted]

SEQ ID NO: 14343 - DNA, 2113 bp, Homo sapiens
gttgcctagaatgcggtgagcgctgtgcacgggctgctgacctccgagcgcacaggcgcacgcatgctggccagaccctctacatctgcagtgagtgcggacaaagcttccgccacagcggccgtcttgacctacacttgggcgcacaccggcagcgatgccgcacttgcccctgccgcacatgcggccggcgcttcccgcacctcccggcgctgctgctacaccggcgccgccagcatctgccagagcggccccgccgctgcccgctgtgcgcccgcaccttccggcagagcgcgctgctcttccaccaggcgcgggcgcaccccttggggacaacctctgaccctgctgccccaccccaccgctgcgcgcagtgcccgcgagccttccgaagcggcgccgggctgcggagtcacgcgcgcatccacgtgtcccggagccccacgcgaccccgtgtctcagacgcccaccagtgtggcgtgtgcggcaagtgctttggcaagagctctacgctgacgcgacacctgcagacgcactcgggggagaaacccttcaagtgcccggagtgtggcaagggcttcctggagagcgccacgctggtgcgccaccagcgcacacacacgggcgagaagccgtacgcatgtggcgactgtggacgctgcttcagcgagagttccacgctgctgcgccatcggcgcagccatcagggcgagcggccacatgcgtgcgccacttgcggcaagggtttcgggcagcgctccgacctggtggtgcaccagcgcatccacacgggcgagaagcccttcgcgtgccccgagtgcggccgccgcttcagcgaccgctcggacctcaccaagcaccggcgcacgcacacgggcgagaagccctaccgctgcgaactgtgcggcaagcggttcacgtgcgtgtccaatctcaacgtgcatcggcgcaaccatgccggccacaagccacacaaatgccccgagtgcagcaaggccttcagcgtcgcctccaagcttgcactgcaccgcaagacgcacctgggcgaacggccagcggagtgcgcagagtgcggcaagtgcttcagccacagccgctcgctgtcacagcatcagcgggcccacacgcgcgcccgcaccgctgccgccgttgccatccagtccgcagtgggcactgccctcgtctttgaggggccggctgaacaggaaaagccagggttctctgtgtcctagttgagggaggcttgctgaggcttctctaaaggtggttgggcaagcacctatatagtatcacggggacagttgaggcaactcgtagatggagatttgggaaaagacgatgtggcctcctacctttccagtttctgttggcagcccttcacgtagcctcctgcctcgcctctacacctactaccctgtcggcccttttgccatgctgtcctcgtataactcggattctctcctcaggtgtaggtgcagggagtcagggaacccttagactcccctgtgtgcaagagcccaggtgttggtgtgtccctttaatgctactgtgctctctggtgtttctgattttcctgcctttattctgtcttctcttgtcctatctcattccagcccacatcttctcctttcctgattacttttgttgtcctgcctcttcaggtaatggtcacagatttggctgtaggcacgttaccagccctgtggcttcttgactcttggttccctgttaactctgtttctgagaaatgtgggtatggaggtgggtgggaaagctcacttccatgaaggatgtctccatgctaggagctgcctgcaccctggcagaggtggccagtcacgtgaaggtgggcagggcccttagcatggccacacatgtccccagggcagatcaaggggcctctcagaaccatgttccccagccaggtgaggaccattttcactgggacccaggccaaaaccatgtgggtgcacaaagccaggcactgccaagtggaacatgaggttatttccaaatcatgggagccaccagcagggagagggcaggatggaaaatcccctggagccggtcaactttttgctcatggctagtgaaataaagttgtttgagtact

SEQ ID NO: 14344 - DNA, 2108 bp, Homo sapiens
tacgttgtgcaatgccagttttaaatactaatataagtgcactgatctcatatgtggaatcacagaaattatgcaatttgtacttcatagcttatacatgcatatagattttgtttttaccagaaccacgctggtaaaaacagatgctgcacaaagtgaacttgcccgttttcatcgcactttacgtgcacgaattctacctctactctcgacctgggactcaccgatgcgtgaggaaggactgaaaagcaaaagaactatggactggccttttggcatgatcaggtgtctaatataaagaagtgcatgaataagaaaatatatgatatgagtgatggttaatactgactgtcaacttgattggattgaaggatgcaaagtattgatcctgggtgtgtctgtgagggtgttgccaaaggagattaacatttgagtcagtgggctgggaaagttcgacccactgttaatctagatggacaccatctaatcagatgccagtgcagctagaaatgtaaagcagacagaaaaatgcgaaaagagagactggcctagcctgccagcctacatctttctcccacgctggatgcttcctgccctcgaacatcagactccaagttcttcagtttgggacttggactggctctccttgttcctcagcttgaagactgcccattgtgggacttgtgatcatgtgctcaggaagtatgtgtggacttttgtcatgggttgaatagtgtccctcgcaaagttcacgtccacatggaacccgtgaatgtgaccgctgtggtttgaatgcttctgtcaaaacttaatccccaatgcaacaatacaaagaaatagggtctttaggaggtgagtggaagtcgacggccttataaaaggcttgactgagggagctcacccctttttgcccctcctgccccttccaccatgtgaggacgccgaggctgcattatctgtgaggaatggactctccccagacgctggacctgccagcatcttcaccttggactttccagcaaagactagaagaaataagtttctgttttttctacatgacccagtttcagatattttttagagcagcacaaccggactaacacagtgaccttagttggaaatcgggtcattgcagatatgatcaggttaaagacacacagggaggggccaccgtgcgaagatgggggcggagactgaagtgacctggccgccagccaggcaacaccaaggactgccaaacgactggactgtgtcgcttaagaaattaattctgtggaaatttcacatccatcggcaagttctccatgagaattttgtatcgtgttttccattctgatgaaaacttaaaaaatgatcacaggccttcttggaattatcaggacaacgacttttgtcatgttatttcaaggccacacttaaacgtttgcctccacttcagtgccctgtggtttcaaaaaatgtatcaggtcctaacagcagcatccttccctgtttcacattgtgtcaagttgaattctttaaccagctgtgagggcaaaatttctcgtagatcattggtagagcatttttatagacttcactttcttaagttacttagtaagcaaagactttgattcgacagaatttaaaagacctagtattgcaaactgatgctttctttaattgtcctggattaataggagcagaagcatacttaatgttaaagagatactgctgcatcaacaaggccaaatgaagtcatgttttacctaagcaataaaggtagcagaggttagacagaaaagcgtgctgggtgaactgagacctcctcccacaccggctgtggagccaagaggacctgggcctctgctgtcagcccaacacgctcccctcccagggatgtgtccgccagatcccaatatcatatacttcctcagaagcaattgcaacagtcagttctcagtcagtgtagcgggagatggcccacaaagaagttctcattcaatgacatatttttatttttcatgattgcattttggaatatattttaaaatgattggcctgtcaacataatggattggcagttaaaaataaccaggagaatatgtaaaaaataaaaagggtaaatt

SEQ ID NO: 14345 - DNA, 2339 bp, Homo sapiens
  CDS (92)..(2068)
agtcgctcctaacgctccctggcccggccggggccgcgcagttagggcatctgaggcggggagaagcggcggggagacgccggctgccagcatgtcgctgcctccggagaaagcctccgagctgaagcagctcatccaccagcagctgagcaagatggatgtccatggtagaataagagaaatccttgctgagactatacgggaagaattggcacctgatcaacagcatttatcaacagaagatttgatcaaagcccttagacgtcgaggaatcattgacgatgtgatgaaagaacttaattttgttactgacagtgttgagcaagaactcccttcctctccaaaacaacctatttgttttgatagacaatcgacattaaaaaaaactaatattgatccaacacggaggtatctttaccttcaggttttgggtggaaaagctttcttggaacatctgcaagaacctgagcctttacctggacaagtttgttcaacgtttactttatgtttacattatcgaaaccaacgttttcgttctaaacctgttccatgtgcctgtgaaccagattttcatgatggctttttacttgaagtacacagagaaagcttgggtgatggaactagaatggctgattcaacaacaatgttatcaataagtgatccaattcatatggtgctaatcaaaacagacatatttggtgagacgactttagtagcatcatattttctggaatggcgatcggttttgggctcagaaaatggagtgaccagtctgactgtggaacttatgggtgtaggcacagaatcaaaagtttctgtgggaattttaaatataaaacttgaaatgtatccaccactcaatcaaacgttatctcaagaagtagtgaacacacagcttgctttggaacgtcagaaaactgcagagaaagagcgattatttcttgtatatgctaagcagtggtggagagaatatttgcaaattcgaccctcacacaactcacgactggttaagatttttgcacaggatgaaagtgggataaatagaccagtctgttcctatgttaaaccacttcgagctggacggcttcttgatactccaaggcaagcagcaagatttgttaatgtccttggttatgaacgagcccctgttattggaggaggaggtaaacaggagcagtggtgcactctgctggcctttctctgtagaaacaagggtgactgtgaagatcacgctaaccttctgtgcagccttcttcttggatatggattagaagcctttgtttgtgttgggaccaaggcaaaaggagtacctcatgcatgggttatgacttgtggaactgatggggccatcactttttgggagagtttaacaggacacaggtacatccataaacctaccaatcctgatgaacctccagttgctgaacagcccaaaccactgtacccatatcgaacaattggttgtgttttcaaccatcagatgttcctgggaaattgtcaaccctctgatgcagtagaaacctgtgtatttgatttgaacgatgaatccaaatggaaacccatgagtgaggaagcaattaaatctgtgtgtgctcctggagctacaacatcccttcctccctttccacctctgtgtgcatccacaattgacgcgtcagtaacaagtaatgaaattgaaatgcagctgaggctcctggtgtcagaacacaggaaggatcttggcctcactactgtttgggaagaccagctctcctaccttttatcaccagctttggcttcttatgaatttgagcgtacaacaagtatatcagcaggcaatgaagaatttcaagatgccataagaagggctgtacctgatggtcacacatttaaagggttcccaatacattttgtgtatagaaatgcaggacgtgcatttgccacatgtcttcgatctcctttctgtgaagaaataatctgttgccgtggagaccaagtgcgactggcagttcgtgtccgagtatttacttaccctgaatctgcatgtgctgtttggatcatgtttgcttgtaaatatcgctcggtattatagggccaatatttatataagatttatacctgtgtttaattggaattttacacattgtacattacttagctatttagaggtttgttattttaaaatcacaatctggcttgaatggcatacttcaattttgtatatacttgactggtaatgtttaaaaaaaatcatgcattcctttaaaaattaaggctgaaaaacttgtataaatctccctggaatttagtataaattaagtgtatattctattttaataaatgctactttgtttacagtt

SEQ ID NO: 14346 - protein, 659 aa, Homo sapiens
MSLPPEKASELKQLIHQQLSKMDVHGRIREILAETIREELAPDQQHLSTEDLIKALRRRGIIDDVMKELNFVTDSVEQELPSSPKQPICFDRQSTLKKTNIDPTRRYLYLQVLGGKAFLEHLQEPEPLPGQVCSTFTLCLHYRNQRFRSKPVPCACEPDFHDGFLLEVHRESLGDGTRMADSTTMLSISDPIHMVLIKTDIFGETTLVASYFLEWRSVLGSENGVTSLTVELMGVGTESKVSVGILNIKLEMYPPLNQTLSQEVVNTQLALERQKTAEKERLFLVYAKQWWREYLQIRPSHNSRLVKIFAQDESGINRPVCSYVKPLRAGRLLDTPRQAARFVNVLGYERAPVIGGGGKQEQWCTLLAFLCRNKGDCEDHANLLCSLLLGYGLEAFVCVGTKAKGVPHAWVMTCGTDGAITFWESLTGHRYIHKPTNPDEPPVAEQPKPLYPYRTIGCVFNHQMFLGNCQPSDAVETCVFDLNDESKWKPMSEEAIKSVCAPGATTSLPPFPPLCASTIDASVTSNEIEMQLRLLVSEHRKDLGLTTVWEDQLSYLLSPALASYEFERTTSISAGNEEFQDAIRRAVPDGHTFKGFPIHFVYRNAGRAFATCLRSPFCEEIICCRGDQVRLAVRVRVFTYPESACAVWIMFACKYRSVL

SEQ ID NO: 14347 - DNA, 2287 bp, Homo sapiens
  CDS (100)..(939)
gacttcttcgggtggtccccgtccgccctcctcgtccctacccagtttcttgcttccctgccccatctccgccgctccccgcagcctccgccgagcgccatggctcctaggaagggcagtagtcgggtggccaagaccaactccttacggaggcggaagctcgcctcctttctgaaagacttcgaccgtgaagtggaaatacgaatcaagcaaattgagtcagacaggcagaacctcctcaaggaggtggataacctctacaacatcgagatcctgcggctccccaaggctctgcgcgagatgaactggcttgactacttcgcccttggaggaaacaaacaggccctggaagaggcggcaacagctgacctggatatcaccgaaataaacaaactaacagcagaagctattcagacacccctgaaatctgccaaaacacgaaaggtaatacaggtagatgaaatgatagtggaagaggaagaagaagaagaaaatgaacgtaagaatcttcaaactgcaagagtcaaaaggtgtcctccatccaagaagagaactcagtccatacaaggaaaaggaaaagggaaaaggtcaagccgtgctaacactgttaccccagccgtgggccgattggaggtgtccatggtcaaaccaactccaggcctgacacccaggtttgactcaagggtcttcaagacccctggcctgcgtactccagcagcaggagagcggatttacaacatctcagggaatggcagccctcttgctgacagcaaagagatcttcctcactgtgccagtgggcggcggagagagcctgcgattattggccagtgacttgcagaggcacagtattgcccagctggatccagaggccttgggaaacattaagaagctctccaaccgtctcgcccaaatctgcagcagcatacggacccacaaatgagacaccaaagttgacaggatggacttttaatgggcacttctgggaccctgaagagacttcttcccttcaggcttattgtttgagtgtgaagttccagagcaaggagccatgttcctctaagggaattcaggaattcagacgtgctagtcccacaccagttaggtagagctgtctgttcaccctcccatcccagctgatcccagtcactgcttgctggggccatgccatggaagcttcccatcagtctcccagctgaatcctccctgctctctgagctgctgccttttgcctcctgcaactcaacatcctcttcaccctgccctgcctgcagttgagggggcgaagaagaaccctgtgttctcaggaagactgcctccaccaccgctacccagagaacctctgcatctggcatttctgctctctatgcttgagaccgggaggtttaggctcagataagtgagctctgggccatgagagggtaggtccagaaggtggggggaactgtacagatcagcagagcaggacagttggcagcagtgacctcagtagggaacatgtccgtctaccctctcgcactcatgacacctccccctaccagccctcctcttcctcctcctcctcctcctgtgggaggtggtcagtgggacttagggatctttcacctgctgtgcccagtagttctgaagtctgcttgtggagcagtgttttatgtttatccctgtttactgaagaccaaatactggtttggagacaacttccatgtcttgctcttctacctccctagttagtggaaatttggataagggaactgtagggcccagattctggaggttttatgtcattggccacagaataactgtctctaagctatccatggtccagtggtccctgccaagtctgtagacttcagagagcacttctctcttatggggttcatgggaacaggggcgggtgtgacttgcttggtggcctcattccatgtgtgcctgtgcctggggcatggactttgttaagcagagtcagcagtgaggtcctcattctccagccagcctctctgccctggagaatcatgtgctatgttctaagaatttgagaactagagtcctcatccccaggcttgaaggcacatggctttctcatgtagggctctctgtggtatttgttattattttgcaacaagaccattttagtaaaacagtcctgttcaagttgtattcttttaagttcttttattctcctttccctgagatttttgtatatattgttctgagtaatggtatctttgagctgattgttctaatcagagctggtacctactttcaataaattctggttttgtgttttc

SEQ ID NO: 14348 - protein, 280 aa, Homo sapiens; identical to SEQ ID NO: 11420

SEQ ID NO: 14349 - DNA, 2339 bp, Homo sapiens
  CDS (20)..(2338)
attccgctactgcgcaaagatggtggaggaggagaacatccgcgtggttcgttgtggcggcagcgagttgaactttaggagagctgtgttctctgcagattctaagtatatcttctgtgtctctggagactttgttaaagtttacagcacagttacagaagagtgtgtacacatactgcatggacacagaaatctggtgactggaatccagcttaaccccaacaaccatctacagctgtattcttgttcccttgatggcacaattaaactgtgggactatatagatggcatcttaataaagactttcatagttggatgtaaacttcatgccctctttactcttgcccaagctgaggattctgtctttgttatagtgaataaagaaaaaccagatatatttcagctggtttcagtgaaactgccaaaatcctcaagccaggaagtagaagccaaggagctgtcctttgttttggattacataaaccagtcacccaagtgcattgcctttggaaacgagggagtatatgttgctgcagtacgggaattttacttgtctgtttattttttcaaaaagaaaacaacatcaaggtttactttatcatcatcaagaaataagaagcatgctaaaaacaattttacgtgtgtagcatgtcacccaacggaagactgcatcgcatctggtcacatggatggcaaaattcgtctttggaggaatttttatgatgataagaaatatacgtacacatgtttacattggcaccatgatatggttatggatttggctttttcagtgacaggcaccagtctgctgagtggcggtcgtgaatctgtacttgtagagtggcgcgatgcaacagagaagaataaggagtttctcccgcgtttaggagctactattgaacatatctcagtctcgcctgcaggagatttattctgcacttctcactctgataataagataataattattcaccgaaaccttgaagcatccgcagtaattcaaggcctagtgaaagataggagtatcttcactggtttgatgattgatccaagaactaaagctttggttttgaatggaaaacctggccacctgcagttttattctctccagagtgataaacagttatacaatttagatattatacagcaagaatatattaatgattatggtctgatccaaattgaactaacaaaggctgcatttggctgctttggtaactggcttgcaacagtggaacagcggcaagaaaaggaaactgagcttgaattgcaaatgaaactgtggatgtataataagaaaacacaagggtttattcttaacactaaaattaacatgccacacgaagactgcattacagctctctgtttctgtaatgcagaaaaatctgaacagcccaccttggttacagctagcaaagatggttacttcaaagtatggatattaacagatgacactgacatatacaaaaaagctgttggctggacctgtgactttgttggtagttatcacaagtatcaagcaactaactgttgtttctccgaagatggttctttactagcagttagttttgaggaaatagtcacaatatgggattctgtaacatgggaacttaaatgtacattttgccaacgagctgggaaaataaggcacctttgctttgggagattgacgtgttcaaagtatctacttggtgctactgaaaatggcattctttgctgttggaatctgctgagctgtgcattggagtggaatgcaaaattaaatgttagagttatggaacccgatcctaattcagagaatattgctgcaatctctcagtcttcagtgggttcagacttgtttgtatttaaacctagtgagccaaggccattgtatattcaaaagggtatctccagagagaaagtccagtggggagtgtttgttccacgagatgtccctgaatccttcacctcagaagcttaccagtggctaaatagatcccagttttacttcctaacaaaatcacagagtttattgacattcagtacaaagtctccagaagaaaaactcacaccaacaagcaaacagctgctagcagaagaaagtcttcccacaaccccattttatttcatattgggaaaacacaggcaacagcaggatgaaaaactaaacgaaactttagagaatgagctggtacaactacccttaacagaaaacatacccgcaattagtgagcatcttcacactccagcccatgtcctgccatctgctgctttcctgtgctccatgtttgtaaattcattgctgctgtctaaagagactaagagtgctaaggaaattcctgaagatgtagatatgg

SEQ ID NO: 14350 - protein, 773 aa, Homo sapiens
MVEEENIRVVRCGGSELNFRRAVFSADSKYIFCVSGDFVKVYSTVTEECVHILHGHRNLVTGIQLNPNNHLQLYSCSLDGTIKLWDYIDGILIKTFIVGCKLHALFTLAQAEDSVFVIVNKEKPDIFQLVSVKLPKSSSQEVEAKELSFVLDYINQSPKCIAFGNEGVYVAAVREFYLSVYFFKKKTTSRFTLSSSRNKKHAKNNFTCVACHPTEDCIASGHMDGKIRLWRNFYDDKKYTYTCLHWHHDMVMDLAFSVTGTSLLSGGRESVLVEWRDATEKNKEFLPRLGATIEHISVSPAGDLFCTSHSDNKIIIIHRNLEASAVIQGLVKDRSIFTGLMIDPRTKALVLNGKPGHLQFYSLQSDKQLYNLDIIQQEYINDYGLIQIELTKAAFGCFGNWLATVEQRQEKETELELQMKLWMYNKKTQGFILNTKINMPHEDCITALCFCNAEKSEQPTLVTASKDGYFKVWILTDDTDIYKKAVGWTCDFVGSYHKYQATNCCFSEDGSLLAVSFEEIVTIWDSVTWELKCTFCQRAGKIRHLCFGRLTCSKYLLGATENGILCCWNLLSCALEWNAKLNVRVMEPDPNSENIAAISQSSVGSDLFVFKPSEPRPLYIQKGISREKVQWGVFVPRDVPESFTSEAYQWLNRSQFYFLTKSQSLLTFSTKSPEEKLTPTSKQLLAEESLPTTPFYFILGKHRQQQDEKLNETLENELVQLPLTENIPAISEHLHTPAHVLPSAAFLCSMFVNSLLLSKETKSAKEIPEDVDM

SEQ ID NO: 14351 - DNA, 2082 bp, Homo sapiens
  CDS (11)..(1336)
agagctcggcatgggtgactccaccagccagtcccccccaattaagaggtcatgcccagatgtgcagatctcatggaaccaagggattgacttgtggtggcatgagctcatgcaagaggcaggggatgagtgtgagcccgagtggtgtgatgccgaggacccactcttcatcctgtacaccagtggctccacaggcaaacccaagggtgtggttcacacagttgggggctacatgctctatgtagccacaaccttcaagtatgtgtttgacttccatgcagaggatgtgttctggtgcacggcagacattggttggatcactggtcattcctacgtcacctatgggccactggccaatggtgccaccagtgttttgtttgaggggattcccacatatccggacgtgaaccgcctgtggagcattgtggacaaatacaaggtgaccaagttctacacagcacccacagccatccgtctgctcatgaagtttggagatgagcctgtcaccaagcatagccgggcatccttgcaggtgttaggcacagtgggtgaacccatcaaccctgaggcctggctatggtaccaccgggtggtaggtgcccagcgctgccccatcgtggacaccttctggcaaacagagacaggtggccacatgttgactccccttcctggtgccacacccatgaaacccggttctgctactttcccattctttggtgtagctcctgcaatcctgaatgagtccggggaagagttggaaggtgaagctgaaggttatctggtgttcaagcagccctggccagggatcatgcgcacagtctatgggaaccacgaacgctttgagacaacctactttaagaagtttcctggatactatgttacaggagatggctgccagcgggaccaggatggctattactggatcactggcaggattgatgacatgctcaatgtatctggacacctgctgagtacagcagaggtggagtcagcacttgtggaacatgaggctgttgcagaggcagctgtggtgggccaccctcatcctgtgaagggtgaatgcctctactgctttgtcaccttgtgtgatggccacaccttcagccccaagctcaccgaggagctcaagaagcagattagagaaaggattggccccattgccacaccagactacatccagaatgcacctggcttgcctaaaacccgctcagggaaaatcatgaggcgagtgcttcggaagattgctcagaatgaccatgacctcggggacatgtctactgtggctgacccatctgtcatcagtcacctcttcagccaccgctgcctgaccatccagtgaacatgatcctgacctttacctaggattcctcctgctccaaactttgcccatcctctttgccccctcaggagtgctgagggccagtgttgacccacactaccctcccttgaccagctgtctgggaccggaaaccagctttgtctccaggtagagacaacatcctgtgactgccaggcagaaaggacagggcccaggtcagcctcagtctgctgtgcctccagactgcagagctctcagaacccagaacagagacgaaaaggctacctctcctacccaagttaagtgttcaaaggggatgtgagggcctccactgaagcagggaggcagctgtgtaatcctatgtcagctctcttaggaagccccagtacttatattgggcatgcacttgcccttaaaaacaatgatttgtgagtccaggaacaatttactatttttaaaatattttgctgcttctgttctgggtctgaattcccttttgtgccagatgccagtactgtctgcccattggctccaggggctgtatgggcagattcagtctccagagggtattcagatcatctgcttctttgaaggagtaaatgtgttttgttcctagggccagaggagcttgtcttccttgtcctctgttcccaccctcccctgaacaggacccagcccataagagacattctcagatgaaactctgttttcttgccccagtcaggctcaagccctgtggttgtaggaataaagcctgtgatctc

SEQ ID NO: 14352 - protein, 442 aa, Homo sapiens [sequence omitted]

SEQ ID NO: 14353 - DNA, 1993 bp, Homo sapiens
  CDS (87)..(1181)
tacgaagcgagcttgggaggagcagcggcctgcggggcagaggagcatcccgtctaccaggtcccaagcggcgtggcccgcgggtcatggccaaaggagaaggcgccgagagcggctccgcggcggggctgctacccaccagcatcctccaaagcactgaacgcccggcccaggtgaagaaagaaccgaaaaagaagaaacaacagttgtctgtttgcaacaagctttgctatgcacttgggggagccccctaccaggtgacgggctgtgccctgggtttcttccttcagatctacctattggatgtggctcaggtgggccctttctctgcctccatcatcctgtttgtgggccgagcctgggatgccatcacagaccccctggtgggcctctgcatcagcaaatccccctggacctgcctgggtcgccttatgccctggatcatcttctccacgcccctggccgtcattgcctacttcctcatctggttcgtgcccgacttctcacacggccagacctattggtacctgcttttctattgcctctttgaaacaatggtcacgtgtttccatgttccctactcggctctcaccatgttcatcagcaccgagcagactgagcgggattctgccaccgcctatcggatgactgtggaagtgctgggcacagtgctgggcacggcgatccagggacaaatcgtgggccaagcagacacgccttgtttccaggacctcaatagctctacagtagcttcacaaagtgccaaccatacacatggcaccacctcacacagggaaacgcaaaaggcatacctgctggcagcgggggtcattgtctgtatctatataatctgtgctgtcatcctgatcctgggcgtgcgggagcagagagaaccctatgaagcccagcagtctgagccaatcgcctacttccggggcctacggctggtcatgagccacggcccatacatcaaacttattactggcttcctcttcacctccttggctttcatgctggtggaggggaactttgtcttgttttgcacctacaccttgggcttccgcaatgaattccagaatctactcctggccatcatgctctcggccactttaaccattcccatctggcagtggttcttgacccggtttggcaagaagacagctgtatatgttgggatctcatgagcagtgccatttctcatcttggtggccctcatggagagtaacctcatcattacatatgcggtagctgtggcagctggcatcagtgtggcagctgccttcttactaccctggtccatgctgcctgatgtcattgacgacttccatctgaagcagccccacttccatggaaccgagcccatcttcttctccttctatgtcttcttcaccaagtttgcctctggagtgtcactgggcatttctaccctcagtctggactttgcagggtaccagacccgtggctgctcgcagccggaacgtgtcaagtttacactgaacatgctcgtgaccatggctcccatagttctcatcctgctgggcctgctgctcttcaaaatgtaccccattgatgaggagaggcggcggcagaataagaaggccctgcaggcactgagggacgaggccagcagctctggctgctcagaaacagactccacagagctggctagcatcctctagggcccgccacgttgcccgaagccaccatgcagaaggccacagaagggatcaggacctgtctgccggcttgctgagcagctggactgcaggtgctaggaagggaactgaagactcaaggaggtggcccaggacacttgctgtgctcactgtggggccggctgctctgtggcctcctgcctcccctctgcctgcctgtggggccaagccctggggctgccactgtgaatatgccaaggactgatcgggcctagcccggaacactaatgtagaaaccttttttttacagagcctaattaataacttaatgactgtgt

SEQ ID NO: 14354 - protein, 365 aa, Homo sapiens
MAKGEGAESGSAAGLLPTSILQSTERPAQVKKEPKKKKQQLSVCNKLCYALGGAPYQVTGCALGFFLQIYLLDVAQVGPFSASIILFVGRAWDAITDPLVGLCISKSPWTCLGRLMPWIIFSTPLAVIAYFLIWFVPDFSHGQTYWYLLFYCLFETMVTCFHVPYSALTMFISTEQTERDSATAYRMTVEVLGTVLGTAIQGQIVGQADTPCFQDLNSSTVASQSANHTHGTTSHRETQKAYLLAAGVIVCIYIICAVILILGVREQREPYEAQQSEPIAYFRGLRLVMSHGPYIKLITGFLFTSLAFMLVEGNFVLFCTYTLGFRNEFQNLLLAIMLSATLTIPIWQWFLTRFGKKTAVYVGIS

SEQ ID NO: 14355 - DNA, 2118 bp, Homo sapiens
  CDS (43)..(2010)
attggcgtccgagcgacttctaggagcctggggttcggcgctatggaggagctcgatggcgagccaacagtcactttgattccaggcgtgaattccaagaagaaccaaatgtattttgactggggtccaggggagatgctggtatgtgaaacctccttcaacaaaaaagaaaaatcagagatggtgccaagttgcccctttatctatatcatccgtaaggatgtagatgtttactctcaaatcttgagaaaactcttcaatgaatcccatggaatctttctgggcctccagagaattgacgaagagttgactggaaaatccagaaaatctcaattggttcgagtgagtaaaaactaccgatcagtcatcagagcatgtatggaggaaatgcaccaggttgcaattgctgctaaagatccagccaatggccgccagttcagcagccaggtctccattttgtcagcaatggagctcatctggaacctgtgtgagattctttttattgaagtggccccagctggccctctcctcctccatctccttgactgggtccggctccatgtgtgcgaggtggacagtttgtcggcagatgttctgggcagtgagaatccaagcaaacatgacagcttctggaacttggtgaccatcttggtgctgcagggccggctggatgaggcccgacagatgctctccaaggaagccgatgccagccccgcctctgcaggcatatgccgaatcatgggggacctgatgaggacaatgcccattcttagtcctgggaacacccagacactgacagagctggagctgaagtggcagcactggcacgaggaatgtgagcggtacctccaggacagcacattcgccaccagccctcacctggagtctctcttgaagattatgctgggagacgaagctgccttgttagagcagaaggaacttctgagtaattggtatcatttcctagtgactcggctcttgtactccaatcccacagtaaaacccattgatctgcactactatgcccagtccagcctggacctgtttctgggaggtgagagcagcccagaacccctggacaacatcttgttggcagcctttgagtttgacatccatcaagtaatcaaagagtgcagcatcgccctgagcaactggtggtttgtggcccacctgacagacctgctggaccactgcaagctcctccagtcacacaacctctatttcggttccaacatgagagagttcctcctgctggagtacgcctcgggactgtttgctcatcccagcctgtggcagctgggggtcgattactttgattactgccccgagctgggccgagtctccctggagctgcacattgagcggatacctctgaacaccgagcagaaagccctgaaggtgctgcggatctgtgagcagcggcagatgactgaacaagttcgcagcatttgtaagatcttagccatgaaagccgtccgcaacaatcgcctgggttctgccctctcttggagcatccgtgctaaggatgccgcctttgccacgcccgtgtcagacaggttcctcagggattactgtgagcgaggctgcttttctgatttggatctcattgacaacctggggccagccatgatgctcagtgaccgactgacattcctgggaaagtatcgcgagttccaccgtatgtacggggagaagcgttttgccgacgcagcttctctccttctgtccttgatgacgtctcggattgcccctcggtctttctggatgactctgctgacagatgccttgccccttttggaacagaaacaggtgattttctcagcagaacagacttatgagttgatgcggtgtctggaggacttgacgtcaagaagacctgtgcatggagaatctgataccgagcagctccaggatgatgacatagagaccaccaaggtggaaatgctgagactttctctggcacgaaatcttgctcgggcaattataagagaaggctcactggaaggttcctgagaactgcttcaatgtggtatctttgtatggcaatgtatatagattttttaaaagaataaatgttgttttgcaaatgtaaaaaaaaaaaaaaaaaaggccacatgt

SEQ ID NO: 14356 - protein, 656 aa, Homo sapiens [sequence omitted]

SEQ ID NO: 14357 - DNA, 1923 bp, Homo sapiens
  CDS (97)..(957)
aagaatgccgactacttctccaactatgtcacagaggactttaccacctacattaacaggaagcggaaaaacaattgccatggcaaccacattgagatgcaggccatggcagagatgtacaaccgtcctgtggaggtgtaccagtacagcacaggtacttctgcagtggaacccatcaacacattccatgggatacatcaaaacgaggacgaacccattcgtgttagctaccatcggaatatccactataattcagtggtgaatcctaacaaggccaccattggtgtggggctgggcctgccatcattcaaaccagggtttgcagagcagtctctgatgaagaatgccataaaaacatcggaggagtcatggattgaacagcagatgctagaagacaagaaacgggccacagactgggaggccacaaatgaagccatcgaggagcaggtggctcgggaatcctacctgcagtggttgcgggatcaggagaaacaggctcgccaggtccgaggccccagccagccccggaaagccagcgccacatgcagttcggccacagcagcagcctccagtggcctggaggagtggactagccggtccccgcggcagcggagttcagcctcgtcacctgagcaccctgagctgcatgctgaattgggcatgaagcccccttccccaggcactgttttagctcttgccaaacctccttcgccctgtgcgccaggtacaagcagtcagttctcggcaggggccgaccgggcaacttccccccttgtgtccctctaccctgctttggagtgccgggccctcattcagcagatgtccccctctgcctttggtctgaatgactgggatgatgatgagatcctagcttcggtgctggcagtgtcccaacaggaatacctagacagtatgaagaaaaacaaagtgcacagagacccgcccccagacaagagttgatggagacccagggattggacaccatctcccaaccccagtactcctgctctccggtgccacctcaccttctttggcttcttccctcttgcctccttctgttctttctgctctcccctcttttccctcctcctcacttccctctggctagcccacccctgcactctctctcattgccgctgccactatcacctgtctctctgccagctgatgtgccctgttgccccccaccccatcccgcacagaaccatccctgcattccacaggggactcgggcaagggtgccgaagatagacaagaggcacacagagacagaccaactggcagccaggcagccccagaggagagagacattcagacagaggaaagtctccctgcccctcattccttccaagatgagaaaaacttgccgccaccccccgacactgatgccagggaggtgggaggaagaagtgggaaatttcccttcccagtacccccaagaacgtctgagccttcaatgttgaattttttctttattaaaattacttttatcttataaaatcaactaatcaaaaatgatatagacgacagcactggctctgtgaaggtggcatctttctgggcaggcaggccatggggcatggaggagggtgcaaagctatgggttgctgtcttctggcctccagctgcatggaggccggcccagggtctagggtgtgcactgggcaagggcagggcggcaggtgtcaggccggcttggacaatgaaaccctgaccttgctgcattccttttgcttccaccaccactagcttctttggaatcttggggtgggggccatctttggggattatggctgccacccgggatttgagtgtagggagtgtgggagcagccttggcagatggggcacccgtgccctgcaggtgttgacaagatccgccatctgtaatgtccttggcacaataaaaccaaatgtcagtttc

SEQ ID NO: 14358 - protein, 287 aa, Homo sapiens
MQAMAEMYNRPVEVYQYSTGTSAVEPINTFHGIHQNEDEPIRVSYHRNIHYNSVVNPNKATIGVGLGLPSFKPGFAEQSLMKNAIKTSEESWIEQQMLEDKKRATDWEATNEAIEEQVARESYLQWLRDQEKQARQVRGPSQPRKASATCSSATAAASSGLEEWTSRSPRQRSSASSPEHPELHAELGMKPPSPGTVLALAKPPSPCAPGTSSQFSAGADRATSPLVSLYPALECRALIQQMSPSAFGLNDWDDDEILASVLAVSQQEYLDSMKKNKVHRDPPPDKS

SEQ ID NO: 14359 - DNA, 2101 bp, Homo sapiens
  CDS (111)..(2099)
atttttttgaaaacaagaacagtgatgaaatcaacatacctcgactcattgtcagtcaactaaaatggcttgacagagttgtggatggcaaggacctcaccaccaagatcatgcagctgatcagtattgctccagagaacctgcagcatgacatcatcaccagcctacctgagatcctaggggattcccagcacgctgatgtggggaaagaactcagtgacctactgatagagaatacttcactcactgtcccaatcctggatgtcctttcaagcctccgacttgacccagacttcctattgaaggttcgccagttggtgatggataagttgtcgtctattagattggaggatttacctgtgataataaagttcattcttcattccgtaacagccatggatacacttgaggtaatttctgagcttcgggagaagttggatctgcagcattgtgttttgccatcacggttacaggcttcccaagtaaagttgaaaagtaaaggacgagcaagttcctcaggaaatcaagaaagcagcggtcagagctgtattattctcctctttgatgtaataaagtcagctattagatatgagaaaaccatttcagaagcctggattaaggcaattgaaaacactgcctcagtatctgaacacaaggtgtttgacctggtgatgcttttcatcatctatagcaccaatactcagacaaagaagtacattgacagggtgctaagaaataagattcgatcaggctgcattcaagaacagctgctccagagtacattctctgttcattacttagttcttaaggatatgtgttcatccattctgtcgctggctcagagtttgcttcactctctagaccagagtataatttcatttggcagtctcctatacaaatatgcatttaagttttttgacacgtactgccagcaggaagtggttggtgccttagtgacccatatctgcagtgggaatgaagctgaagttgatactgccttagatgtccttctagagttggtagtgttaaacccatctgctatgatgatgaatgctgtctttgtaaagggcattttagattatctggataacatatcccctcagcaaatacgaaaactcttctatgttctcagcacactggcatttagcaaacagaatgaagccagcagccacatccaggatgacatgcactcggtgataagaaagcagctctctagcaccgtattcaagtacaagctcattgggattattggtgctgtgaccatggctggcatcatggcggcagacggaagtgaatcacctagtttgacccaagagagagccaacctgagcgatgagcagtgcacacaggtgacctccttgttgcagttggttcattcctgcagtgagcagtctcctcaggcctctgcactttactatgatgaatttgccaacctgatccaacatgaaaagctggatccaaaagccctggaatgggttgggcataccatctgtaatgatttccaggatgccttcgtagtggactcctgtgttgttccggaaggtgactttccatttcctgtgaaagcactgtacggactggaagaatacgacactcaggatgggattgccataaacctcctgccgctgctgttttctcaggactttgcaaaagatgggggtccggtgacctcacaggaatcaggccaaaaattggtgtctccgctgtgcctggctccgtatttccggttactgagactttgtgtggagagacagcataacggaaacttggaggagattgatggtctactagattgtcctatattcctaactgacctggagcctggagagaagttggagtccatgtctgctaaagagcgttcattcatgtgttctctcatatttcttactctcaactggttccgagagattgtaaatgccttctgccaggaaacatcacctgagatgaaggggaaggtgctcactcggttaaagcacattgtagaattgcaaataatcctggaaaagtacttggcagtcaccccagactatgtccctcctcttggaaactttgatgtggaaactttagatataacacctcatactgttactgctatttcagc

SEQ ID NO: 14360 - protein, 663 aa, Homo sapiens
MQLISIAPENLQHDIITSLPEILGDSQHADVGKELSDLLIENTSLTVPILDVLSSLRLDPDFLLKVRQLVMDKLSSIRLEDLPVIIKFILHSVTAMDTLEVISELREKLDLQHCVLPSRLQASQVKLKSKGRASSSGNQESSGQSCIILLFDVIKSAIRYEKTISEAWIKAIENTASVSEHKVFDLVMLFIIYSTNTQTKKYIDRVLRNKIRSGCIQEQLLQSTFSVHYLVLKDMCSSILSLAQSLLHSLDQSIISFGSLLYKYAFKFFDTYCQQEVVGALVTHICSGNEAEVDTALDVLLELVVLNPSAMMMNAVFVKGILDYLDNISPQQIRKLFYVLSTLAFSKQNEASSHIQDDMHSVIRKQLSSTVFKYKLIGIIGAVTMAGIMAADGSESPSLTQERANLSDEQCTQVTSLLQLVHSCSEQSPQASALYYDEFANLIQHEKLDPKALEWVGHTICNDFQDAFVVDSCVVPEGDFPFPVKALYGLEEYDTQDGIAINLLPLLFSQDFAKDGGPVTSQESGQKLVSPLCLAPYFRLLRLCVERQHNGNLEEIDGLLDCPIFLTDLEPGEKLESMSAKERSFMCSLIFLTLNWFREIVNAFCQETSPEMKGKVLTRLKHIVELQIILEKYLAVTPDYVPPLGNFDVETLDITPHTVTAIS

SEQ ID NO: 14361 - DNA, 2483 bp, Homo sapiens
  CDS (6)..(1103)
gactaatgactgtccgaaacatcgcctccatctgtaatatgggcaccaatgcctctgctctggaaaaagacattggtccagagcagtttccaatcaatgaacactatttcggattggtcaattttggaaacacatgctactgtaactccgtgcttcaggcattgtacttctgccgtccattccgggagaatgtgttggcatacaaggcccagcaaaagaagaaggaaaacttgctgacgtgcctggcggaccttttccacagcattgccacacagaagaagaaggttggcgtcatcccaccaaagaagttcatttcaaggctgagaaaagagaatgatctctttgataactacatgcagcaggatgctcatgaatttttaaattatttgctaaacactattgcggacatccttcaggaggagaagaaacaggaaaaacaaaatggaaaattaaaaaatggcaacatgaacgaacctgcggaaaataataaaccagaactcacctgggtccatgagatttttcagggaacgcttaccaatgaaactcgatgcttgaactgtgaaactgttagtagcaaagatgaagattttcttgacctttctgttgatgtggagcagaatacatccattacccactgtctaagagacttcagcaacacagaaacactgtgtagtgaacaaaaatattattgtgaaacatgctgcagcaaacaagaagcccagaaaaggatgagggtaaaaaagctgcccatggtcttggccctgcacctaaagcggttcaagtacatggagcagctgcgcagatacaccaagctgtcttaccgtgtggtcttccctctggaactccggctcttcaacacctccagtgatgcagtgaacctggaccgcatgtatgacttggttgcggtggtcgttcactgtggcagtggtcctaatcgtgggcattatatcactattgtgaaaagtcacggcttctggcttttgtttgatgatgacattgtagagaaaatagatgctcaagctattgaagaattctatggcctgacgtcagatatatcaaaaaattcagaatctggatatattttattctatcagtcaagagagtaactgaaagacctgcgggactgattcacgtggggagaatgttcacagcactgtcacccggcttctccgcaggctttcctcttccccagtggcccactaatggtatcactccgagtctcaatggtctggctgtgttagactctctccttttgtgtttttacatgcagcactactcttggttttatttcagtctgacatagagttaactgcaatcagattgtagtctgatttatatgaataacggttgctaatcttaggactgggtgaaagctatgccattcattatgtctggctgtattagaatgacatttcctatgaatgtctacggtctgttttaggtgtttgctaaacttctatggcttccagggtcttcttacaatgcattcctttaacttgtccctggaagcattgctacccattttcagcttctctgcctctcttctgatacaaggacagaagaattgggtagatattcaccttttaggggtgcaagtatagctttaagtttgtgcaagtgaaaatgttgaaaagtgagtaacctcgatattaaaatcatccttgacatgaaacagggtgaagagaagctgtccgtggcggctggtgttggctggcattggcactgggctgtgctgacctagccattacaattccaggggctaagaaggctcagggcagacaaagtcaagaggaggaagtttttgtggacaatgaaaagttattttcgtacctttctaccaaaaccaagtttcaggaaaataactctatgttgtttattttcagtgacacttatgtaaggccctgtgagttgtatttatcctgtatccggcactgctaagcttttcaaggtatctttccaatcctgctgatgtggcagtcaatggctgcagggctggcaaacctccccttagccagtcagcacggcattgttccttatcaggaataacaaaggtactacatctttccagccatcagcacgttgtacaacttaactttttaacatagtccgtctgtttactgaggcactggcgagtcccagggctgatacagaaccttccctagagggaataccagagttagctgggtatagaggtggctcaaaggaagtgtccgtgggcagggggaggaatgaacaaaatggcgctgtttctttggctcagactcctagaatgcttgacaagacagaatttttttggaagaacctcatctcactatagttacttttttcacttttgttatatatgtatttattagagcatttgaatattggtacctttaaaagggtcatttggtgttttgctgttgagctggtttttgagtcatagatcttggcttcctttagaagccacttaacttccatacactataataaactgtgaacat

SEQ ID NO: 14362 - protein, 366 aa, Homo sapiens
MTVRNIASICNMGTNASALEKDIGPEQFPINEHYFGLVNFGNTCYCNSVLQALYFCRPFRENVLAYKAQQKKKENLLTCLADLFHSIATQKKKVGVIPPKKFISRLRKENDLFDNYMQQDAHEFLNYLLNTIADILQEEKKQEKQNGKLKNGNMNEPAENNKPELTWVHEIFQGTLTNETRCLNCETVSSKDEDFLDLSVDVEQNTSITHCLRDFSNTETLCSEQKYYCETCCSKQEAQKRMRVKKLPMVLALHLKRFKYMEQLRRYTKLSYRVVFPLELRLFNTSSDAVNLDRMYDLVAVVVHCGSGPNRGHYITIVKSHGFWLLFDDDIVEKIDAQAIEEFYGLTSDISKNSESGYILFYQSRE

SEQ ID NO: 14363 - DNA, 1989 bp, Homo sapiens
  CDS (116)..(559)
atttgaacaaatcactaagactcatggaacaattattggcattacttcagggattgtcttggtccttctcattatttctattttagtacaagtgaaacagcctcgaaaaaaggtcatggcttgcaaaaccgcttttaataaaaccgggttccaagaagtgtttgatcctcctcattatgaactgttttcactaagggacaaagagatttctgcagacctggcagacttgtcggaagaattggacaactaccagaagatgcggcgctcctccaccgcctcccgctgcatccacgaccaccactgtgggtcgcaggcctccagcgtcaaacaaagcaggaccaacctcagttccatggaacttcctttccgaaatgactttgcacaaccacagccaatgaaaacatttaatagcaccttcaagaaaagtagttacactttcaaacagggacatgagtgccctgagcaggccctggaagaccgagtaatggaggagattccctgtgaaatttatgtcagggggcgagaagattctgcacaagcatccatatccattgacttctaatcttctgctaatggtgatgtgaattcttagggtgtgtacgtacgcagcctccagggcaccatactgtttccagcagccaacccttttctcccatcacaactacgaagaccttgatttaccgttaacctattgtatggtgatgtttttattctctcaggcagtctatatatgttaaaccaatcaaggaacttactctattcagtggaaacaataatcatctctattgcttggtgtcatttataggaagcactgccagttaaagagcattagaagaggtggttggatggagccaggctcaggctgcctcttcgttttagcaacaagaagactgctcttgactgataacagctctgtcaatattttgatgccacaataaacttgatttttctttacattccttttatttttcctttctctaaatttaatttgttttataagcctatcgttttaccatttcattttcttacataagtacaagtggttaatgtaccacatacttcagtataggcatttgttcttgagtgtgtcaaaatacagctagttactgtgccaattaagacccagttgtatttcacccatctgtttcttcttggctaatctctgtacttctgccttttaattactgggcccttattccttattttctgtgagaaataatagatgatatgatttattacctttcaattatatttttctcagttatactagaaaatttcataatcctgggatatatgtaccattgtcagctatgactaaaaatttgaaaaagataaaaatttctagcaagcctttgaagtttaccaagtatagtcacattcagtgacagcccattcattccagtaaagaatcatttcattcactttgggagaggcctataattacatttatttgcaatgtttctcttcgctagattgttacatagctcccattctgttggttttgcttacagcatatggtaaccaaggttagatgccagttaaaattccttagaaattggatgagccttgagattgcttcttaactgggacatgacatttttctagcttttatcaagaataacaacttccacttttttttaaactgcacttttgactttttttatggtataaaaacaataatttataaacataaaagctcattgtgttttttagacttttgatattatttgatactgtacaaactttattaaatcaagatgaaagacctacaggacagattcctttcagtgttcacatcagtggctttgtatgcaaatatgctgtgttggacctggacgctataacttattgtaaagaccttggaaatgtggacataagctctttctttccttttgttactgtatttagtttgtgataaatttttcactgtgtgatatttatgctctaaatcactacacaaatcccatattaaaatatacattgtacctg

SEQ ID NO: 14364 - protein, 148 aa, Homo sapiens; identical to SEQ ID NO: 11334

SEQ ID NO: 14365 - DNA, 2113 bp, Homo sapiens
  CDS (74)..(1261)
gttaaactcgtcatttcctccagctagaggagctcaactgatctgttttctttcgcccagccaaaatcacagaatgaaggcggtgaagagcgaacgggagcgagggagccggcgaagacaccgggacggggacgtggtgctgccggcgggggtggtagtgaagcaggagcgtctcagcccagaagtcgcacctcccgcccaccgccgtccggaccactccggtggtagcccgtctccgccgaccagcgagccggcccgctcgggccaccgcgggaaccgagcccgaggagttagccggtccccacccaaaaagaaaaacaaggcctcagggagaagaagcaagtctcctcgcagtaagagaaaccgaagtcctcaccactcaacagtcaaagtgaagcaggagcgtgaggatcatccccggagaggacgggaggatcggcagcacagggaaccatcagaacaggaacacaggagagctaggaacagtgaccgggacagacaccggggccattcccaccaaaggagaacgtctaacgagaggcctgggagtgggcagggtcagggacgggatcgagacactcagaacctgcaggctcaggaagaagagcgggagttttataatgccaggcgacgggagcatcgccagaggaatgacgttggtggtggcggcagtgagtctcaggagttggttcctcggcctggtggcaacaacaaagaaaaagaggtgcccgctaaagaaaaaccaagctttgaactttctggggcacttcttgaggacaccaacactttccggggtgtagtcattaaatatagtgagcccccagaagcacgtatccccaaaaaacggtggcgtctctacccatttaaaaatgatgaggtgcttccagtcatgtacatacatcgacagagtgcgtacctactgggtcgacaccgccgcattgcagacattccaattgatcacccgtcttgttcaaagcagcatgcggtctttcaatatcggcttgtggaatatacccgtgctgatggcacagttggccgaagagtgaagccctacatcattgaccttggctcaggcaatggaaccttcttaaacaacaaacgtattgagccacagagatactatgaactaaaagaaaaggatgtactcaaatttggattcagtatcagagaatacgtcttgctccatgagtcgtcggacacttctgaaatagacaggaaagatgacgaggatgaggaggaggaggaagaagtgtctgacagctagcaaactaagaacccaaactattgatacacggtttccttcttggaagtctttgattgactcagagagcactatggtggtgggtccagcactatggtgctctctgtaatgcctcttactgccttaagtctttcctctgttgctgaccagattgtgttaccatttgaatacactgactaatgtttgttaaactttttctgtggcaccttggccacatgcctgcaggcatttgttttcagaacagtctcaccaattacaacacaccgtgttttagtagaagtgttgtggttttagttggtgctttcagaactgctgcctaggaaactataaacccttggttaaggggaaatcatggcttgttctctttgtacagttactttatttatataggtgttaagctttgtggaccaggtgtttttcttttggggcgaacccctgagcagagaatcttactaggctttggttatcaccaaaacaacctccagtatataccaaagctttgacttgtttgagctcttgagcttagaagttgattttgcacttatttttttggggggtgggaatgtactgcagtcagtaaacattattgactgtttaacttaaacagatgctttatggcacctgctcaagcccgtgactgtacagaaggatcctggttgctaccagtgggtgctgattcagcatcacaagtgactgaaattggctgtggatctgttctttgtgaaagaattcctgatttctccatggagcatgtacacaacaattttgatcatattaactgtacttcagttttgcatttttattcaaatgttatctctttttttctttgagaaataaactgtcactgatgtg

SEQ ID NO: 14366 - protein, 396 aa, Homo sapiens
MKAVKSERERGSRRRHRDGDVVLPAGVVVKQERLSPEVAPPAHRRPDHSGGSPSPPTSEPARSGHRGNRARGVSRSPPKKKNKASGRRSKSPRSKRNRSPHHSTVKVKQEREDHPRRGREDRQHREPSEQEHRRARNSDRDRHRGHSHQRRTSNERPGSGQGQGRDRDTQNLQAQEEEREFYNARRREHRQRNDVGGGGSESQELVPRPGGNNKEKEVPAKEKPSFELSGALLEDTNTFRGVVIKYSEPPEARIPKKRWRLYPFKNDEVLPVMYIHRQSAYLLGRHRRIADIPIDHPSCSKQHAVFQYRLVEYTRADGTVGRRVKPYIIDLGSGNGTFLNNKRIEPQRYYELKEKDVLKFGFSIREYVLLHESSDTSEIDRKDDEDEEEEEEVSDS

SEQ ID NO: 14367 - DNA, 2273 bp, Homo sapiens
  CDS (275)..(2071)
ccacagcaagaagtccaaggccgagcagagcccagtctcgtccgatgtggaggtgtcttccccgaagcggcagcggctctcagcaagcgccaactccatctccaatggggagtatccttgcaatcaatgcgacctcaagttctccaactttgagagcttccagacccacctgaagctgcacctggagctgctgctgcggaagcaagcgtgcccccagtgcaaagaggactttgactcccaggagtccctcctgcagcacctgacagtgcattacatgaccacgtcgacccactatgtgtgcgagagctgcgacaagcaattttcctcggtggatgacctgcagaagcacctgctggacatgcacacctttgtgttgtaccactgcaccctgtgtcaggaggtcttcgactccaaggtgtccatccaggtgcacctggcggtgaagcacagcaatgagaagaagatgtaccgctgcacggcctgcaactgggacttccgcaaggaggctgacctgcaggtgcacgtcaaacacagccacctgggcaacccggccaaggctcacaagtgcatcttctgtggggagaccttcagcaccgaggtggagctgcagtgccacatcaccacacacagcaagaagtataactgtaagttctgcagcaaggccttccacgccatcatcctgctggagaagcacctgcgggagaagcactgtgtgtttgatgctgcgaccgagaacggcacggccaatggggtacccccaatggccaccaagaaagctgagcctgctgacctgcagggcatgctgcttaagaaccctgaggcacctaacagccatgaggccagcgaggatgacgtggacgcgtcggagcccatgtacggctgtgacatctgtggggcggcctacaccatggaggtgctgctgcagaatcaccggctgcgggaccacaatatccggccgggcgaggatgatggctcacgcaagaaggctgagtttatcaagggcagtcacaagtgcaacgtttgttcacggactttcttctcggagaacgggctacgggagcacctgcagacgcaccggggccctgccaagcactacatgtgtcccatctgtggtgagcgcttcccttcgctgctgacgctcaccgaacacaaggtgacccacagcaagagcctggacacgggcacctgtcgcatctgcaagatgcccctgcagagcgaggaggagtttattgagcactgccagatgcaccctgacctgcgcaactcactcacgggcttccgctgtgtggtctgcatgcagacagtcacttccacgcttgagctcaagatccatggcaccttccacatgcagaagctggcgggcagctcagcggcgtcctcccccaatggccaggggctgcagaagctctacaagtgcgccctgtgcctcaaggagttccgcagcaagcaggacctggtgaagcttgacgtcaatgggctgccctacggcctctgcgccggctgcatggcccgcagcgccaacggacaggtgggtggcctggccccgcccgagcccgccgaccggccctgtgccggcctccgttgccccgagtgcagtgtcaagtttgagagtgccgaagacctggagagccacatgcaggtggaccaccgtgacctcacgccggagaccagtgggccccggaaaggcacccagacatcgccagtgccccggaaaaagacataccagtgcatcaagtgccagatgaccttcgagaacgagagagagatccaaatccacgttgccaaccacatgattgaggaaggcatcaaccacgagtgtaagctgtgcaaccagatgttcgactccccggccaagctcctctgtcacctcattgagcacagcttcgagggcatgggcggcaccttcaaatgccccgtgtgtttcacagtcttcgtccaggccaacaagttgcagcagcacatctttgccgtgcacgggcaggaggacaagatctacgactgctcacagtgccctcagaagttcttcttccagaccgagctgcagaaccacacgatgagccagcacgcacagtgagggatcgctcaacaggacacctctccgcagaaggcttgccggagacgccgtggggagggccatttgaacattacatccaatcaaagtgtcatttgcaacccagatgtaaaactctaatgatttggccatgaggcgctgctattataagcagctggaaatgaatattaatggcagagattaaaagtattccatgctcagt

SEQ ID NO: 14368 - protein, 599 aa, Homo sapiens
MTTSTHYVCESCDKQFSSVDDLQKHLLDMHTFVLYHCTLCQEVFDSKVSIQVHLAVKHSNEKKMYRCTACNWDFRKEADLQVHVKHSHLGNPAKAHKCIFCGETFSTEVELQCHITTHSKKYNCKFCSKAFHAIILLEKHLREKHCVFDAATENGTANGVPPMATKKAEPADLQGMLLKNPEAPNSHEASEDDVDASEPMYGCDICGAAYTMEVLLQNHRLRDHNIRPGEDDGSRKKAEFIKGSHKCNVCSRTFFSENGLREHLQTHRGPAKHYMCPICGERFPSLLTLTEHKVTHSKSLDTGTCRICKMPLQSEEEFIEHCQMHPDLRNSLTGFRCVVCMQTVTSTLELKIHGTFHMQKLAGSSAASSPNGQGLQKLYKCALCLKEFRSKQDLVKLDVNGLPYGLCAGCMARSANGQVGGLAPPEPADRPCAGLRCPECSVKFESAEDLESHMQVDHRDLTPETSGPRKGTQTSPVPRKKTYQCIKCQMTFENEREIQIHVANHMIEEGINHECKLCNQMFDSPAKLLCHLIEHSFEGMGGTFKCPVCFTVFVQANKLQQHIFAVHGQEDKIYDCSQCPQKFFFQTELQNHTMSQHAQ

SEQ ID NO: 14369 - DNA, 2184 bp, Homo sapiens
  CDS (192)..(2123)
gagtgggtttcagactttctctcaggatttccgctggcttcaggttccggtcaggcgtcgggacagagcctgatccaggcttcggcggccggtggcagctctcgatcagctctcgcagtcggagaggcggctaaggaaaggtgccacagcagagacgcgaaggagaggccctagaaccttttcaaagaagaatggaagaaaccatgaagcttgctacgatggaagacacagtggagtactgcctgttcctgataccagatgagtcaagggactcagataaacataaagagattcttcagaagtacattgagagaataatcactcggtttgcacctatgctggtcccctacatctggcagaatcagcctttcaatcttaaatataaacctgggaaaggaggtgttcctgctcatatgtttggcgtgacaaagtttggggataacattgaggatgaatggtttattgtttatgtaataaagcagatcacaaaggaatttccagagttagtagcaaggattgaagacaatgatggtgaattcttgttaatagaagctgctgactttctccctaaatggctggatcctgaaaatagcaccaatagggtatttttctgccatggggaattgtgtattatccctgcaccaagaaaatctggagcagaatcttggttacccaccacacccccaacaattccacaagcattgaatataatcacagcacattcagaaaaaatacttgcttcagaatctatacgagctgctgtgaataggcgcatcagagggtacccagaaaaaattcaggcctcacttcatcgagcacactgcttccttccagctggcattgtggcagtgctaaagcagcgccccagattggtggctgcagcagtccaggcattttacctacgagaccctattgacctgcgagcttgtcgtgttttcaagacattcttgcctgaaacacgaataatgacatcggtcacattcactaaatgtctatatgcacaattggtgcaacaaaggtttgtgccagaccggcggagtggatacaggctgcctcctccatctgatccccagtaccgagcccatgaattgggcatgaaattggctcatggatttgagatcttatgctccaaatgtagcccacatttttctgactgcaagaaatcccttgtgactgcctcaccactctgggccagtttccttgaaagtctgaaaaagaatgattactttaagggactgatagaaggttctgctcagtaccgggaaaggctagaaatggcagagaattacttccagctctcagtagactggccagaaagttctcttgctatgagccctggtgaagaaatcttaaccttattacagacaataccatttgatatagaagaccttaagaaagaagcagctaatcttcccccagaggatgatgaccagtggttagatctctcaccagatcagctggaccagctgctgcaggaagctgttggcaaaaaagaatccgagtctgtttccaaggaggagaaggagcagaactatgacttaactgaagtctcagagagcatgaaagctttcatatccaaagtctcaacccacaagggagcagagctgcctcgagaaccttctgaggctccaatcacttttgatgcagatttttttcttaattattttgataagattttagggccaaggcctaatgagtcagattctgatgatctggatgatgaagactttgaatgtttagatagtgatgatgacttggactttgaaacacacgaacctggcgaagaggcttccctgaaaggaacacttgataatctcaagtcatacatggcccagatggaccaggaactagcacacacctgcatcagcaaaagtttcaccactaggaaccaagtggaacctgtatcccagactaccgataacaattcagatgaggaagattctggtacgggagaatctgttatggcaccagtagatgtagacctgaacctggtttcaaatatattggaatcctatagctcccaagctggactggcaggacctgcttccaatcttttacaaagcatgggagtgcagctgcctgacaacaccgatcacagaccaacaagtaagccaacaaaaaattaaccagcacatttagcttctcttttttctttttaaataaatattgaatatgattctgttc

SEQ ID NO: 14370 - protein, 644 aa, Homo sapiens [sequence omitted]

SEQ ID NO: 14371 - DNA, 2024 bp, Homo sapiens
  CDS (219)..(947)
gcagtgactctgggaaatccttcattaatcattcacaccttcagggacatttaagaactcacaatggagaaagtctccatgaatggaaggaatgtgggagaggctttattcactccacagaccttgctgtgcgtatacaaactcacaggtcagaaaaaccctacaaatgtaaggaatgtggaaaaggatttagatattctgcataccttaatattcacatgggaacccacactggagacaatccctatgagtgtaaggagtgtgggaaagccttcaccaggtcttgtcaacttactcagcacagaaaaactcacactggagagaaaccttataaatgtaaggattgtgggagagccttcactgtttcctcttgcttaagtcaacatatgaaaatccatgtgggtgagaagccttatgaatgcaaggaatgtgggatagccttcactagatcttctcaacttactgaacatttaaaaactcacactgcaaaggatccctttgaatgtaagatatgtggaaaatcctttagaaattcctcatgcctcagtgatcactttcgaattcacactggaataaaaccctataaatgtaaggattgtgggaaagccttcactcagaactcagaccttactaagcatgcacgaactcacagtggagagaggccctatgaatgtaaggaatgtggaaaggcctttgccagatcctctcgccttagtgaacatacaaggactcacactggagagaagccttttgaatgtgtcaaatgtgggaaagcctttgctatttcttcaaatcttagtggacatttgagaattcacactggagagaagccctttgagtgcctggaatgtggtaaagcatttacgcattcctccagtcttaataatcacatgcggacccacagcgccaaaaaaaccattcacgtgtatggaatgtggcaaagcctttaagtttcccacgtgtgttaaccttcacatgcggatccacactggagaaaaaccctacaaatgtaaacagtgtgggaaatccttcagttactccaattcgtttcagttacatgaacgaactcacactggagagaaaccctatgaatgtaaggagtgcgggaaagccttcagttcttccagttccttttgaaatcatgaaagaaggcatgcggatgagagactgtcagcataaggaatgtgggaaaacctaaaggtgtccctgttctctctgaagacatgaaaactcactggggagaaaccctatgaatgtaaaaatgtggaagcaactttgtatctcaggtcttaatgaacacatatgaattcacagtggagaagaccctgcatcaggtaatgtggaaatgactttgctgaattctcaagccttaccaaacacatcagaaatctcactggagagaaaccgtatgaatgtagagaatctgggaatacctttctgaatcccacaaaccttaatgtgtgtatgtgaactcacattggagagaaaccctgcaatttaaatggtatggtctggatgatgccccactccatatttgtaagccctaagtcctagttccttacactataactgtatttggacatagggttttcaaacaggtgagtaacttcaaatgaggttgttgggttcgatccctaatctgacatcactggtgtccctataagggaaactgaaggaaggatacacatggagaagactgtgtggatccaccagaagatggccatctacaagccaaggacagagacctggaacagatgctttcattatggcctccagaggaaaccaaccctgtctccaccttgatattgcacttccaggctccagaactgtgaggcaataaatttctcttggttaaatcattcagtctgttattttgtacagcaaccctaggaaactaatactgtgaggaacttgggaaaagctttagatcaagcttgtccaacccgcaggccaggatggctttgaatgcagaccaacacaaatttttaagctttcttcaaacataataaaatttttttgtgatt

SEQ ID NO: 14372 - protein, 243 aa, Homo sapiens
MGTHTGDNPYECKECGKAFTRSCQLTQHRKTHTGEKPYKCKDCGRAFTVSSCLSQHMKIHVGEKPYECKECGIAFTRSSQLTEHLKTHTAKDPFECKICGKSFRNSSCLSDHFRIHTGIKPYKCKDCGKAFTQNSDLTKHARTHSGERPYECKECGKAFARSSRLSEHTRTHTGEKPFECVKCGKAFAISSNLSGHLRIHTGEKPFECLECGKAFTHSSSLNNHMRTHSAKKTIHVYGMWQSL

SEQ ID NO: 14373 - DNA, 2273 bp, Homo sapiens
  CDS (108)..(452)
aaaggaccatctctttaggatatatttttaaattctttgaaacacataaccaaaatggtttgattcactgactgactttgaagctgcatctgccagttacaccccaaatggctttaatcccctctcgggtctggttgccttttgcagtttgggttgtggactcagctcctgtgaggggtctggttaggagagagccatttttaaggacagggagttttatagcccttttctactttcctcccctcctcccagtccttatcaatcttttttcctttttcctgaccccctccttctggaggcagttgggagctatccttgtttatgcctcactattggcagaaaagaccccatttaaaacccagagaacactggagggggatgctctagttggttctgtgtccattttcctctgtgccaaagacagacagacagaggctgagagaggctgttcctgaatcaaagcaatagccagctttcgacacatacctggctgtctgaggaggaaggcctcctggaaactgggagctaagggcgaggcccttcccttcagaggctcctgggggattagggtgtggtgtttgccaagccaaggggtagggagccgagaaattggtctgtcggctcctggttgcactttggggaaggagaggaagtttggggctccaggtagctccctgttgtgggactgctctgtcccctgcccctactgcagagatagcactgccgagttcccttcaggcctggcagacgggcagtgaggaggggcctcagttagctctcaagggtgccttcccctcctcccaacccagacataccctctgccaaactgggaaccagcagtgctagtaactacctcacagagccccagagggcctgcttgagccttcttgctccacaggagaagctggtgcctctaggcaaccccttcctcccacctctcatcaggggtgggggttctcctttctttcccctgaagtgtttatggggagatcctagtggctttgccattcaaaccactcgactgtttgcctgtttcttgaaaaccagtagaagggaaacagcacagcctgtcacagtaattgcaggaagattgaagaaaaatcctcatcaatgccaggggacataaaagccatttcccttccaaatactcgacaatttagatgcagaacatttctctgtattcagacttagagtaacaccagctgaaaactgcagtttctttcctttggatacataaggcttctctatcggggtacgggacagggaggaggcctcatgtctgaagggggatttaggggcgagagccccagccctgaccctcggtcctgtgcaccgctttggggcacagtctgatggcgcctttgctggcgccttagtatgtttgactccggatggacaaaagaaaaaaaattttttttcttgaatgaaatagcaggaagctcctcgggagcatgtgttttgattaaccgcaggtgatggatgctacgagtataaatggattaactacctcaatccttacagtaagattggaactaagggcagggactcatgcataagggtatgaatcccagccaggacaagtgagttgaggcttgtgccacaaaaggtttgtccttggggaacaggcaggcctgccaggatcccccccatatcgattgggctgggagggctggccgtgaggtccccactttctgctttccttgcccatgtgtcacccctttggcctccagcttgtccctctctcactttctatagctttgttggaccagatggtgaggaaaggaatggcctcttcccttctagagggggctggctggagtgagacctggggcttggcctggaacccaccacacagccccaaagtcaggaagcctggggaaaccagagctgagacctcttcaacagggtttctttgagatcctacacctccattgggccctttttcagtcttcaatgggggcccagttggctctagaaggagaagaggtgaagcaggatcctttgccctgggggagtctgagggcgcggtccttggactcattcaggccgtctttgtagttgggggagttccactgggcgatcccagcccctccccacccaccctctaatggacctcctcatagaagccccatttcacttttgttttatctacctcttagcaaaacaatagataaattaggtagtggcagctccacttgcttaggttagggggggaaaaagatttctttttccaaaggaaaaaaatattaccttgagaatactttccaaaaaat

SEQ ID NO: 14374 - protein, 115 aa, Homo sapiens
MALIPSRVWLPFAVWVVDSAPVRGLVRREPFLRTGSFIALFYFPPLLPVLINLFSFFLTPSFWRQLGAILVYASLLAEKTPFKTQRTLEGDALVGSVSIFLCAKDRQTEAERGCS

SEQ ID NO: 14375 - DNA, 2227 bp, Homo sapiens
  CDS (65)..(469)
aaaatcatggattcagaataaacgtgaacagattaagaatttcttgtcaaaacgggtgctgataatgtattttttcagtaagcacccagaggcctccattcaggctgttttttcagatgcccaaatgcatatttgggcattagaaggtctgtcgcacttagtagcagcatcatttacagaggatagatttggagttgtccagacgacactaccagctatccttaatactttgttgacactgcaagaggcagtcgacaagtactttaagcttcctcatgcttccagtaaaccaccccggatttcaggaagccttgtggacacttcatataaaacattaagatttgcattcagagcatcactgaaaactgccatctatcgaataactactacatttggtgaacatctgaatgctgtgcaagcatctgcagaacatcagaaaagacttcaacagttcttggagttcaaagaatagtcaagtaatataaactgtgttcattacactgctgatacaactacagatgggacagtaaatgttcagcattcttggatcagaagaaaacggactaattagatgcttcctttgtcgtggtggttgctttgaaaactatactttaatgggagaaatcatggaaagaaattctcaacagaataactgaaaactgccttttctgtaccgattgctttttgtgtgtgtggtataataaaatctttattcaattttacagaagcattgatggcagtcgaaatgtctctagctcatataacttaatagtaataactaaaaaacttttagaatttacttttgaaaggagggaagccagttctgaaatgagtataggttgatttcatagtcttcttaattaagagtttagctctttgtaaactcaaaatacataaactttttaagtgtagtttcatttactgaaggataaaaatggtaacagtgcagcaatattcacaaaaaatattgtctaacggacatattttgttaatctgttaggttgggtttttgtttccagggacaaattaaatttgtatgattacccaaaaaagggtctcagtttacagatgctaactctatataaaggaatgtggaaaaactcagttcttaagttacaagattaaaaattcacatttggtctttaagaaacaattgactgacatctatgaatttattttgtatcatgctagtaaacacgaagtattaatgtatgggtattttcccagctagttttgctttctttttctggagcaaaacattaagtgattgcagagtttttcaagcaagagaaaaaggtttgcaaaaaaacccaggaaatgttcccttttttccccaccattcatcttcgttagatcaaattctgtgaaacttgtctggtctctcaaagggagcagcctctgtagtgttaaatggctaattaaaataggaagatctttatagccagaaacaacttagtcatcaaatagcaagtgaaaccaaaacgtcagagggattactgtacttggaagtatgttgtgtgtcccaaatgtgaacgaagtattgttagaatttattagatcagcttctttggagatcaaagattggaaatcctagtcatagatattcactggactggctttggactgaaatgctcctttgtaattcttttcctattgtcttttccttctagtgtcccaaaatattttctttaaagtcagcacagtactgtatatgaatctttaatgtggtatcatatatgtctacttttgtctgattcatcgatgtattatatctttataattgaatattttagctccgggtcctgttgccccttcaagcagtacatgccaaattataaataggtgctactggccttgagcatatcactgtgggacagttccccaattgtcaagtgtttagatatgtagactattgccatttgtttttttgttttggttttgctttgtgtctgaagctgaattgatttcttttttttgaatgtgaaagttgaatttcaaacgtagtcatttcttacagatggccaagacagaaaattgtggctaggttgactgagaactgttgtcttccatgtattaacacaattaagctttttatattccactctctgtgctgaccctggctgaggcattttgggagacaaggactctgaatcttctgcttccattaaagaagaactgtgatattcaacattggatttctgagaataaagataggatgattcctttg

SEQ ID NO: 14376 - protein, 135 aa, Homo sapiens
MYFFSKHPEASIQAVFSDAQMHIWALEGLSHLVAASFTEDRFGVVQTTLPAILNTLLTLQEAVDKYFKLPHASSKPPRISGSLVDTSYKTLRFAFRASLKTAIYRITTTFGEHLNAVQASAEHQKRLQQFLEFKE

SEQ ID NO: 14377 - DNA, 2432 bp, Homo sapiens
accagctcccaggactgtgtctggctgatcaccgtgcccattggccatggcgtccgcctcaacctcagcctgctgcagacagagccctctggagatttcatcaccatctgggatgggccacagcaaacagcaccacggctcggcgtcttcacccggagcatggccaagaaaacagtgcagagttcatccaaccaggtcctgctcaagttccaccgtgatgcagccacaggggggatcttcgccatagctttctccggtcagtatggaagcctggcctggtgggaagggccaggctttcaagtcaaggctgagcttgactcccgtctccaccatttgcggatcatgtgaccttgagtgagttgtataacctcttggagcctcagtgtcttcagagttatgagaattaaatgtattagcctatgtgagagctctcagtgcagggttctgtaaatgcaagttttcctcctattccacactgccagggcagagaggcacagaagcccaaaccttggtgccaagtccactcattcacatcaactcactggctggatcatccctatacctgtgccccagcttatcccttagcactttctagcgggttctccttctccaaagggatctagggcttctgctgacctctcaaggagcactgtgtttttgtgcacaaatgaagatattgtgattttgagtaggaagagtatgaacaattcagagtaggtatgcctttattggcagcctgttttcttctacaagtcccaagttagggatctggatatttcctcatttttattatagtggaattgcctagagaaacttatagaatgttctctgtggacttgtgcctatctatggaatgatgcacatatttgcaatttacagatcactgcagatattttaaccagaaatcaggaaagctggattttactcccagctccaccttgggccagctgtgtaaaaccttgcacaggtcccttccccacttgagacttcagtttcttcacctgtagaattaccggcttggagtttgtgacctgtaagaattctgtgaggtagtaaggcaaatattctaacccccactttacaaatgaagaaatagggcaaaggaaggctcaagtacttgcccaaaaccatgtggatagaactggaaacagaacccagcctccgcagtatctgctgcagtatctgctacagtatctgctctggtgtgactatacagtgttattacatcatgcgtgcacttgcagaaacacactaagactgtgaaagaggtagtgaaagaaacaggaagcaacagagagaaacaaggatgtaaagaacctaagcagctgtgactgccattcccaggagctatcgcccagggtgagtgcaatgtgggaatgagactccgccctctccatctgctcagttcccatgcccctctcattgggcacacctgtcgctccactaatgaaatccaggctttaaggctctgtcattttgacttgtgactttcccatagagtgataagagtatggacttcagagtcacagacgggttcaaaccttggctctgacacatgcaagctatgtaactttgtctgtcatttcacccttctgagcctcaatgttattatgcacaaaataggaatcatataagtacctaacctcctaaagttaaatgaaacaatgcttggaaatccttagctccaggcacagagtataaaaggtgatcaataaattatagttctaatagtcatcattgtcatgattatttttattatatctagatattgacaggcttggtgtaaagttaccttggtggtaggccaggtctcttgttcctgttcctgagccttcacctgtaccagaaccaggcaaaggaggctcagcacagccccaggccatccttatttccaagttcttctcagcaaggtctttcattgagagtgcttgcctaagggcacaatgctccttctgcctctcagatgagacacaaggcccttgctatggtgtaaatgcttaggcccccctagaattcatatgctgacatcctaacccccaaggtgatggtattaggaggtggggccttgggaggcaattaggtcagacaacagagccctcatgaatgggattagtgcctttataaaagagacccacagaatcaccacactgaagccttctcagtggaaagagctaagaagcacaggaaacacagaggccgaggtgggcggatcgcctgaggtgaggagttcaagaccagcctgaccaacatggagaaaccctgtctctactaaaaatacaaaattagatgggcgtggtggcgcatgcctgtaatcccagctactcaggaggctgaggcagaagaatcggttgaacctgggaggcggaggttgcagtgagccaagatcacgccattgcactccagcctgggcaacaagtgtgaaactccatctc

SEQ ID NO: 14378 - DNA, 1974 bp, Homo sapiens
  CDS (32)..(937)
gaagaagaacctgcgagccgacaacgccttcatgctgctcacgcaggcgcgactcttcgatgaaccgcagctggccagcctgtgcctggagaacatcgacaaaaacactgcagacgccatcaccgcggagggcttcaccgacattgacctggacacgctggtggctgtcctggagcgcgacacactgggcatccgtgaggtgcggctgttcaatgccgttgtccgctggtccgaggccgagtgtcagcggcagcagctgcaggtgacgccagagaacaggcggaaggttctgggcaaggccctgggcctcattcgcttcccgctcatgaccatcgaggagttcgctgcaggtcccgcacagtcgggcatcctggtggaccgcgaggtggtcagcctcttcctgcacttcaccgtcaaccccaagccacgagtggagttcattgaccggccccgctgctgcctgcgtgggaaggagtgcagcatcaaccgcttccagcaggtggagagtcgctggggctacagcgggaccagtgaccgcatcaggttctcagtcaacaagcgcatcttcgtggtgggatttgggctgtatggatccatccacgggcccaccgactaccaagtgaacatccagattattcacaccgatagcaacaccgtcttgggccagaacgacacgggcttcagctgcgacggctcagccagcaccttccgcgtcatgttcaaggagccggtggaggtgctgcccaacgtcaactacacggcctgtgccacgctcaagggcccagactcccactacggcaccaaaggcctgcgcaaggtgacacacgagtcgcccaccacgggcgccaagacctgcttcaccttttgctacgcggccgggaacaacaatggcacatccgtggaggacggccagatccccgaggtcatcttctacacctaggctgcccgacaccgacaccgccctccctccgcggggatagccgcagccccaggccatcatctgctgctggggtccccccaccacgcggtgccaggcccagtgtcccccaggccgtctgtccactccatgccacctttctcagcatcaggacggggttgccctgtgttcaccacgagtgtggctgctggatcagggcagccggggaggtggccaggccagtggccaggccctgtggagacaatccctcaggactagggacagggctgtgccggcctgggccagggcccacggacccgcagctcagggcgcctgcccacgtcgtctgccggcggtgcgccgcgggcgtccctcgcgtctcttcactgcacattgcaatgcatttgcgattcccatttctctgctaggagccagcctgggtggcgctgctcccaaagccgtgggtcccagaccttgcgttccttttgttcctgtccgtttattaggacacgggccccacctgtcacgtgcccgaggccacccaagcccagcctgcggggcgttcccactgcctggatgccggcttgagttctgcgcacgcaggattcagtgtggggacggcccctgccggataggcctagccctggcccaggtggtgagcggtttgcagtgtccgttctcatccacctgatgggcccagataaaggcccccgctgtccagcctccctggacggccctcgcggtccctgcagcccaagatgggactcagaccctgtgccccagagctcccctgccgcagaatggggccccagccggccccgaccgggtccaggagcactgctcgcctgtacatactgttgccctagcccacctggtgccgtgggagccacccccaggtgctgggggcacagcccctccccactccggccacgcccccacccaccccgcgtgtttctgccctgtgactcctggaacctgcgtcctccccaaagccatgggaggggtgtcctcctcagaccatgcccccagatgatttttttaaataaagaaacaaatgc

SEQ ID NO: 14379 - protein, 302 aa, Homo sapiens
MLLTQARLFDEPQLASLCLENIDKNTADAITAEGFTDIDLDTLVAVLERDTLGIREVRLFNAVVRWSEAECQRQQLQVTPENRRKVLGKALGLIRFPLMTIEEFAAGPAQSGILVDREVVSLFLHFTVNPKPRVEFIDRPRCCLRGKECSINRFQQVESRWGYSGTSDRIRFSVNKRIFVVGFGLYGSIHGPTDYQVNIQIIHTDSNTVLGQNDTGFSCDGSASTFRVMFKEPVEVLPNVNYTACATLKGPDSHYGTKGLRKVTHESPTTGAKTCFTFCYAAGNNNGTSVEDGQIPEVIFYT

SEQ ID NO: 14380 - DNA, 2362 bp, Homo sapiens
  CDS (220)..(1746)
gaggagaatgtgggagcctttggcggggaccccaagagagtgaccatctttggctcgggggctggggcctcctgtgtcagcctgttgaccctgtcccactactcagaaggtctcttccagaaggccatcattcagagcggcaccgccctgtccagctgggcagtgaactaccagccggccaagtacactcggatattggcagacaaggtcggctgcaacatgctggacaccacggacatggtagaatgcctgcggaacaagaactacaaggagctcatccagcagaccatcaccccggccacctaccacatagccttcgggccggtgatcgacggcgacgtcatcccagacgacccccagatcctgatggagcaaggcgagttcctcaactacgacatcatgctgggcgtcaaccaaggggaaggcctgaagttcgtggacggcatcgtggataacgaggacggtgtgacgcccaacgactttgacttctccgtgtccaacttcgtggacaacctttacggctaccctgaagggaaagacactttgcgggagactatcaagttcatgtacacagactgggccgataaggaaaacccggagacgcggcggaaaaccctggtggctctctttactgaccaccagtgggtggcccccgccgtggccaccgccgacctgcacgcgcagtacggctcccccacctacttctatgccttctatcatcactgccaaagcgaaatgaagcccagctgggcagattcggcccatggtgatgaggtcccctatgtcttcggcatccccatgatcggtcccaccgagctcttcagttgtaacttttccaagaacgacgtcatgctcagcgccgtggtcatgacctactggacgaacttcgccaaaactggtgatccaaatcaaccagttcctcaggataccaagttcattcacacaaaacccaaccgctttgaagaagtggcctggtccaagtataatcccaaagaccagctctatctgcatattggcttgaaacccagagtgagagatcactaccgggcaacgaaagtggctttctggttggaactcgttcctcatttgcacaacttgaacgagatattccagtatgtttcaacaaccacaaaggttcctccaccagacatgacatcatttccctatggcacccggcgatctcccgccaagatatggccaaccaccaaacgcccagcaatcactcctgccaacaatcccaaacactctaaggaccctcacaaaacagggcctgaggacacaactgtcctcattgaaaccaaacgagattattccaccgaattaagtgtcaccattgccgtcggggcgtcgctcctcttcctcaacatcttagcttttgcggcgctgtactacaaaaaggacaagaggcgccatgagactcacaggcgccccagtccccagagaaacaccacaaatgatatcgctcacatccagaacgaagagatcatgtctctgcagatgaagcagctggaacacgatcacgagtgtgagtcgctgcaggcacacgacacactgaggctcacctgcccgccagactacaccctcacgctgcgccggtcgccagatgacatcccacttatgacgccaaacaccatcaccatgattccaaacacactgacggggatgcagcctttgcacacttttaacaccttcagtggaggacaaaacagtacaaatttaccccacggacattccaccactagagtatagctttgccctatttcccttcctatccctctgccctacccgctcagcaacatagaagagggaaggaaagagagaaggaaagagagagagaaagaaagtctccagaccaggaatgtttttgtcccactgacttaagacaaaaatgcaaaaaggcagtcatcccatcccggcagacccttatcgttggtgttttccagtattacaagatcaacttctgaccctgtgaaatgtgagaagtacacatttctgttaaaataactgctttaagatctctaccactccaatcaatgtttagtgtgataggacatcaccatttcaaggccccgggtgtttccaacgtcatggaagcagctgacacttctgaaactcagccaaggacacttgatattttttaattacaatggaagtttaaacatttctttctgtgccacacaatggatggctctccttaagtgaagaaagagtcaatgagattttgcccagcacatggagctgtaatccagagagaatgaaacgtagaaatttattattaaaagaatggactgtgcagcgaaatctgtacggttctgtgcaaagaggtgttttgccagcctgaactatatttaagagactttgt

SEQ ID NO: 14381 - protein, 509 aa, Homo sapiens
MLDTTDMVECLRNKNYKELIQQTITPATYHIAFGPVIDGDVIPDDPQILMEQGEFLNYDIMLGVNQGEGLKFVDGIVDNEDGVTPNDFDFSVSNFVDNLYGYPEGKDTLRETIKFMYTDWADKENPETRRKTLVALFTDHQWVAPAVATADLHAQYGSPTYFYAFYHHCQSEMKPSWADSAHGDEVPYVFGIPMIGPTELFSCNFSKNDVMLSAVVMTYWTNFAKTGDPNQPVPQDTKFIHTKPNRFEEVAWSKYNPKDQLYLHIGLKPRVRDHYRATKVAFWLELVPHLHNLNEIFQYVSTTTKVPPPDMTSFPYGTRRSPAKIWPTTKRPAITPANNPKHSKDPHKTGPEDTTVLIETKRDYSTELSVTIAVGASLLFLNILAFAALYYKKDKRRHETHRRPSPQRNTTNDIAHIQNEEIMSLQMKQLEHDHECESLQAHDTLRLTCPPDYTLTLRRSPDDIPLMTPNTITMIPNTLTGMQPLHTFNTFSGGQNSTNLPHGHSTTRV

SEQ ID NO: 14382 - DNA, 2066 bp, Homo sapiens
  CDS (29)..(1243)
ccaagtgttcaaggactatatttctaaaatggacccagcctctaccctgggactaagcactgagtccatccatggctacagcatcagccacgtgaaacgagtgttggatgcagagccccccgagatgcctccttgccgtcgaggtgtcaataacatatcagtctccctcaaaggtctgaaggagaaatgcgtcgacagcctggtgttcgagacgctgatccccaagccgatgatgcagcactacataagcctcctgctgaagcaccggcgcctcgtcctctcgggccccagcggcacgggcaagacctacctgaccaatcgcttggccgagtacctggtggagcgctctggccgtgaggtcacagagggcatcgtcagcaccttcaacatgcaccagcagtcttgcaaggatctgcaactgtatctttccaacctagccaaccagatagaccgggaaacaggaattggggatgtgcccctggtgattctattggatgacctgagtgaagcaggctccatcagtgagttggtcaatggggccctcacctgcaagtatcataaatgtccctatattataggtaccaccaatcagcctgtaaaaatgacacccaaccatggcttgcacttgagcttcaggatgttgaccttctccaacaacgtggagccagccaatggcttcctggttcgttacctgaggaggaagctggtagagtcagacagcgacatcaatgccaacaaggaagagctgcttcgggtgctcgactgggtacccaagctgtggtatcatctccacaccttccttgagaagcacagcacctcagacttcctcatcggcccttgcttctttctgtcgtgtcccattggcattgaggacttccggacctggttcattgacctgtggaacaactctatcattccctatctacaggaaggagccaaggatgggataaaggtccatggacagaaagctgcttgggaggacccagtggaatgggtccgggacacacttccctggccatcagcccaacaagaccaatcaaagctgtaccacctgcccccacccaccgtgggccctcacagcattgcctcacctcccgaggataggacagtcaaagacagcaccccaagttctctggactcagatcctctgatggccatgctgctgaaacttcaagaagctgccaactacattgagtctccagatcgagaaaccatcctggaccccaaccttcaggcaacactttaagggttcggcaatcactgtcacccccggacagcagaacgctggcatcagctatcttagctcctcctctcccctctcctctttcagagcactggctctccagccccaggaggagaacaggagggaggaggagatgaaagaggagggacaggttcttggtgctgtacctttgagaacttcctaggaaggaatggtggggtggcgtttgggaacttgtgccccctaaacacatttactggcctcctctaatgactttggggaaaagatgattctgggtctttcccttgacttcttgtttcaattacaaactcctgggctttctggggaggggttcagaaaacatcaaaacactgcagcagttcctaaatgattctcacaagcaaccctgagagagacagtcttgtgagggagatctgggggaggcaggaagctcctcagattttctcacagacccttcccaattccatcaccactgccaacaactcctcccccagagatctggctggagcccagaaaaagaagcatgtggtttaaaaaatgtttaaatcaatctgtaaaaggtaaaaatgaaaaacaaaaacaagcaaacaaacaaaaaacaatggaaaagatgaagctggagagagaggaaccagttgccaaggtagagagctgcccgctcctgccctctggatgacataggggacatcaacaagacggctgccaacctgagaagtcaccaaaccacaaaaataaccttacagccttcagggaaagactaccagctctgtctttctaccctctaatttaacaatgcataagagtcaataaaccctactttttt

SEQ ID NO: 14383 - protein, 405 aa, Homo sapiens
MDPASTLGLSTESIHGYSISHVKRVLDAEPPEMPPCRRGVNNISVSLKGLKEKCVDSLVFETLIPKPMMQHYISLLLKHRRLVLSGPSGTGKTYLTNRLAEYLVERSGREVTEGIVSTFNMHQQSCKDLQLYLSNLANQIDRETGIGDVPLVILLDDLSEAGSISELVNGALTCKYHKCPYIIGTTNQPVKMTPNHGLHLSFRMLTFSNNVEPANGFLVRYLRRKLVESDSDINANKEELLRVLDWVPKLWYHLHTFLEKHSTSDFLIGPCFFLSCPIGIEDFRTWFIDLWNNSIIPYLQEGAKDGIKVHGQKAAWEDPVEWVRDTLPWPSAQQDQSKLYHLPPPTVGPHSIASPPEDRTVKDSTPSSLDSDPLMAMLLKLQEAANYIESPDRETILDPNLQATL

SEQ ID NO: 14384 - DNA, 2603 bp, Homo sapiens
  CDS (80)..(2329)
gaagacgcgctacctgtctggatctgggcgtgaaagagaagggagcctgaagggccacacattggcaggagaagagttcatgggccttggcctcggtaatttggtgagtggcggagtggataaaagacagatggccagcttccaagaatcggttggtgagaccagctcgcagagtgtggttgtagctgtggacaggatttttactgggtctaccagactggatggaaatgcaatagttgactttgtccgctggctgtgtgctgtgtccatggatgaactggcttccccccaccatcctcgcatgttcagcttgcagaagattgtggagatatcatactacaacatgaatcggatccgaccacagtggtctcgaatatggcatgtgattggagatcacttcaataaggttggctgcaaccctaatgaagatgtggctatctttgctgttgactcattaaggcaactctccatgaagtttcttgagaagggtgaattagccaacttccgtttccagaaagattttctgaggccctttgagcatattatgaagaaaaacaggtctcccaccatccgggacatggcgatccgctgcattgcccagatggtgaactcccaggcggccaacatccgctcaggttggaagaacatctttgccgtgttccaccaggcagcctctgatcatgatgggaacattgtggagctggccttccagaccacttgccacattgtcacaactattttccagcaccattttcctgcagccatcgattcctttcaggatgctgtgaagtgcttatcagagttcgcctgcaacgccgctttccctgacacgagcatggaagcgattcggctcatccgcttctgtggcaaatacgtctctgagaggcctcgggtgctacaagaatacacaagtgatgacatgaatgtagctcctggtgacagagtctgggtccgaggctggttccccatcttattcgaactctcctgcatcattaatagatgcaagttagatgtacgaacaaggggactcacagtcatgtttgagatcatgaagagctatggccacacctttgaaaagcactggtggcaggacctgttcagaatcgtgcttcggatttttgacaatatgaaactccctgagcaactgtcagagaaatctgagtggatgacaacaacctgcaatcacgcactttatgctatttgtgatgtttttacccagttttatgaagctttgaatgaagttcttctttctgatgtatttgcacaattgcagtggtgtgtcaaacaagataatgaacagttggcgcgatcaggtacaaattgcttagaaaacttagtaatatccaatggagagaaattcagtcctgaagtctgggatgaaacctgcaactgtatgttggatattttcaaaacaaccatcccacatgttttgctgacatggagacctgtaggaatggaggaagattcatcagaaaagcatttggatgtggatctggaccgccagtctttaagcagcatagataaaaatccctctgagaggggacagagccagctctctagcccaacagatgacagctggaagggtagaccatacgcaaatcagaaactgtttgccagcctcctcatcaagtgtgtggtccagttggaattgatacagaccattgacaacattgtgttctaccctgcgacgagcaaaaaggaggatgcagagcacatggttgccgcccagcaagacacgctggatgcagatatccacatagagacggaggatcagggcatgtataagtacatgtcttcccagcacctcttcaagctgttggactgtttgcaggaatcccattcattctcaaaggccttcaactccaattacgagcagcggactgtcctgtggcgagcaggttttaagggcaagtctaaacccaatcttctaaaacaagaaaccagcagcctggcctgttgtttgaggatcctgtttcgaatgtatgttgatgagaaccgcagggattcctgggaagaaatacagcagagacttttaactgtttgcagtgaagctcttgcctatttcatcactgtgaattctgagagccatcgggaggcctggacaagtctcttgttgttacttctaactaaaaccctcaaaataaatgatgaaaagttcaaagcacatgcttcaatgtactacccctacttgtgtgaaattatgcagtttgacctgatccctgagctccgagcagttctgcggaagttcttcctacggataggtgttgtgtataagatatggataccagaagagccatcacaggtaccagcagcactgtcaccagtgtggtagccctggctgcccaggccagtgctgcagctctgcagaatgttcagcatgccatttctgactggcacatcccgtgaagtttcatagaaacaaggagttggcatcttggatctcagaatggcctggaaacggatggcctctacgctgttccatcacagtctccaactaaggcttatggtatttcattaaactgttgcatacccagttagcacagtaggtggggagtctgcttcatttctatcattccatttttctgattaaactgtcaaatctg

SEQ ID NO: 14385 - protein, 750 aa, Homo sapiens [sequence omitted]

SEQ ID NO: 14386 - DNA, 2210 bp, Homo sapiens
  CDS (18)..(431)
gcactcatcagtagaagatgccacgacagccatggagctctaccggctggtggaggtgcagtgggaacagcaggaggcccgcagcctctggacctgccccgaggacagagaacctgacagcagcacagacatggaacagtacatggaggaccagtactggcccgatgacctggcccacggcagcagaggaggagccagggaggcacaggacagaaggaattgagaagggggcggggctccctggctgggcttccggtgtggccggtaggaagtgggggccaggagagcagcgggcactccttcctgggcagggtggggcaggatgcagtgagccagccccagggctagaggagttggggtcatctgttaccttgacaccctctgcacacagcatagccctctctctctccagggctgttggttctttctcctgactcctgtggttttgctaatggcactttacagactccatggagatgtcaggtggaccatcttctagggcccagcaggagtagggaatgtgccaacagactgcccaggttgccgtggccttccccaccccccagatctcctgagtcatcatgctgtgctaatgaaagggatcatatcatcctctctggggatggtgggtgggggtgtcaatatcctggagctcccttaccccaactcaatgacttgggggtaaagttctcttccttttgttgcctacctcttcctccactcatttgggttcagaataaacatgccctgaagttaaagaggagttaagtcctaaaggaggcatttcttccccacctccctgacctggaactctggctacagccattgtaggaactccgtgcctggcctgtcagctccctgctaggctacagtggaatagcagagcccacaggcttctcgtggggagttggctccttaacatttcttggcaacagaaagccccaggcacagctcagggaggagggaaggcaggtaagctttggacgagaactggcatatttattttgacccaaatcagggatttccccagtccacccagtactgggctcttaagcaaaagtctgagaaacaagacagtggtttgaattctggggcctttgtgtaggattgtgcctgacctttatttatttattaacagcagggccactcgtctagggcagtggagtctgcgtgtctcctggggctggggcagggcattggcagttacgcagtggccctgaacctggtctggtgcccccgaacctggtctgatgccccctcagctctttgacaatcactgtggctgttgggttttctcctatttctaaaaatgttctcttctttcctaagtgacagttttgaagtattggataaccaagagctcaggtcacacagaccttggagccccatctttgcttgcagcttagctttgagatactaagcaagcgagggacttcactcttgagcctgttttttcctcatctgtaaagtggggatagtggtacggcctacctcatagggttgtaatgagcactaaatgtgaagtgcttggcacagtgcctggcacatggtgagccacagctactgtgagtttctgtttatcccccttttttttttttaagcccattgtttattctttgagaatttgttgtaacttcttcaggataacacctgagtccacaggctgagcagctgtggcccagacagaactgctccggcttggctgttccagcaggtggggcgctggcctcggtgagggcacagcagcaaggttcacggatatccgtgtgtcttgtctgtggccaccaggcacaggtttggcttccggtcagtgtcccgacactgtgcgggaggtgacaacagagcaaagcagcgcaggggtcagggaggtggagacactgctgaaatcacactaccccaccctcagctgaagccccacgttccacaaacttggggtcatagattgtccagtcactggctccctccctgtcagcacagcacagaggaaggggctaactgaatcttttaccacttctggcctggctccagaactttgttctagattccttaaaagtcggtagctgatgtcaaactcgattgagcagtagctttgatcccttggtctgggggtcgaaggaagatggcgctgttatcagcggggaaatgtactatttaagatcagctttgttgtaaaaccatttgttctagaataaaactcaattggaaacgtg

SEQ ID NO: 14387 - protein, 138 aa, Homo sapiens [sequence omitted]

SEQ ID NO: 14388 - DNA, 2106 bp, Homo sapiens
  CDS (1326)..(1997)
taaattaaataattaaatagatgatttttacatactgtagagctatagagaaaatatagctggatgggtgatagtgacttggggatgggggtggctactctggatagggtagtttaaggtgacatctctgtgcagatgtagaatgggctagtgctttctaagaactgaaagatcagtgaagaaggggagcatagtgactgaggagtagtgtggcattagatggggtctgagagttacacaggaacatgtggagcctgtaggccatggtaaagcctttttctactcttctggtgatttaaagccattgtaaagttttgagcttgggagtaggtagcaaaataagatttatatttttatggggttactctggctgttgagaggagaaaaagacatgaatctgggaggccacttgggaagcaaggccatcagtgaagagaaagagtgggagaaaaaggtttgaggagagaaggtataggactttcactaaccttggaccatatatttgccaggaagaatgtaagttctccaacatcttcaaataaagaagtggttatgaggaatgatcagaataatggagatatgaaaccattccagaatttcacaacaataccaatcacacaggctctcaactacaatctgagcaaagaagggcatttagaaaaagaaccttggaatgcattcagccatcatggcccagttaatgtctccatcaatggaattccttgcattctcttctgggccaaaagaataatgattaaatttaagaatcaaacctggctggaccttacagacgagccatttggtcagaaggtaactgtggaccctgacaactcaaattgcagtgaagaaagtgctagaaaaaaaaagtaggctcctttgtataggaccctgacacacatctttgaggaagtatttactgtctaaaataaaggaacaagtcagaagttaacttcaaaaattgttggctgggcatggtggctcacgcctgtgatcccagcacttcgggaggccaagggagtggatcacctgaggtcaggagttggagacaagcctggccaacatggtgaaacctcgtctctactaaaatacaaaaattagccgggcgtggtggcaggtgcctgtaatcccagctactcaggaggctgagacaggagaattgcttgaacctgggaggtggaggttgtggtgagctgagatcgcgccattgctctccagcttgggtgacagagtgagtgagactccatctcaaaaaaaaaaaattgttatattttcccggcagttttcttctgaacctttttgctaattgtcggaataacttgtagaaaatgagactttggaaagcaagggttctcaaactcgttttgaaaacagcaaaggattccaggcttggtctcaactccaaatggttgtctttgaagcttggtgatgctggaaaccccagaagtcttgctataagattcatccttaccaattacaacaagttgtccatccagagttggtttagtttgcgccgagtcgagatcatttccaacaattcaatccaagcagtctttaacccaactggcgtatatgctccctctggttactcctaccgctgccaacgcgtgggcagcctgcagcaggaccaggccctcttgctgcccagcgacacggatgatgggtcgagcctgtgggaggtcacttttattgatttccagatccaaggttttgccatcaaggggggacgatttaccaaagcccaagactgcgcctcctccttctcgccagcttttctgatcggcctggcaatgtccctgatcctgctgctggtgttggcctatgccctgcacatgctcatctacctgcggtatctggaccaacaatatgatctcatcgcctctcctgcccacttctcgcagctgaaagctcgagacacagccgaagagaaggagctgctgaggagccagggggctgaatgctataaactgagaagccaacagatcagcaaaatctatgtttagcagcacaggctggcccccaccatgtccacagtgggctccgaaagttgtctctgttctgtgttatttgacttgtgaattacagattttcaccaaatggcttgattac

SEQ ID NO: 14389 - protein, 224 aa, Homo sapiens
MRLWKARVLKLVLKTAKDSRLGLNSKWLSLKLGDAGNPRSLAIRFILTNYNKLSIQSWFSLRRVEIISNNSIQAVFNPTGVYAPSGYSYRCQRVGSLQQDQALLLPSDTDDGSSLWEVTFIDFQIQGFAIKGGRFTKAQDCASSFSPAFLIGLAMSLILLLVLAYALHMLIYLRYLDQQYDLIASPAHFSQLKARDTAEEKELLRSQGAECYKLRSQQISKIYV

SEQ ID NO: 14390 - DNA, 2117 bp, Homo sapiens
  CDS (105)..(1745)
aactttacgacaggcgggattgttttgtggctgtcagctttccccgtggtctgagtttgtggctgcatttttatctctggtggctctgctacggcggcgcagaaatgaggcagaagcggaaaggagatctcagccctgctgagctgatgatgctgactataggagatgttattaaacaactgattgaagcccacgagcaggggaaagacatcgatctaaataaggtgaaaaccaagacagctgccaaatatggcctttctgcccagccccgcctggtggatatcattgctgccgtccctcctcagtatcgcaaggtcttgatgcccaagttaaaggcgaaacccatcagaactgctagtgggattgctgtcgtggctgtgatgtgcaaaccccacagatgtccacacatcagttttacaggaaatatatgtgtatactgccctggtggacctgattctgattttgagtattccacccagtcttacactggctatgagccaacctccatgagagctatccgtgccagatatgaccctttcctacagacaagacaccgaatagaacagttaaaacaacttggtcatagtgtggataaagtggagtttattgtgatgggtggaacgtttatggcccttccagaagaatacagagattattttattcgaaatttacatgatgccttatcaggacatacttccaacaatatttacgaggcagtcaagtattctgagagaagcctcacaaagtgtattggaattactattgaaaccagaccagattactgcatgaagcgacatttaagtgacatgttgacctatggctgcacaaggctggagattggggtgcagagtgtttatgaagatgtggctagagacaccaacaggggccacactgtgatggcagtgtgtgagtcatttcacctggccaaagattccggttttaaagtggtggcccatatgatgcctgacctgccaaacgtgggactagaaagagacattgaacagttcacagagttttttgagaaccctgcttttcgtcccgatgggctgaaactctatcctaccctggtgattcgtgggaccgggctttatgagctttggaaatcaggaagatataagagttactctcctagtgacctggttgaattggtggctcggatcctagccctcgtgcctccatggactcgagtgtaccgagtacagagggatattccaatgcctttagttagctcaggagtagagcatggtaacctgagagagctggcacttgcaagaatgaaagacctcggaatacagtgtcgagatgtgagaaccagagaagttggaatccaagaaattcatcacaaagtacggccataccaggttgaattggtaaggagagattatgttgcaaatggtggctgggaaacattcttgtcatacgaagacccagatcaagacattttgattggcctcctacgattacgcaagtgttcagaagaaactttccgtttcgaattgggtggaggtgtctccatagtacgagagctgcatgtgtatgggagtgtggtccctgtgagcagccgggatcctactaaatttcagcatcagggatttggcatgctgctgatggaggaagcagaaagaatagctagagaagaacatgggtctgggaaaatcgctgtgatatcaggggtcggcaccaggaattattatagaaagatcggctacagattacaaggcccgtacatggtgaagatgctgaaataatggccacaccagtccactcttctgcagtatcctccctggcagaacacggagaatcaggatttcttaaatactcaacagagaggctgagcagagcaaatggggggcttcaccctcatcccgcagctgcagagactggaaactgccttcaaggccacggctggtcatctgctgaccacaccccagatccgccctctcctgcgtgcaccccaaaaaatcacttgcgtttttgaggcttaaatcatctatccagtttctacattttgcatgaggcctgcaggtggcctattttgactcagacggtgaaaaaagcaaattaactcatttggacaccataactcatgcaataaaactgattgtcattcgaggagc

SEQ ID NO: 14391 - protein, 547 aa, Homo sapiens [sequence omitted]

SEQ ID NO: 14392 - DNA, 2138 bp, Homo sapiens
  CDS (47)..(1912)
tttgggccgagccaaccgcttcctcagcacagcggctgtgagcctcatgaccccacggcggcctctgagcacctcggagaaagtgaaggtccgcacgctgagcgtggagcagaggacccgtgaggacattgaaggcagccactggaatgagggcttgctgctggggcggccccccgaggagcctgagcagcccctcaccgagaactcgctgctggaagtcctggatggggcggtcatgatgtacaacctcagcgtacaccagcagctgggcaagatggtgggtgtctccgatgatgtcaatgaatacgctatggctctgagggacacagaggacaagctccgccggtgccccaagaggaggaaggacatccttgcagagttgaccaagagccagagggttttctcagaaaagctggaccacctgagccgccgtcttgcctgggtccatgccactgtctactcccaggagaagatgctggacatctactggctgctgcgcgtctgcctgcggaccattgagcacggtgatcacacagggtctctctttgccttcatgcccgagttctacctgagcgtggccatcaacagctacagtgctctcaagaattactttggtcccgtgcacagcatggaggagctcccaggctatgaagagaccctgacccgcctggctgccattctcgccaaacactttgccgacgcacgcattgtgggcactgacatccgagactcactgatgcaggccctggccagctacgtgtgctacccacactccctgcgggctgtggagcgaatccccgaggagcagcgtatcgccatggtgaggaacctcctggcgccctatgagcagcggccctgggcccagaccaactggatcctggtgcggctctggaggggctgtggcttcgggtaccgctatacacggctgccacatctgctgaaaaccaaacttgaggacgccaatttgcccagcctccagaagccctgcccttccaccctgctgcagcagcacatggcggacctcctacagcagggtcctgatgtggcacccagcttcctcaacagcgtcctcaatcagctcaactgggccttctctgaattcattggcatgatccaagagatccagcaggctgctgagcgcctggagcggaactttgtggacagccggcagctcaaggtatgtgccacctgctttgacctctcggtcagcctgctgcgtgtcttggagatgactatcacactggtgcctgagatattccttgactggacccggcctacctctgagatgctgctgcggcgtcttgcacagctgctaaaccaggtgctgaaccgggtgacagctgagaggaacctgtttgatcgtgtggtcaccctacggctgcctggcctagagagcgtggaccactatcccattctggtggcagtgacgggcatcctggtgcagctcctggtgcgtggcccagcctcagagagagagcaagccacatcagtgctcctggcagatccctgcttccagctacgctcaatatgctatctcctgggacagccagagcccccagcacctggcactgctctgccagcccctgaccggaagcgcttctccctgcagagctatgcggattatatcagtgccgatgagctggcccaagtggaacagatgctggcgcacctgacctctgcatctgcccaggcagcagctgcctccctgcccaccagtgaggaggacctctgccccatctgctatgcccaccccatctctgctgtgttccagccctgtggccacaagtcctgcaaagcctgtatcaaccagcacctgatgaacaacaaggactgcttcttctgcaaaaccaccatcgtgtctgtagaggactgggagaagggggccaatacgagtactacctcctcagctgcctagccctcacagcctgtgccatcctggaacctccacctttgaacccagagccaggctgggccctatttatgagctccctttgcccttctcctgtatcccacaccaccacatccaacctccttgcctgcctgtatcctcattggtgggagcccagccatggccctaattgtgcctgagcttgactttcagtcagggccacagtgagcattaaattattattccatac

SEQ ID NO: 14393 - protein, 622 aa, Homo sapiens [sequence omitted]

SEQ ID NO: 14394 - DNA, 2402 bp, Homo sapiens
taacaaatggtctctcgcccggttctgtcccttatttttagattgttttcctgcatcttacaatttccttttttttcaaagttcctttctccaggcctgtttttcagtgctcaggacacggttttcatcacatacttactgtttttttggttgggttttgatacgaaaagctgctacgtttggtgaccagagggagggtttggaatctgtgctttgcaggggatctcggtgggtaccgtggcccctcgcagggtggcgagtggggtccgttcctcgagaagggggcccttacccacaccgtgcggcttgaattctgtcggagttgaatctgtggaaaggattgtcccattagagctgctgcgtcctttcctctgtcctccctgtcacccaaaccccgaagtcacagctgcttagaagaatgggattttggggatacaaccacacacatttccctctggactgaaattttaaaaacagacccatttcactgacttctttagggaaaatagtttcagtcttgggttgtcttgtgagcccacgggcatgggaccctgtctctgctgggcttttccggccccgtcccagctcctcctcaggcagaggctgcagccctcagttctgctgctggatggaacatttcaaccccctccgggaaggtgggcagggtggagggcccagggctaggcctgccatgcaccatgagcaggggtgctacctgggtgtgtgaagttgggctggcttttcctggaggtgggtgagaaggctctccgggcaaatcagaaggccacgagagagagaggagcggggagagtggtgaggaggattcatctctgactgatgaacctcgccgtgcctgtctgtcacatccaagtctgtgccagctgctgggaggtcagactcctgccctgagaaacagcccagtccttggagaatgaaaccctgagggtcagtgagtggaggccttccctcggggccagccattcccgggaggcctgagtgtgacctggaagctctgtgggtcaccaagactggcattttccttgtatttttgtgcagggctgaagtgagcgttcctcctctgaattggtgaggctttggaatttttttgtttcttttactcatcctaatggctggttttggctgcccggagtatcagagaatatcactaagagggcagtcagtttatttttaggcatctttctttctgtccagggagaaacccctcggaagaatcttagtcactctttgcacctgccctgtcattctcgccatggggagaatgcgttgaaaagaaaaataccggggccagggagaagccgtgaatgcatttatttgctttggtgaagctgctgaacactggctgcggagggcccccggcccccatcccgcttcaggccccagtgacccagttgcgtcttaagttccgtcgtccagatttcaggccaccagaggctgccaaaggtggctgaagcagtctccaagtcactctgtctcaaaaataataatcaaatcaagtattttaagtttggctcttctttttttcaagaaaggcttttcggatacctagaataccttcatgtatgtggcttgatttctgtttcaggaaaaggggggcgggaggagagacaacagccgtgttccagagtctgtcctgagatgtcgctgagtccagacacttgggctgcacgtgccctgcagatgacaaaggccggcagctcagcacacgtgcaggaggggttaaagccaatattgagtttttgttcttgttgttttaatctgaacgattattctcctgtaaaaataatttgggaggggcgggtgttgttcggtgtgtgtgtgtgtgtgtgtgtgtgtgtgtgtgtgtatttttttttttacagtggcgcctgtctaaagtatttttcacaacatgtttgataatcagtgctttaaaaagcagcagtgtcctatgaagtggagatgtcagttctagagcattggatgtgaagttctggtcatgtcaccttgcgtgtctcaccctggaggagtgaaggtgggcgcccggcgggggggtgtggctgcaccccagcaccgggagggggcacgcacgacaccagaggaagggacagccccacccatgtcaacagcaggcgacctgtgttttcatttcaagtgggatacagtatttttttaaggagccatacttttttttaagagtttgagatctgaatgtgatttctaattgtatcagacgttaatgttttaaagctataacaaagtttaaaatttctactttttgtttttcatttattttaactgttcttttatctattaaattgttgtatgtggatggggaagttttgtttctcctcttagcatttgtttctataaccagaaataaaattctatattaaagaaatgac

SEQ ID NO: 14395 - DNA, 2549 bp, Homo sapiens
  CDS (690)..(1130)
gcggcgcttcttctgccgttgcgccttcttcagagcgctgagagccaccttggcggcctcccggaagacgtcctccacattctcccgaaacttggcggaacattccaggtagagagcagctcggatctgttcgcaggcgctcaggccctgggtggggggaggagccagcattaggtgaggggcccctggaggtctcctagcaccacctggtgggtttgggactggctctgaggactctgcagggatggaggccttggtttgggcctgtctgtctcctccatcctggctgcccctcacagtgtgtgggtggaatggagggccagggcagtgcagcccgcaggttggaagaagccctgtccaggcccccaccctggcctctctccagctccgggcagggaggggctgaatcctgagacccggggttggttcccccaggtgtgtctcccaggcctgtgagaagagttggaggcctcaagacagaaaggacttccagccacctctctcccttctctgaaagtaccatttaggcaaattaatttgcccttttatttatttatttttgggatggagttttgctcttgttacccgggctggagtgcagtggcgcgatcttggttcatcgcgacctctgccacccgggttcgggcgattctcctgcctcggcctcccgagtggctgggattgcaggcatgcgccaccatgcccggctagtgttgtgtttttggtggagatggggtttctctcatgttggtcaggctggtctcggactcccggcctcaggtgattcgcccgcctcggcctcccagggtgctgggattgcaggcgtgggccactatgcccggccggatttgcccttattaatggttatttcttgtgaaagtttctttttgcctttgcattccttttattctgtttattcccccatgcctcacccaaagagttgcacggtcaattggcccgtgaaggggacgcctactttcaaacaaggcagacaggacacgacaggacggcggctcatagcacagactttggattgcagtggatgggaccagatcctggctccacttctcgctagctgtgtggccctgggcaagctgcttaacctctctgggcctcagtttctccccctgtaaactgggggatgtgaacagcgcctgcctccgagtcctaaggattgggagtagtcgtgtaaagtgctcaggtccacaggccatcaatactaatagttaaaaattattcttagaatcttgcttccctcagctccctgaaaggccactaaggcaccccagttgcagaggccaaaggtccgggaggcttcacagccacggctgtgccccagggtcttggccccggcccacctgcatgtaggtgatgggctccagctgggcggcccggagcttccgcagctgctccttgtccttcctcaggtctgtcttgcagccgatgagcaccatggggatcccgcggcagaaatgcgtgacctcagggaaccactgtggagggaggaggcgggatcaggggtgcggccgggcccagatgtggggccaccacccaggaggccggcctcaccttgatgaggacgttgtcgtagctggtgggattcatgacgtcatagcagatgagcacgaggtgggtgttctggtaggacaggggccgcagccggtcatagtcttcttgccctgaaagcacagagcagcgggggtcaggggacgtcccctccctgtctggactctgacgggtgagggggaaggggccaggcaagtgaccctgccttagggcctcaatttcctcatctatacaatgggcagcaagccaggagtgctggcacaggcctgtggtcgcagctactcgggaggctgaggccggaggatcgcttgagcccagggggtcaaggctacagtgagccgtgatcatgccactgcactccagcctgggtgacagagcgagaccctgtctcttaacaacaaaacccatgagcggcagccccccagtcctggatggtggtaaagaatcctcaagatcaaacccacgcagtgctgagagcttggcctgattctagggctggggctggagaaactgctagagatgatgccgatagccagtgtgatccccctgccctgatggtcaagggcagagtgcagactggaaccctcccctccccaaagattcagacctgtggggctgagtgggctcatagtgtccccaagtcctgagaggctggtgtctggcttcagcctccagcttctcaggttctgatgcagtcagctgagttccctgcctattcttgcaagcactaggaggagggtggtgggttgctgggaacagcaccgagcgccctccccacccagattcacagagcacactccccggggggatactttaatccggaggccgtgacgcctggctccgccccgagacgagctgaatccaaatacggatctaggcttgagcttggttgggtttgcttttttcttcttcttctttataaacaattctttgtaactttttgtattgacagtttcaaacttacagtaaaattgcaacacgag

SEQ ID NO: 14396 - protein, 147 aa, Homo sapiens [sequence omitted]

SEQ ID NO: 14397 - DNA, 2364 bp, Homo sapiens
  CDS (250)..(2364)
gttccaagttgcatgtgcttgaaatagatttaattcttattccccacagtttaggtatttttcattagtacatcaatttgacacactgaatgcaagactattaatcccactgcttctcgcaggaactcaacaatagtgctacgcacagactcagagaagcgctcactggcagaaagtgggctgagctggtttagtgaatcagaggagaaagcccctaaaaaactggagtacgacagtggtagcctgaagatggaacctgggacttctaagtggcggagggagcggcctgagagccgtgatgattcatccaagggtggagaactgaaaaagcccatcagcctgggccaccctggttccctgaagaagggcaagaccccacctgtggctgtaacttcccccatcactcacacagcccagagtgccctcaaagtcgcaggcaaacctgagggcaaagctacggacaagggtaagcttgcagtgaagaatactgggctccaacgctcctcctctgatgctggtcgggaccgcctgagtgatgctaagaagcccccctcgggcattgctcgcccctccacttcgggatcctttggctacaagaagcctcctcctgccacaggcacagccactgtcatgcaaactggtggttcagccactctcagcaagatccagaagtcctcaggcatccctgtcaagccagtaaatgggcgcaagactagcttagatgtttccaacagtgcagagccaggattcctggctcctggagcccgttctaacatccagtaccgcagcctgccccggccagccaagtcaagttctatgagcgtgaccggcgggcggggtggacctcgccctgtgagcagcagcattgaccccagtctcctcagcaccaagcagggaggccttacgccttccagactgaaggagcctaccaaggtagccagtgggcggaccactccagcccctgtcaatcagacagatcgggaaaaggagaaggccaaagccaaggcagtggccttggactcagacaacatctccttgaagagtattggctccccagaaagtactcccaagaaccaagcaagccaccccacagccaccaagctggcagagctgccaccaacccctctcagggccacagcgaagagctttgtcaaaccaccctcactagccaatcttgacaaggtcaactccaacagtctggatctaccatcatccagtgataccacccatgcttcaaaggtcccagatctgcatgctacaagctcagcatctgggggccctctcccttcctgcttcacccccagtccggcacccatcctcaatattaactcagccagcttctcccagggcctggagctaatgagtggtttcagtgtgccaaaagagacccgcatgtaccccaaactctcaggcctgcacaggagcatggagtccctccagatgccaatgagcctccccagtgccttccccagcagtactcccgtccccaccccacctgctccccctgctgctcccacagaagaagagacggaagagctgacttggagtggaagccccagagctgggcaactggacagtaatcagcgggatcggaacactcttcccaagaaagggctcaggtaccagcttcagtcccaggaggagaccaaggagaggcgacatccccataccattggtgggctgcctgaatccgatgaccagtcagagctgccttctccccctgcacttcccatgtctctgagtgcaaagggccaacttaccaacatagtgagtcccactgcggccaccacgccaagaatcacccgctccaacagcatccccacccacgaggcggccttcgagctgtacagcggctcccaaatggggagcaccctgtccctggccgagagacccaagggaatgattcggtcaggatccttccgagaccccacggacgatgttcacggctcagtgctgtccctggcctccagtgcctcctccacctactcctcacaaatccggaagcttcgtagggaactggaattatcccaggaaaaagtggccaccttgacgtctcagctttctgccaatgctagtctggtggctgcttttgagcagagcctggtgaatatgacatcccgcctgcgacacctggcagagacggccgaggagaaggacactgagctgctggatttgcgagaaaccatagactttctgaagaaaaagaactctgaggcccaggcagtcattcagggagcccttaatgcctcagaaaccacacccaaagaacttcggatcaagagacaaaactcctcagatagcatctcaagcctcaacagcatcactagccattccagcatcggcagcagcaaggatgctgatgcg

SEQ ID NO: 14398 - protein, 705 aa, Homo sapiens
MEPGTSKWRRERPESRDDSSKGGELKKPISLGHPGSLKKGKTPPVAVTSPITHTAQSALKVAGKPEGKATDKGKLAVKNTGLQRSSSDAGRDRLSDAKKPPSGIARPSTSGSFGYKKPPPATGTATVMQTGGSATLSKIQKSSGIPVKPVNGRKTSLDVSNSAEPGFLAPGARSNIQYRSLPRPAKSSSMSVTGGRGGPRPVSSSIDPSLLSTKQGGLTPSRLKEPTKVASGRTTPAPVNQTDREKEKAKAKAVALDSDNISLKSIGSPESTPKNQASHPTATKLAELPPTPLRATAKSFVKPPSLANLDKVNSNSLDLPSSSDTTHASKVPDLHATSSASGGPLPSCFTPSPAPILNINSASFSQGLELMSGFSVPKETRMYPKLSGLHRSMESLQMPMSLPSAFPSSTPVPTPPAPPAAPTEEETEELTWSGSPRAGQLDSNQRDRNTLPKKGLRYQLQSQEETKERRHPHTIGGLPESDDQSELPSPPALPMSLSAKGQLTNIVSPTAATTPRITRSNSIPTHEAAFELYSGSQMGSTLSLAERPKGMIRSGSFRDPTDDVHGSVLSLASSASSTYSSQIRKLRRELELSQEKVATLTSQLSANASLVAAFEQSLVNMTSRLRHLAETAEEKDTELLDLRETIDFLKKKNSEAQAVIQGALNASETTPKELRIKRQNSSDSISSLNSITSHSSIGSSKDADA

SEQ ID NO: 14399 - DNA, 2255 bp, Homo sapiens
ccgtatgtggatgaggaggggaatctggtaaagccgctaaaaccgaacgggataaagatggagaagtttgtgtttgatgtgttccggtttgctaagaactttgctgccttggaagtgctgcgggaggaggaattttccccactgaagaacgcagagccagccgacagggacagtccccgcaccgctcgccaggccctgctcacccagcactaccggtgggctctgcgggccggggcccgcttcctggatgcccatggggcctggctcccagagctgcccagcttgcccccaaatggagaccctccggccatctgtgagatatcgcccttggtgtcttactctggagagggtttagaagtgtacctgcaaggccgggagttccagtccccgctcatcctggatgaagaccaggccagggagccgcagctgcaggagtcctgacccgcccagactgcccccagactcccccgagacctgccagccccggcatcctggaagtcccgactccccccagacctgccagccccggcgtcctggagctgggggctacagcccagcctgagctctgggtgggaaagcagcctgccccatgcttccagcctgcagaacacagaatgaaacatgctggtagactccacgagggcagggcctctcctgtcgcctctggacacaagtggcgacagcctgctgggggctctgtggctccattcctggctgtggggtctagtcaagaggcagagggacttgggacctgggagaatggggctgagaggaggcttcgggttggggcccaagggaggtgtggtgtcatctggggagaacaggagggcatgtccctttgggagcccgccttgtggatccaccacaccccaccgagcactagaagctgcataagctacacaggatgtgcttctgcagcctacagatgcagaaccagaatgagggggacaattccacccactcgagggctgccccctcttccttagcagacgaaccagtaatgggggcaaggctggggcatcccagcccacacaccctggatgcccagcaaggccacagaaagagcctgatgtccatgatccaggtggctctgagaagcttggcctggacacctgagcctgcggccggtactcctgccttctccccatctatccccaaggcctctgcctctcagcctcttccatggtcggtttaggctgctgagttttctgtgcttccccaagaaccagtgggatcaatgccggcggcctctgtgatggttgctgactaatccgggatttcatgagtcagaggcaccacccctcaccccagctgcctgctgcttctgacggatcttggtgctcaggctgcctggctctccgagtgaggacgcagcctccatatttggtgcactcaggcatggctgggacaagccagctgccccagggttcttcccctggtgattctcgcctgctttctcatctcaggggaggcagtggcacctccctctccctgctgacatgaagagagctatgatatgccactgctgccaactcatcctctgcccccacctcgaaacccacagtccccagtggagggccactactcatccccattggtttcccaggggaggggtgttgtctggaagggcaggttcagatgcagccttccagatttagaggcactgggaggacagtggctgagtggaggcgcccagacctgggcaggcagcaggctcaggcccacaccttgtgatttttgaaaccaaagcccagaagatgatgtttacttctctctccctggctctgccctccttactgcaaaccatgctgtgccttagggcccttctcatagctgttcctcatggccatgactggaacagggatgcaacctctttctacacaagcacagttagttgggtgaagtctttttttttgtttgttttagacggagtttcactcttgttgcccaggctggagtgaagtggcgtgaccttggctcactgcaacctccaggccagcctcagcctccctagtagctgggactacaggcacccactaccacgcctggctaattctttgtatttttagtagagatggggtttgaccgtgttagccaggatggtctcgatctcctgacctcgtgatccacccacctcggcctcccaaagtgctgggattataggtgtgagccaccgcgccgggccggttgctggcatcttaatgttctgtaggtggaatatttccaataaacacaaggtgccgtaattgactgct

SEQ ID NO: 14400 - DNA, 2113 bp, Homo sapiens
  CDS (81)..(1742)
agaacgtgctgtgtggatgcggcgaaacgctgaggcgcggccttcgttgtgtggtggggactcacaagaccgacgtcaagatgatgctttcaagggccaaacctgctgtaggcagaggcgtacagcacactgacaaaagaaagaagaaaggtaggaagattccaaaactagaggagctactttcaaaaagagatttcactggagctattaccctgttggagttcaaacgtcatgttggggaagaagaagaggatactaatttgtggattggatattgtgcctttcacctgggtgactacaagagagctctggaggaatacgaaaatgctacagaagaggaaaattgtaattctgaagtctgggtgaacctagcttgcacctacttctttcttgggatgtataaacaagctgaagcagctggatttaaagcttcaaaaagccgactccaaaaccgcctcctcttccacttggctcacaagtttaatgatgagaaaaaattgatgagctttcatcaaaatcttcaggatgtcacagaagatcaactcagtttggcctcaatccactatatgcgatctcactaccaagaagctatagatatatataagcgaatactgctagataacagggaataccttgcccttaatgtttatgtggccctctgctactacaagttggattactatgatgtgtctcaagaagttttggctgtttaccttcagcaaattcctgatagtaccatcgcactcaatcttaaagcctgtaaccattttcgcctttataatggcagagcagctgaggcagaactcaaaagcttgatggacaatgcttcttcatcctttgaatttgctaaagaactcatcaggcacaatctggttgttttccgaggaggtgaaggggctttgcaggttttacctcccctagttgatgtcattcctgaagctaggctaaacttggtgatttactaccttcgtcaagatgatgtacaagaagcttataacttaattaaggatctggaacctactactcctcaggagtatattctcaaaggagtggtcaatgcagcccttggccaggaaatgggttcaagggatcatatgaaaattgcccagcagttcttccagttggtgggaggatcagctagtgaatgtgatacaataccagggaggcagtgcatggcttcctgtttcttcctgcttaagcaatttgatgatgttttgatttacctcaactcatttaagagttacttctataatgatgacatctttaactttaattatgcccaagccaaagctgcaacaggcaataccagtgagggcgaagaggcgttcctcttgatccaaagtgagaagatgaaaaatgattacatttacctcagctggttagctcggtgctatattatgaataagaaaccaagactagcctgggaactttatcttaagatggaaacctccggcgagtccttcagtctcttacagctcattgctaatgtctgctacaagatgggccagttttactattctgccaaagcttttgatgtccttgagaggctggatcctaaccctgaatattgggaaggcaaacggggtgcctgtgtgggcattttccagatgatcatagctgggagagaacccaaagagacccttcgagaagtgctccatttactgagaagcacaggtaacacccaagtagaatacatgatccggatcatgaagaaatgggccaaagaaaacagagtgtccatctaaaatagcgccagcgtcctaggaaccagcttctactttgacataaaactggaaatcattttcactccagtttaatctgtgatacagggctctgttttattgacattttccttccttgctctttaagcctcaaggtcagagactgacttgctgagacttagtctcctggctgaacagagtgccatagtctgtgaccctgtatgatcctagtagcaataagattttggacttatctggtgcctttcttccaaaaatgctcagagtacttttatgcaatttactgactttaaggaaaacagtataacttttttttgttagcattttatggcattgtctcctggctgcaataacaaacatctttgatgttcaag

SEQ ID NO: 14401 - protein, 554 aa, Homo sapiens
MMLSRAKPAVGRGVQHTDKRKKKGRKIPKLEELLSKRDFTGAITLLEFKRHVGEEEEDTNLWIGYCAFHLGDYKRALEEYENATEEENCNSEVWVNLACTYFFLGMYKQAEAAGFKASKSRLQNRLLFHLAHKFNDEKKLMSFHQNLQDVTEDQLSLASIHYMRSHYQEAIDIYKRILLDNREYLALNVYVALCYYKLDYYDVSQEVLAVYLQQIPDSTIALNLKACNHFRLYNGRAAEAELKSLMDNASSSFEFAKELIRHNLVVFRGGEGALQVLPPLVDVIPEARLNLVIYYLRQDDVQEAYNLIKDLEPTTPQEYILKGVVNAALGQEMGSRDHMKIAQQFFQLVGGSASECDTIPGRQCMASCFFLLKQFDDVLIYLNSFKSYFYNDDIFNFNYAQAKAATGNTSEGEEAFLLIQSEKMKNDYIYLSWLARCYIMNKKPRLAWELYLKMETSGESFSLLQLIANVCYKMGQFYYSAKAFDVLERLDPNPEYWEGKRGACVGIFQMIIAGREPKETLREVLHLLRSTGNTQVEYMIRIMKKWAKENRVSI

SEQ ID NO: 14402 - DNA, 2597 bp, Homo sapiens
tatgcttgcttctctagggaagaatcccactgatgcataccttgatgccatgatgaatgaggccccagggccgattggtcttttttgacagggtgctgattggtgcatttacaatccctgagctagacactgagtgctgattggtgtatttataaaccttgagctagacacagagtgctgattggtgtgtttacaaaccattagctagacacaagagtgctgattggtgtatttacagtcccttagctagacataaatgttctccaagtccccatcagattagctaaatacagagcactaaatgttgtatttacaaaccttgagctagacacagagtgctgattggtgtatttacaaaccttagctagacacagagtgctgattggagtatttacaaccccttagctagagataaatgttctccaagtcctcactagactcaggagcccaactggcttcacctagtggatcctgcaccagggccgcaggcggagctgcctgccagtcgtgcaccgtgagcccacactcctcagcctttgggcggtcaatgggactgggcgccgcggagcagggggcggcgcttgtcggggaggctcaggccgcgcaggagcccatggcgaaggggaggctcaggcatggtgggctgcagatcccgcgccctgccccatggggaggcagctgaggcccagcaagaatttgagcgcagtgctggtgggctggcactgctgggggaaccggcacaccctccgcagctgctggcctgggtgctaagcccctcactgcctggggccagcagcgctggctggcagctccgagtgtggggcctgccgagcccacgcccacccagaactcgtgctggcccgtgagcaccacgcacagccccagttcctgcctgtgcctctccctccacacctccccacaagcagagggagccggctcaggccttggccagcccagagaggggctcccatggtgcagcagtgagctgaagggctcctcaagcagggccagagtgggcgccaaggccaaggaggtgctgagagtgagcgagggctgcaagggctgccagcacgccatcacctttcactgccactgacagtacctgggaaactgcagagccccacacacatgtgcactgactgtaacagcaggaatacagccagcacctgcagccctggctggtgtccacaggactgagtttcagtcccatagccttgacttacctgtgatgttggacacgttggtctcctccagccttgttttctccatctgtgaactgggccaacgctcctctgctgtgagctgatgcgaagccacctcagataacctctgtgctcagtgctctgtgccatggccgtcgcccgtcgctttactgaggctattgcagaagtcagcgtgggctctgggcttccgcaccaaggtgcgagatgctcaccccgtggaatgaggttgctctgacagcaggaccatggccgtgctcatgcccagctccgccttcgtgggacaccacgcatgggcactccctctggttggggaaaaactgtcatactggattgtgttccttttttgccttaaattattagctgccatttttgctcatcaaaaaagtggcattaggcacttccacatggatcgaagggccctgtcactagtgggttcctgctcagagcgtcttgtgtgatgtttcatcttgatgctttgacaggttaacaaccttctcatcaggatcattgttaggtccttcaggtgtggtcctggggaccggtgatgagggacacccccattgcatctcagctacggctcttggaccatgggcagcggtgctgaaatgacaatcctggagccacagccttcctccgtccacagccagtgtgctcacggacgacacaagtaattgtggacaccactttgccaccacgactgtttatgctgcagccccaggggccacagcagcagctggtctctcctcaatgatggttcagcgccgagtgcattggcggcacggtccatttctctgccgagcgcttgtgttgtgcctggggtctgagccacagcggcaggtggatgggagagattccctcggaacaggtgtctggagcaggtgggttgcggggccactgtcaagcacgtggggactgtgcctgtggcttcatccctgcgtggactcagtcctccccttgttttaagtggtccctgggtcctttgtgcacatcagtaattgcagaggcgggacgcgcactctctgagcggagcagcttggctgggcttgtccctttaatttgcgatgcatcacaacaaatgattgtaatcagtcaccgcccgacggcggcctgctcttccatgaccacccttcagtgagccggcagctgagcgacacggacaaagccgcctggctcagggttggggaaaacactctttagtcagtagagttaaaccacctgatttattccatattgtggaaggtcagtctgatttaaggaaatgtcagtttgatagaatgttttgaaagaaatgcagctcataaatactgcgctgaaagctcagccttgatacaagctcacttggtaaaataacttaataaaggaaactttcgattc

SEQ ID NO: 14403 - DNA, 2260 bp, Homo sapiens
  CDS (3)..(1700)
tgatgtatcacgaagctacagcttgccatgtgactggagatttagtagaacttctgtcaatatttctttcggttttgaagtctacacgcccttatcttcagagaaaagatgtgaaacaagcattaatccagtggcaggagcgaattgaatttgcccataaactgttaactcttcttaattcctatagtcctccagaacttagaaatgcctgtatagatgtcctcaaggaacttgtacttttgagtccccatgattttcttcatactctggttccctttctacaacacaaccattgtacttaccatcacagtaatataccaatgtctcttggaccttatttcccttgtcgagaaaatatcaagctaataggagggaaaagcaatattcggcctccgcgccctgaactcaatatgtgcctcttgcccacaatggtggaaaccagtaagggcaaagatgacgtttatgatcgtatgctgctagactacttcttttcttatcatcagttcatccatctattatgccgagttgcaatcaactgtgaaaaatttactgaaacattagttaagctgagtgtcctagttgcctatgaaggtttgccacttcatcttgcactgttccccaaactttggactgagctatgccagactcagtctgctatgtcaaaaaactgcatcaagcttttgtgtgaagatcctgttttcgcagaatatattaaatgtatcctaatggatgaaagaacttttttaaacaacaacattgtctacacgttcatgacacatttccttctaaaggttcaaagtcaagtgttttctgaagcaaactgtgccaatttgatcagcactcttattacaaacttgataagccagtatcagaacctacagtctgatttctccaaccgagttgaaatttccaaagcaagtgcttctttaaatggggacctgagggcactcgctttgctcctgtcagtacacactcccaaacagttaaacccagctctaattccaactctgcaagagcttttaagcaaatgcaggacttgtctgcaacagagaaactcactccaagagcaagaagccaaagaaagaaaaactaaagatgatgaaggagcaactcccattaaaaggcggcgtgttagcagtgatgaggagcacactgtagacagctgcatcagtgacatgaaaacagaaaccagggaggtcctgaccccaacgagcacttctgacaatgagaccagagactcctcaattattgatccaggaactgagcaagatcttccttcccctgaaaatagttctgttaaagaataccgaatggaagttccatcttcgttttcagaagacatgtcaaatatcaggtcacagcatgcagaagaacagtccaacaatggtagatatgacgattgtaaagaatttaaagacctccactgttccaaggattctaccctagctgaggaagaatctgagttcccttctacttctatctctgcagttctgtctgacttagctgacttgagaagctgtgatggccaagctttgccctcccaggaccctgaggttgctttatctctcagttgtggccattccagaggactctttagtcatatgcagcaacatgacattttagataccctgtgtaggaccattgaatctacaatccatgtcgtcacaaggatatctggcaaaggaaaccaagctgcttcttgacattaggtgtagcatgtctacttttaagtccctcacccccaacccccatgctgtttgtataagttttgcttatttgtttttgtgcttcagtttgtccagtgctctctgcttgaatggcaagatagatttataggcttaattcttggtcaggcagaactccagatgaaaaaaacttgcatcttcagtatacttcctaaagggcaatcagataatggatatgttttatgtaattaagagttcactttagtggctttcatttaatatggctgtctgggaagaacagggttgcctagccctgtacaatgtaatttaaacttacagcatttttactgtgtatgatatggtgtcctctgtgccagttttgtaccttatagaggcagattgcctccgatcgctgtggttcttattatcaaaattaagtttacttgtatacggaacaaccacaagaaatttgattctgtaaagaatcctctttagctgtggcctggcagtatataaatggtgctttatttaacagaatacctgtggaggaaataaagcacacttgatgtaaaaat

SEQ ID NO: 14404 - protein, 566 aa, Homo sapiens
MYHEATACHVTGDLVELLSIFLSVLKSTRPYLQRKDVKQALIQWQERIEFAHKLLTLLNSYSPPELRNACIDVLKELVLLSPHDFLHTLVPFLQHNHCTYHHSNIPMSLGPYFPCRENIKLIGGKSNIRPPRPELNMCLLPTMVETSKGKDDVYDRMLLDYFFSYHQFIHLLCRVAINCEKFTETLVKLSVLVAYEGLPLHLALFPKLWTELCQTQSAMSKNCIKLLCEDPVFAEYIKCILMDERTFLNNNIVYTFMTHFLLKVQSQVFSEANCANLISTLITNLISQYQNLQSDFSNRVEISKASASLNGDLRALALLLSVHTPKQLNPALIPTLQELLSKCRTCLQQRNSLQEQEAKERKTKDDEGATPIKRRRVSSDEEHTVDSCISDMKTETREVLTPTSTSDNETRDSSIIDPGTEQDLPSPENSSVKEYRMEVPSSFSEDMSNIRSQHAEEQSNNGRYDDCKEFKDLHCSKDSTLAEEESEFPSTSISAVLSDLADLRSCDGQALPSQDPEVALSLSCGHSRGLFSHMQQHDILDTLCRTIESTIHVVTRISGKGNQAAS

SEQ ID NO: 14405 - DNA, 2748 bp, Homo sapiens
  CDS (286)..(1770)
attgctccaagatggcggcggcggcggcagcgggagcgcagctcagctgggctggaactgccctcctggaactcccccagcctacaacctaggaggtgcagggactgaggctcaggccaaatcgcaactcagacccagtgaacccaaggcctgaagagaatttggattcatttaccttgttttgtggggactggagagacaagtaaactctcagagtaactgtcccctctgactaccatttctaaggatgccccggaggcccagctagccccagacttcggccccatgcggctcacccgctgccaggctgccctggcggccgccatcaccctcaaccttctggtcctcttctatgtctcgtggctgcagcaccagcctaggaattcccgggcccgggggccccgtcgtgcctctgctgccggcccccgtgtcaccgtcctggtgcgggagttcgaggcatttgacaacgcggtgcccgagctggtagactccttcctgcagcaagacccagcccagcccgtggtggtggcagccgacacgctcccctacccgcccctggccctgccccgcatccccaacgtgcgtctggcgctgctccagcccgccctggaccggccagccgcagcctcgcgcccggagacctacgtggccaccgagtttgtggccctagtacctgatggggcgcgggctgaggcacctggcctgctggagcgcatggtggaggcgctccgcgcaggaagcgcacgtctggtggccgccccggttgccacggccaaccctgccaggtgcctggccctgaacgtcagcctgcgagagtggaccgcccgctatggcgcagcccccgccgcgccccgctgcgacgccctggacggagatgctgtggtgctcctgcgcgcccgcgacctcttcaacctctcggcgcccctggcccggccggtgggcaccagcctctttctgcagaccgcccttcgcggctgggcggtgcagctgctggacttgaccttcgccgcggcgcgccagcccccgctggccacggcccacgcgcgctggaaggctgagcgcgagggacgcgctcggcgggcggcgctgctccgcgcgctgggcatccgcctagtgagctgggaaggcgggcggctggagtggttcggctgcaacaaggagaccacgcgctgcttcggaaccgtggtgggcgacacgcccgcctacctctacgaggagcgctggacgcccccctgctgcctgcgcgcgctgcgcgagaccgcccgctatgtggtgggcgtgctggaggctgcgggcgtgcgctactggctcgagggcggctcactgctgggggccgcccgccacggggacatcatcccatgggactacgacgtggacctgggcatctacttggaggacgtgggcaactgcgagcagctgcggggggcagaggccggctcggtggtggatgagcgcggcttcgtatgggagaaggcggtcgagggcgactttttccgcgtgcagtacagcgaaagcaaccacttgcacgtggacctgtggcccttctacccccgcaatggcgtcatgaccaaggacacgtggctggaccaccggcaggatgtggagtttcccgagcacttcctgcagccgctggtgcccctgccctttgccggcttcgtggcgcaggcgcctaacaactaccgccgcttcctggagctcaagttcgggcccggggtcatcgagaacccccagtaccccaacccggcactgctgagtctgacgggaagcggctgaagccctgataacctcgcctttgtttttcgggggtctgtctggatgtggagaagctctgtgtgagcggtgaggggtggagggatgtcgcggagaggggaagggggaaactgaccaagaaagaaattctaaggagagcatgagagaaggctggcattggcaggaggagagcaccaggacgaggatgggaagcgacctccagatttatcaaatggtcatgcccactgggagccgtggatatgcgtggggacatcctgggtcatctcagtcatggagggagacggggatgtcacgccgtcccgcagggcccagcacagccccagacccgaaaaaagtgttctgcccaagattccgagagccctgcgctctagggcaggggcagagttttggaaacagtgcaggctctggagccagactggcgagattcaaatcctggctctatcgcttcggagccaggtgggcctgggggggcgtcgcagtctctctgtgcctcagttgcttccaggatgcgggacccttggctgcaggggttgcttccgccactagagggcgcgccggtcccgctcctggtggcccactgtggctgcccgggcgacagtacgcccagggcctgtgttccatagccatctactctcttgagcctttggacttctctccaagcccctgtgggaggcggacagcagtgaccacctccccttcttttggactgcgacctccttccctcctgggagagccctgtgacctgcatgctactcttaactgttctattcaagactgaatagaagtatttcagtcttgcagaggaggaaatgctcagagctccgaggtgcggctgtggtcgagaaccgggtgctgggccgggcgcgggggctcacgcctgtaatcccagcactttgggaggccgaggtgggaggatcgcttgagcccaggagtctgagaccagcctcggcaacatgccaagaccccgtctctattttt

SEQ ID NO: 14406 - protein, 495 aa, Homo sapiens
MRLTRCQAALAAAITLNLLVLFYVSWLQHQPRNSRARGPRRASAAGPRVTVLVREFEAFDNAVPELVDSFLQQDPAQPVVVAADTLPYPPLALPRIPNVRLALLQPALDRPAAASRPETYVATEFVALVPDGARAEAPGLLERMVEALRAGSARLVAAPVATANPARCLALNVSLREWTARYGAAPAAPRCDALDGDAVVLLRARDLFNLSAPLARPVGTSLFLQTALRGWAVQLLDLTFAAARQPPLATAHARWKAEREGRARRAALLRALGIRLVSWEGGRLEWFGCNKETTRCFGTVVGDTPAYLYEERWTPPCCLRALRETARYVVGVLEAAGVRYWLEGGSLLGAARHGDIIPWDYDVDLGIYLEDVGNCEQLRGAEAGSVVDERGFVWEKAVEGDFFRVQYSESNHLHVDLWPFYPRNGVMTKDTWLDHRQDVEFPEHFLQPLVPLPFAGFVAQAPNNYRRFLELKFGPGVIENPQYPNPALLSLTGSG

SEQ ID NO: 14407 - DNA, 2002 bp, Homo sapiens
  CDS (127)..(993)
tttagtaaatcacacaaaaatccagcagaaattgtgaaaatcctgaaagacaatttggccattttggaaaagcaagacaaaaagacagacaaggcttcagaagaagtgtctaaatcactgcaagcaatgaaagaaattctgtgtggtacaaacgagaaagaacccccaacagaagcagtggctcagctagcacaagaactctacagcagtggcctgctggtgacactgatagctgacctgcagctgatagactttgagggaaaaaaagatgtgacccagatatttaacaacatcttgagaagacagataggcactcggagtcctactgtggagtatattagtgctcatcctcatatcctgtttatgctcctcaaaggatatgaagccccacagattgccttacgttgtgggattatgctgagagaatgtattcgacatgaaccacttgtcaaaatcatcctcttttctaatcaattcagagatttctttaagtacgtggagttgtcaacatttgatattgcttcagatgcctttgctactttcaaggatttactaaccagacataaagtgttggtagcagacttcttagaacaaaattacgacactatttttgaagactatgagaaattgcttcagtctgagaattatgttactaagagacagtctttaaagctgctaggggagctgatcctggaccgtcacaactttgccatcatgacaaagtatatcagcaagccggagaacctgaaactcatgatgaacctccttcgggataaaagtcccaacatccagtttgaagcctttcatgtttttaaggtgtttgtggccagtcctcacaaaacacagcctattgtggagatcctgttaaaaaatcagcccaaactcattgagtttctgagcagcttccaaaaagaaaggacggatgatgagcagttcgctgacgagaagaactacttgattaaacagatccgagacttgaagaaaacggccccttgaagagctccccggcccctgtcacagtcagtcgtctcatttgtccagtttgtacagtgtgtcatttcagaaagtcatcattcttgggaagactttggaggtgcctattttttctgctgtaattgttctgggtagatggagtataaacatttgaatggaaaaaaattaacctagaataatatattcattttagtcaagtctgtgattatttatgtgaaatgagaaccattgtatcagatgttgataaaagcaattttaacttgcagatgtgagcccctgggcacaatgagccgctaaatgggagctcaattgacaggcatcaccaagtcttcaaggaggactgagttctcaggggagaactgggaatggggccagggtgcaaaaatgctttgcccatctgtaggtagacacacagatcgctcagggcactgagagatcccagaaggtaacgttaatgttttcagtcattgtgtgtcctttgttgctgccaatgtctttggactgtaatcagtgcatccacacctcccaggatccagtgctccctctcagctcagtctcccctctctccctgtcctgcattccatcccagctcctcagcatggcctcagtgggcgcacccatgcctcccgcagtccaggtgagcaggggagcaactgagcaggaagaggatggatcaacaagggtcacggggaataggggacccacggggtgtgacctgcttgctagagaactgtgaacatgtggctctggatagagtgactgctgctccatattagcttccagagggtgagtgagggacagaatatttccttcataatggtcatgggtgaatgctttctgctgtaagtgtcttttagagtaggaatcagcatagtgggatgcccagcaggcacaaaccatgggtccagggagtctcagcggggaacttctatcagtatcaataaccattggaaggagaaatgattcatgtgtgaaaaaattctcagatccatcaataaatttttttcag

SEQ ID NO: 14408 - protein, 289 aa, Homo sapiens
MKEILCGTNEKEPPTEAVAQLAQELYSSGLLVTLIADLQLIDFEGKKDVTQIFNNILRRQIGTRSPTVEYISAHPHILFMLLKGYEAPQIALRCGIMLRECIRHEPLVKIILFSNQFRDFFKYVELSTFDIASDAFATFKDLLTRHKVLVADFLEQNYDTIFEDYEKLLQSENYVTKRQSLKLLGELILDRHNFAIMTKYISKPENLKLMMNLLRDKSPNIQFEAFHVFKVFVASPHKTQPIVEILLKNQPKLIEFLSSFQKERTDDEQFADEKNYLIKQIRDLKKTAP

SEQ ID NO: 14409 - DNA, 2026 bp, Homo sapiens
  CDS (83)..(1393)
aaaaccgaggcccgagccgcgggagtcgagcgaaggcagcgccgaggccgcggtttccccctgggcctccccagcagcagccatgggcatcaaatttttagaagttatcaaaccattctgtgcagttccaccagaaattcagaaaccggaaaggaaaatccagtttagagagaaggttctgtggactgctataacgctcttcattttcttagtgtgttgtcagatcccactgtttggaatcatgtcatcagattctgcagatcctttctactggatgagagttattctggcttccaatagaggaactttaatggaattgggtatctccccaattgtaacatctggtttgattatgcagttgttagctggagccaaaatcattgaagttggagatacaccgaaagatagagctttattcaatggagcccagaaactgtttggtatgatcattaccattgggcaagccattgtgtatgtcattacggggatgtatggggaccctgcagaaatgggtgctggaatctgtctcctgatcatcattcagttgtttgttgctggtttgattgtgctgctgttagatgagctgctacagaagggttacggcttggggtctgggatttccctctttattgccaccaacatctgtgagaccattgtctggaaggcctttagtcccactaccattaacactggcagaggtactgagtttgagggtgcagtcatagctctgttccatttgttggccaccaggacggacaaagtccgagctttacgggaggctttttatcggcagaacttacccaatctcatgaacctcattgctacagtttttgtgtttgctgttgttatatatttccaaggatttcgcgttgatctgcccattaagtcggcccgttaccgaggacagtacagcagctaccccatcaaactcttctacacctccaacatccccatcatcctccagtcggccctggtgtccaacctgtatgttatttcccagatgctgtctgttcgatttagtggcaactttttagtaaatttactaggacagtgggccgatgtcagtgggggaggacccgcacgttcttacccagttggaggcctttgttactatctttctcctcctgagtccatgggcgccatctttgaggatcctgtccatgtcgttgtttatatcatcttcatgttggggtcatgtgcattcttctctaagacatggattgaagtgtctggttcctcagccaaagatgtagctaaacagctgaaagaacagcagatggtaatgaggggccaccgagatacctctatggttcatgagcttaatagaccaaaagtgaagttaagaaggtggaagggagaaggaagacattttacaaaaaggatactcttctactaaaagataaccccgcacggcatttcacacttgcctacgtcaccctgctttccacgcacctcctcagagggaggggctgttattgttcctgttttatgaaaaaagccgagagaggctacagaacctgtttgatgtgatagctaattatggtccgcggagcctcaaaccgagtcgggcctgtgactccgagctgcgctgcctcgtattgattgtcatgcctttctccaaatacgcaccagataaactattgtatctattcagtatgactgttctaactctggctttgagctgtcgaggtggcttctaccttaggtctagtttttggaaaggtgaagcaggagtggaagctctctaagggatacgaaatctgattttatccaaagaaatcacagcagcctttgaaagacacattcagattttcaaacaaacaacagacatttcaaaaccaggcgctctgcttattcactgaaaccgtaagctgctgaaactcagggaaaagcttaagaaactggtcttaaagcttcaggccaaacaatgcttcaaatcacatttgaagtaatcacttaaaaacagtagaaaaatcagttatcaattacctaaaacacttatacccaataaaatattcccatgatg

SEQ ID NO: 14410 - protein, 437 aa, Homo sapiens [sequence omitted]

SEQ ID NO: 14411 - DNA, 2122 bp, Homo sapiens
  CDS (7)..(2121)
tctaaaatggatcgccagagtgttctccatgtactgggcatattgaaaaactccaaatttctcaaagtctgcctgcctgcttatgtggtagggatgatcactgaacccatccctgacatccgaaaccagtatccagagcacataagcaacatcatctccctcctccaggaccttgtaagtgtcttccctgccagttctgtgcaggaaacttccatgctggtttccctcctgccaacctctcttaatgctctgagagcctctggtgttgacatagaagaggaaacggagaagaacctggaaaaggtacagactatcattgaacatctgcaggaaaagaggcgagagggcactttgagagtggatacctacactctagtgcagcctgaggcagaagaccatgttgagagctaccgaaccatgcccatttaccctacctacaatgaagtgcacttggatgagaggcccttccttcgccccaatatcatttctggaaaatacgacagcactgctatctatctggatacccacttccggctcctgcgagaagatttcgtcagacctttacgggaaggtattttggaacttctccaaagctttgaagaccagggcctgaggaagagaaagtttgatgacatccgaatctactttgacaccaggattatcacccccatgtgttcatcatcaggcatagtctacaaggtgcagtttgacacaaaaccactgaagtttgttcgctggcagaattccaaacgattgctctatgggtctttggtatgcatgtccaaggacaacttcgagacatttctttttgccaccgtatctaacagggagcaggaagatctctgccgaggaattgtccagctctgcttcaatgagcaaagccaacagctgctagcagaggtccagccctctgactctttcctcatggtagagacaactgcatactttgaggcctacaggcacgtcctggaaggactccaggaggtccaggaggaagatgttcccttccagaggaatatcgtggagtgtaactctcatgtgaaggagccaaggtacttgctaatggggggcagatatgactttacccccttaatagagaatccttcagccactggggaatttctaagaaatgtcgagggtttgagacatcccagaattaatgtcttagatcctggccagtggccctcaaaagaagccctgaagctggatgactcccagatggaagccttgcagtttgctctcacaagggaactggctattattcaaggacctcctggaacaggcaaaacctatgtgggtctaaaaattgttcaggccctcctaaccaacgagtctgtttggcaaattagcctccagaagttccccatcttggttgtgtgttatactaatcatgctttggaccagtttctggaaggcatctacaattgtcagaagaccagcattgtgcgggtgggtggaaggagcaacagtgaaatcctgaagcagttcaccctaagggagctgaggaacaagcgggaattccgccgcaacctccccatgcacctccgaagggcctacatgagtatcatgacacagatgaaggagtcagagcaagagcttcatgaaggagccaagaccctggagtgcaccatgcgtggtgtcctacgggaacagtacctgcagaagtacatctcaccccagcactgggaaagtctcatgaatggaccagtgcaggatagtgaatggatttgcttccagcactggaagcattccatgatgctggagtggctaggtcttggtgtcggttctttcacgcaaagtgtttctccagcaggacctgagaatacagcccaggcagaaggggatgaggaggaagaaggggaggaggagagttcgctgatagagatcgcagaggaagctgacctgattcaagcagaccgggtgattgaggaggaagaggtggtgaggccccagcggcggaagaaggaagagagtggagcagaccaggagttggctaaaatgcttctggccatgaggctagaccattgtggcactgggacagcagctggacaggagcaagccacaggagagtggcagacagtaccctgcctggtattgatgtctgcagacccagcgcaaccag

SEQ ID NO: 14412 - protein, 705 aa, Homo sapiens
MDRQSVLHVLGILKNSKFLKVCLPAYVVGMITEPIPDIRNQYPEHISNIISLLQDLVSVFPASSVQETSMLVSLLPTSLNALRASGVDIEEETEKNLEKVQTIIEHLQEKRREGTLRVDTYTLVQPEAEDHVESYRTMPIYPTYNEVHLDERPFLRPNIISGKYDSTAIYLDTHFRLLREDFVRPLREGILELLQSFEDQGLRKRKFDDIRIYFDTRIITPMCSSSGIVYKVQFDTKPLKFVRWQNSKRLLYGSLVCMSKDNFETFLFATVSNREQEDLCRGIVQLCFNEQSQQLLAEVQPSDSFLMVETTAYFEAYRHVLEGLQEVQEEDVPFQRNIVECNSHVKEPRYLLMGGRYDFTPLIENPSATGEFLRNVEGLRHPRINVLDPGQWPSKEALKLDDSQMEALQFALTRELAIIQGPPGTGKTYVGLKIVQALLTNESVWQISLQKFPILVVCYTNHALDQFLEGIYNCQKTSIVRVGGRSNSEILKQFTLRELRNKREFRRNLPMHLRRAYMSIMTQMKESEQELHEGAKTLECTMRGVLREQYLQKYISPQHWESLMNGPVQDSEWICFQHWKHSMMLEWLGLGVGSFTQSVSPAGPENTAQAEGDEEEEGEEESSLIEIAEEADLIQADRVIEEEEVVRPQRRKKEESGADQELAKMLLAMRLDHCGTGTAAGQEQATGEWQTVPCLVLMSADPAQP

SEQ ID NO: 14413 - DNA, 2031 bp, Homo sapiens
  CDS (23)..(1906)
aaacattacccaggagcaaaatatgatcgtgacaggtggcttagcctggtggaatgattttatggtccttgcgtgttataacataaatgaccgtcaagaagagcttagagtatacttgcgaacatcaaatctggacaatgcctttgctcatgtcaccaaagcacaagcagaaacattactgcttagtgtcttccaggacatggtaatagtatttagagcagactgttcaatatgcctttacagtattgaaagaaaatctgatggtccaaatactactgctggtattcaagttcttcaggaggtttccatgtcacgctacattcctcaccctttcctggtggtatctgtcactctgacatcagtgagtacagagaatggaatcaccttgaaaatgccacagcaggctcgtggtgcagagagcattatgttaaacctggcaggacagctcatcatgatgcagagggacaggtcaggcccacagatccgggagaaggacagtaaccctaataaccaaaggaaacttctgccattctgtcctcctgttgtactagcccagtctgttgaaaatgtctggacaacgtgtcgagcaaataaacagaaacgtcaccttctggaggccctctggctgagctgtggtggtgcagggatgaaagtttggctccctctcttccctagggatcaccgcaagccccattccttcttgtcccagcggatcatgctgcctttccacatcaacatttacccgctagctgttctgtttgaagatgctttagtccttggtgctgtcaatgacactttgctctatgattctttatatactcggaacaatgctagagaacagctggaggtgctcttccctttctgtgttgtggagagaacctctcagatctacctccaccacattctacgtcaacttctggtcagaaaccttggggagcaagccttgctcttggcccagtcctgtgccacattaccttacttccctcatgtgctggagctcatgctccatgaagtactggaagaagaagctacctcacgggagcccattcccgaccctctgcttcccactgtggcaaaatttatcactgagttccccctcttcctgcagacagttgtccattgtgccaggaagaccgaatatgccctgtggaattacctttttgcagctgttggaaaccctaaggacttgtttgaggagtgtttgatggctcaggatttggacacagctgcctcttaccttattatcttacagaatatggaagtccctgcagtaagtaggcaacatgctacccttctatttaacacagcactagaacaaggcaagtgggacctttgtcgacacatgattcgatttcttaaagccattggctctggagaatctgagacacctccatccacacccacagctcaggaacccagttcaagtggtggatttgagttcttcaggaatcgaagcatcagtttatcccagtcagctgaaaatgttcctgccagtaaattcagtttacagaaaacactaagtatgccatctggtccctctggaaaaagatggagcaaagacagtgactgtgctgagaacatgtatattgacatgatgctctggagacatgctcggcgcctcttagaagatgtgaggttaaaggaccttggctgctttgcagcccagctgggctttgaactaattagttggctatgcaaggaacgtacccgagccgcccgggtagacaactttgtaatagccctgaagagactccacaaagatttcctgtggccacttccaatcatcccagcctcttctatcagttctcctttcaaaaatggaaaataccgaactggtaatgtagacttcatgtcacttgtacaaggagaattgtattttactccgtgtatttacacattttgctattagttgatattcaaggaattattttcattccaaacttaggaatggataaaagccaactttttgtacatgagttggaatgcccactgtttgaccaaagatgtaaataaagtagaacctatgtctct

SEQ ID NO: 14414 - protein, 628 aa, Homo sapiens
MIVTGGLAWWNDFMVLACYNINDRQEELRVYLRTSNLDNAFAHVTKAQAETLLLSVFQDMVIVFRADCSICLYSIERKSDGPNTTAGIQVLQEVSMSRYIPHPFLVVSVTLTSVSTENGITLKMPQQARGAESIMLNLAGQLIMMQRDRSGPQIREKDSNPNNQRKLLPFCPPVVLAQSVENVWTTCRANKQKRHLLEALWLSCGGAGMKVWLPLFPRDHRKPHSFLSQRIMLPFHINIYPLAVLFEDALVLGAVNDTLLYDSLYTRNNAREQLEVLFPFCVVERTSQIYLHHILRQLLVRNLGEQALLLAQSCATLPYFPHVLELMLHEVLEEEATSREPIPDPLLPTVAKFITEFPLFLQTVVHCARKTEYALWNYLFAAVGNPKDLFEECLMAQDLDTAASYLIILQNMEVPAVSRQHATLLFNTALEQGKWDLCRHMIRFLKAIGSGESETPPSTPTAQEPSSSGGFEFFRNRSISLSQSAENVPASKFSLQKTLSMPSGPSGKRWSKDSDCAENMYIDMMLWRHARRLLEDVRLKDLGCFAAQLGFELISWLCKERTRAARVDNFVIALKRLHKDFLWPLPIIPASSISSPFKNGKYRTGNVDFMSLVQGELYFTPCIYTFCY

SEQ ID NO: 14415 - DNA, 2114 bp, Homo sapiens
  CDS (217)..(1131)
attataaatctagagactccaggattttaacgttctgctggactgagctggttgcctcatgttattatgcaggcaactcactttatcccaatttcttgatacttttccttctggaggtcctatttctctaacatcttccagaaaagtcttaaagctgccttaaccttttttccagtccacctcttaaattttttcctcctcttcctctatactaacatgagtgtggatccagcttgtccccaaagcttgccttgctttgaagcatccgactgtaaagaatcttcacctatgcctgtgatttgtgggcctgaagaaaactatccatccttgcaaatgtcttctgctgagatgcctcacacggagactgtctctcctcttccctcctccatggatctgcttattcaggacagccctgattcttccaccagtcccaaaggcaaacaacccacttctgcagagaatagtgtcgcaaaaaaggaagacaaggtcccagtcaagaaacagaagaccagaactgtgttctcttccacccagctgtgtgtactcaatgatagatttcagagacagaaatacctcagcctccagcagatgcaagaactctccaacatcctgaacctcagctacaaacaggtgaagacctggttccagaaccagagaatgaaatctaagaggtggcagaaaaacaactggccgaagaatagcaatggtgtgacgcagaaggcctcagcacctacctaccccagcctctactcttcctaccaccagggatgcctggtgaacccgactgggaaccttccaatgtggagcaaccagacctggaacaattcaacctggagcaaccagacccagaacatccagtcctggagcaaccactcctggaacactcagacctggtgcacccaatcctggaacaatcaggcctggaacagtcccttctataactgtggagaggaatctctgcagtcctgcatgcagttccagccaaattctcctgccagtgacttggaggctgctttggaagctgctggggaaggccttaatgtaatacagcagaccactaggtattttagtactccacaaaccatggatttattcctaaactactccatgaacatgcaacctgaagacgtgtgaagatgagtgaaactgatattactcaatttcagtctggacactggctgaatccttcctctcccctcctcccatccctcataggatttttcttgtttggaaaccacgtgttctggtttccatgatgcctatccagtcaatctcatggagggtggagtatggttggagcctaatcagcgaggtttctttttttttttttcctattggatcttcctggagaaaatacttttttttttttttttgagacggagtcttgctctgtcgcccaggctggagtgcagtggcgcggtcttggctcactgcaagctccgcctcccgggttcacgccattctcctgcctcagcctcccgagcagctgggactacaggcgcccgccacctcgcccggctaatattttgtatttttagtagagacagggtttcactgtgttagccaggatggtctcgatctcctgaccttgtgatccgcccgcctcggcctccctaacagctgggattacaggcgtgagccaccgcgccctgcctagaaaagacattttaataaccttggctgctaaggacaacattgatagaagccgtctctggctatagataagtagatctaatactagtttggatatctttagggtttagaatctaacctcaagaataagaaatacaagtacgaattggtgatgaagatgtattcgtattgtttgggattgggaggctttgcttatttttttaaaactattgaggtaaagggttaagctgtaacatacttaattgatttcttaccgtttttggctctgttttgctatatcccctaatttgttggttgtgctaatctttgtagaaagaggtcttgtatttgctgcatcgtaatgacatgagtactactttagttggtttaagttcaaatgaatgaaacaaatatttttcctttagttgattttaccctgatttcaccgagtgtttcgatgagtaaatatacagcttaaacat

SEQ ID NO: 14416 - protein, 305 aa, Homo sapiens
MSVDPACPQSLPCFEASDCKESSPMPVICGPEENYPSLQMSSAEMPHTETVSPLPSSMDLLIQDSPDSSTSPKGKQPTSAENSVAKKEDKVPVKKQKTRTVFSSTQLCVLNDRFQRQKYLSLQQMQELSNILNLSYKQVKTWFQNQRMKSKRWQKNNWPKNSNGVTQKASAPTYPSLYSSYHQGCLVNPTGNLPMWSNQTWNNSTWSNQTQNIQSWSNHSWNTQTWCTQSWNNQAWNSPFYNCGEESLQSCMQFQPNSPASDLEAALEAAGEGLNVIQQTTRYFSTPQTMDLFLNYSMNMQPEDV

SEQ ID NO: 14417 - DNA, 1979 bp, Homo sapiens
  CDS (41)..(514)
atcgccgtcgcccgtgcccctcccagaccgcaccggccgcatggagcccccggagggcgccggcaccggagagatcgttaaggaggctgaggtgccgcaggctgcgctgggcgtctcagcccaggggacaggggacaatggccacacgcctgtggaggaggaggtcgggggcatcccagtaccagcaccggggctcctgcaggtcacggagaggaggcagcctctgagcagcgtctcctctctggaggtccacttcgacctcctggacctcactgagctcaccgacatgtcggaccaggagctggccgaggtctttgctgactcggacgacgagaacctcaacaccgagtccccagcaggtctgcacccgctgccccgggccggctacctgcgctccccttcctggacgaggacaagggctgagcagagccacgagaagcagcccctaggcgaccccgagcggcaggccacagtcctggacacgtttctcactgtggagaggccccaggaggactagaccatctccacctgccccagctcctgcagggatggggtccgaacacgatggcagatctgggcagtgctgacccagcagacacacttcacccgcccacgaggctccagccgtcacctcctgacacacaccctgggggcagctctctgccagccccgagaccggccttgtctgctgggcacgggtcttcgtctcacttggagaccagccggctttcctgggggacacacggggcccccggatgcctctgggagccccagcacaagcacagcccagtggccttacgtccagctcgttcctgggccccgagtcaggaagacagcgtcacggagtcactgccaggaacgtgctgaggaatggagtggcccacggcggccttggggtgaaggggacccaggcctgtgacagccactccaggaactcctgggggtgctccaacctccgcgttttcctgtgctgccaagctcagaagccagaggcgggtttagtagtggctaatgggacaatgtgctgtccagcaaagcacacatggagaagcggccccaaaattcccaccttgatttccatcctgccccttcttctactccacggaggcgctgtctcactagggtcccctccccaaggctcagctctaagacctgcacctgcttctcttggcccctgcgtgacagacaagtccattccctccttagctcagaacaccaaatatcaccagactgcctaagagacttgatgacacctcccggaatgctctcggggtggggttcacctctccttgtcccgcacccactgctaggccacattctcgtttctgctcacatcccattgcccggctacaaggcctgcccacggcccttaaacttgctgggcaggtttggagcccatgggaccccgtgggtctctgtccaggagcagcagaggaggctgacaggccctgctccctctgctctgggggtgtctgggagccccagctcacaccctcccaatgcttatatgctgaagctcacagaatgggcttcttgcctgacagcaagtcaaagaatgagtttaatatcaaagtgtaagcttactttccatccccaagccagcctgccccctgccccatttcccatgagcacacttctggggaaggaaaacaggctcctggccttcactctcagcagagctttggagatgccccaggcatgccctgagctccttctgtgtacctgctcccacttctgagccacccgctgcccctccgcactgctggcaaacccagttcctgcctcagccaggtctccttccctggtttccagtcacacagagcccagcagctttctctttcagtcccataagggcagccttgtgtccctggccacacttccacccgccagggtcttcctccccatctttccatccttcctgctgagcttccacagagctcgtttgcaaacagggggattaaagcatcactgcgcattcg

SEQ ID NO: 14418 - protein, 158 aa, Homo sapiens [sequence omitted]

SEQ ID NO: 14419 - DNA, 2155 bp, Homo sapiens
  CDS (65)..(1405)
gtcgcgacgggggttcagggaatatttactgggcctctccgctccctctgctcttggaggtgccatgaggtcagttagctacgtgcagcgcgtggcgctggagttcagcgggagcctcttcccgcacgcaatctgcctcggagacgttgataacgatacgttaaatgaactggtggtgggagacaccagcgggaaggtgtctgtgtataaaaatgatgacagtcggccatggctcacctgttcctgccagggaatgctgacttgcgctggggttggagacgtgtgtaataaaggaaagaacctgttggtggcagtgagtgctgaaggctggtttcatttgtttgacctgacacctgccaaggtgttggatgcttctgggcaccacgagacactaatcggagaggagcagcgtccagtcttcaagcagcacatccctgccaacaccaaggtcatgctgatcagcgacatcgatggagatgggtgtcgtgagctggtggtgggctacacagaccgtgtggtgcgagctttccgctgggaggagctaggtgagggtcctgaacatctgacagggcagctggtgtccctcaagaaatggatgctggagggtcaggtggacagcctctcagtgactctggggccactgggtcttcctgaactgatggtgtctcagccaggttgtgcgtatgcaattctactgtgtacctggaaaaaggacactgggtcccctcctgcctctgaagggcccacggatggtagtagggagaccccagctgcccgagacgtggtgctgcaccagacatctggccgtatccacaacaagaatgtctccactcacctaattggcaacatcaaacaaggccacggcactgagagtagtggctctggcctctttgccctgtgcaccctggatgggacactgaagctcatggaagaaatggaagaagcagacaagctgctgtggtcagtgcaggtggatcaccagctctttgccctggagaaactggatgtcaccggcaacgggcatgaggaggtagttgcatgcgcctgggatggacagacatatatcattgatcacaaccgcaccgtcgtccgcttccaagtggatgaaaatatccgtgccttctgtgcgggcctgtacgcctgcaaagagggccgcaacagcccctgcctcgtatatgtcactttcaaccagaagatctatgtgtactgggaggtgcagctggagcggatggagtctaccaatctggtgaaactgctggagaccaagccggagtaccacagcctgctgcaggagctgggcgtggatcctgacgacctccctgtgactcgtgccctgcttcaccaaacgctctaccatccagaccagccaccacagtgtgctccctcaagcctccaggatcccacctagctgtacttgcctcatagctggtgaaggattcttctgaacccccaccctaccccctaaaggtatctgtggtattggcaggatagggaatatgcattacagaaatgcaggatttgactctgggcatgaaagatggcagcagccctagggtgaccgtgaactatagacctcgcagtcttttcggtgaaagaagagacaagttgaccctctgcccatttccttatggacctcacccatcatgccagcagggtcataggaccctggccttgttccaaatcatctgggacatgacccactccccactgtcactgtgttgaaaacagagacttgtttgtgtggccccaacacccataaggaaaccaggctttaggcccaggggagcagtggaggtaagggctccaccccatcttaagctctgtcttccgtggcacaattccaagttcttgacgttagtaattgttaaaggaatggcaaactgttttgttttgaaggatctttctacagtctggtcttacccatgttcctagcaaccctgagatgattttcttccatttaccaaagcagccgggtcagtgccttctcacgttgccgtattcttcaggtattagtcagcttcagaagccctgctcccatttttccacccacccattcccccataaaacagcttattgtctccaagacaatagacatttaaaatgtgatgcgggtttatgatccagaccacaatcagaattatatcttgggtcattt

SEQ ID NO: 14420 - protein, 447 aa, Homo sapiens
MRSVSYVQRVALEFSGSLFPHAICLGDVDNDTLNELVVGDTSGKVSVYKNDDSRPWLTCSCQGMLTCAGVGDVCNKGKNLLVAVSAEGWFHLFDLTPAKVLDASGHHETLIGEEQRPVFKQHIPANTKVMLISDIDGDGCRELVVGYTDRVVRAFRWEELGEGPEHLTGQLVSLKKWMLEGQVDSLSVTLGPLGLPELMVSQPGCAYAILLCTWKKDTGSPPASEGPTDGSRETPAARDVVLHQTSGRIHNKNVSTHLIGNIKQGHGTESSGSGLFALCTLDGTLKLMEEMEEADKLLWSVQVDHQLFALEKLDVTGNGHEEVVACAWDGQTYIIDHNRTVVRFQVDENIRAFCAGLYACKEGRNSPCLVYVTFNQKIYVYWEVQLERMESTNLVKLLETKPEYHSLLQELGVDPDDLPVTRALLHQTLYHPDQPPQCAPSSLQDPT

SEQ ID NO: 14421 - DNA, 2058 bp, Homo sapiens
ttttctacctaacaattactgagcattcaactctgtgctgcgtgtgtgctaacccttcacacacaccacctcactaatcctcacagtccttgaaggtggggactagtgtcacacgtggccattgggaacatcacacagatcaaaggctgggctcaaggtcacattgcctaaacacacattcatgtgacgtgagaaccttaactcttgccctcccagtgacacttccttctctgggtttccattccgccttgcagagagcattctgacttactgtagccttctgtgtgtgtgtctcccctctctactgtgagcccctcgagagcagggcccatgccttccccatccctgtcccagaagctaactggaaacagtggagacatgcagcagattgttgactgaagaaggtgctgcgtccatggtcatccctcatatcctttataaatttcttacacatttcattcctttgtgggaattgcatcttgaagctttgtttatagccatctgcgtgggtcccttaggctatgtggctgactttaatgctacagatatttttccgtttctggcatgtagcagtgctgggcttagcattgcagagattataaaagagaagacatggcccctgccctccaattgcagagatgagaccatatggaacacaattagccattaaagacaatacatttcagtatttgcatggagtatttgattatatagcacatgcaaattctttggaatgacatacaaggccctgcaagatctgattctaggccactttcccagtttcatctgctactctcccacggatccccccacatcccagacatactgaggtgtgtgcagtcctctgagcccaccatgcttccaatgtcaccatctctttgtaggtgctgtttcttcttcctagaatgcctgtcttgttcctatctgcctggcaacttcttactcatcttttagaacactgtctagtgccagttctttcctttttgtttttgtttttgttttcatggcctttgtatgtttttctgtagtgtgacccttatcacataagtcagttttgtaagtctgctctgcctgttcattgttgagttactttaggtcaagatccgtgtctcagtgatggaaaaatgaatgacaaaatagaaattggataaatgggaaggaaggagtgatgatctaacatggctgggggtcagtggggaatcactttcattggccagaatagagagctaaataaagtggcttaaaggcattagaggttcatttgcatgtggaaaaagcctggaggtggatggttgagtgctggtgtgggtgccacaatgtcatcaggagcccgggctctgctgcgcagcttggccacctttaatgcgaagtttccctcttcagggtaatctcgtggctcaaaatggttgctggagctgcagccatcttatccatttcaggcaagaaggactagagaggtcagctggtacaaaaaaaaaaaattatgttcattccctgaaggcagtctccttcaaacaggtttctcagggtcctttacccaggagcttcatctgcatctcaggccaggatgtagtcacatggtcacctctgagtttggaagagatgtaaatatacagcaataaacataggttatctccacatttaatttaaaatgacattgctttttaaaacagtttttaggtctgaatacacatttctcaaaaaaagatataaaatggccaataagcatatgaaaagatgcttagggaattagtcattagggaaatacaaatcagaaccacaatgagacataatttcacatctaccaggatagcactagagtcaaaaaggcataataacaagtgctggcaaagagagaaattagaattctcaaaacgccactggtgggactgtgaaatgttacagcagtctggcaagccctcacaaagttaaacacttgagttaccctatgacccagcaatcccacttctaggtatacatatgtgagagaatgaaaacatacatccacacaaaagcttatgtatgcatattcatagcactattcataatagccaaaag

SEQ ID NO: 14422 - DNA, 2001 bp, Homo sapiens
  CDS (368)..(1891)
caaaataaaaggaaaaccactgtgtaaaacagtaggcggatctttcagagactccaaatcattgacaattcagaaggatcttgtcgctgcatttgacaacggagaccagaaggtgttcttcgatctgtgggaggagcacatttcaagttccatccgagatggggactcctttgcccagaagctggaattctatctccacatccattttgccatctatcttttgaagtactctgtggggagaccggacaaagaggagctggatgaaaagatttcctacttcaaaacctacctggagaccaaaggggcagccttgagccagaccacagagtttcttcctttctatgcccttccttttgttcccaaccctatggtgcacccctcatttaaagaactcttccaggattcctggactccagagttaaagttgaagttggaaaagtttctagctttaatatctaaagccagcaacacgccaaagcttttaacaatatataaggagaatggacaaagtaacaaagaaatcttgcagcagctccaccagcagctggttgaagctgaacgtaggtcagtgacatacctcaaacggtacaataagatccaggccgactaccacaatctcattggagtcacagcagagctggtggattctctagaggccacagtcagcggcaagatgatcacccctgagtacctccagagcgtctgtgtccgcctgttcagtaaccagatgcggcagagcctggcgcatagtgtggacttcacgaggcctgggacggcatccaccatgttacgagcctccttggcacccgtgaaattgaaggatgtcccattactgccctccttggattatgagaaactgaagaaggatttgattttggggagtgaccgcttgaaagccttcttgttgcaggctctgcgctggcgcttgaccacatcccatcctggagagcagagggagaccgttctgcaagcctacatcagcaatgacctcttggactgttatagccacaaccagaggagtgtgcttcagttgctgcactccacgagcgacgtggtgcggcagtacatggccaggctcatcaatgcttttgcgtcactggcagaaggtcgcctctaccttgcccagaacacaaaggtgctgcagatgctggagggaaggctgaaggaggaggacaaggatatcatcaccagggagaatgttcttggggccctgcagaagttcagtctcaggcgcccgctgcagacagcgatgattcaagacggcctcatcttctggctggttgatgttctgaaggaccctgactgcctgtctgactacacgctggagtactcggtggctttgctcatgaacctctgcctccgcagcacagggaagaacatgtgtgccaaggtggcaggcctcgtgctcaaagtcctttcggatcttcttggccatgaaaaccatgagatacagccgtatgtgaatggagctctgtacagcatcctttctgttccatccattcgtgaggaagcaagagcaatgggaatggaagacatcctacgctgcttcatcaaagaaggcaatgctgaaatgatccgccagatagaattcatcatcaagcagctaaattccgaagagctaccagatggtgttcttgaatctgatgatgatgaagatgaagatgatgaagaggaccatgacatcatggaagccgatctggacaaagacgaactgatccagccccagcttggagaactctcaggagagaagcttctgaccacagagtacctggggatcatgaccaacacggggaagacaaggcggaaggggctggctaatgtgcagtggagcggggatgagcccctgcaaaggcccgtcacccccggcggccacagaaacgggtacccagtgtaagtcagggctaaaggaagcgggaattgactttcttaagctttgttttgattacagtgtaagatgtatgtatttttaaaattcaaaataaagcattcattttgaaaagc

SEQ ID NO: 14423 - protein, 508 aa, Homo sapiens
MVHPSFKELFQDSWTPELKLKLEKFLALISKASNTPKLLTIYKENGQSNKEILQQLHQQLVEAERRSVTYLKRYNKIQADYHNLIGVTAELVDSLEATVSGKMITPEYLQSVCVRLFSNQMRQSLAHSVDFTRPGTASTMLRASLAPVKLKDVPLLPSLDYEKLKKDLILGSDRLKAFLLQALRWRLTTSHPGEQRETVLQAYISNDLLDCYSHNQRSVLQLLHSTSDVVRQYMARLINAFASLAEGRLYLAQNTKVLQMLEGRLKEEDKDIITRENVLGALQKFSLRRPLQTAMIQDGLIFWLVDVLKDPDCLSDYTLEYSVALLMNLCLRSTGKNMCAKVAGLVLKVLSDLLGHENHEIQPYVNGALYSILSVPSIREEARAMGMEDILRCFIKEGNAEMIRQIEFIIKQLNSEELPDGVLESDDDEDEDDEEDHDIMEADLDKDELIQPQLGELSGEKLLTTEYLGIMTNTGKTRRKGLANVQWSGDEPLQRPVTPGGHRNGYPV

SEQ ID NO: 14424 - DNA, 2467 bp, Homo sapiens
  CDS (198)..(1859)
atctctgcaagacaaaagtcagaaatggcttccctggggactgagagcccatagttctcttcccactgctgcttctacccttttgttttgcttggctctctaaaattgtctcagctccagctcttctcacagacagttttatcatcttatcatttttggcacaaaacaaactatgttttattcagtttaccaagaagatggagtcttctgatgtaaacaaaagactggaaaaactctcagccttggattataagattttctattatgaaatacccggcccaataaacaagacaacagagcgacatctagctatcaactgtgttcatgatagagttgtttgctggtggccactggtcaacgatgatgcttggccttgggcccccatttcttctgagaaggacagagccaatctactcctcctgagttatgctcaaggaagactagaggttctgagttctgtccgcacagaatgggacccactggatgttcgctttggcaccaaacagccttatcaggtgttcacagtggagcactccgtaagtgtagacaaagagcccatggctgacagctgcatctatgaatgcattcggaataaaatccagtgtgtgtcagtcaccagaataccactaaagtcaaaggccatcagctgctgcaggaatgttactgaagacaaactgattctgggctgtgaagattcttcgctaattctttatgaaactcaccgtagagtgactctcttagcacagactgaacttttgccttcattaataagctgccacccaagtggtgccattctgctagttggcagcaaccaaggggagttgcaaatttttgatatggctctatcccctattaacatccaactgttggctgaagaccgcttacccagggagactctgcaattcagtaaattatttgatgcctccagcagtcttgttcaaatgcaatggatagctcctcaggttgtttctcagaagggtgaaggtagtgatatctatgatctcctcttcctcaggtttgaaagaggacctttgggtgtgctgttgtttaaactaggcgtcttcactcgaggacagctgggcctgatagacatcatcttccagtacattcactgtgatgagatctatgaggcaataaacatcctgagcagcatgaactgggacactctgggccaccagtgctttatcagcatgagcgccattgtaaaccatcttcttagacagaagctcactccagagagagaagcacagcttgagacaagccttggaaccttctatgctccaacaagaccacttctggattccactatattggaatatagagatcaaatcagcaaatatgcaaggagattcttccatcacttgctcaggtaccagaggtttgaaaaggcatttctcctagctgttgacgttggtgctcgtgacctctttatggatattcattaccttgcactagataaaggtgaattggcactagctgaagtggcaagaaaaagagctagtgacattgatgcagaatcaataacctctggggttgaactcctgggacccttggacagaggggatatgctaaatgaagcatttattggcctgtctttagcacctcaaggagaagactcatttccagataacctccctccctcttgcccaacccacagacatattttacaacaaagaatactgaatggctcttctaacagacaaataattgacagaaggaatgaacttgaaaaagacatctgttctggatttttgatgactaatacctgtaatgcagaagacggagaactgagagaagacggcagagaacaggaaatcagagatggtggttctctcaaaatgattcactttggtctggtgtaaacattaagaaaaaaaagaaaactgccttcttcatatctaaacttttcatggcctgatacagacttaaaatcccccgtgtggatttttaacaagagacagtatgaatcatataaattagttaagagttttgagttgagtgtttgttttcaaaataaagttttattatttcaaaaacatgcagcataacagcaaagtgatcgtaagtaaaagtcttcaacctacttattttcaataatgtaaaattttgaaagtgtcttaaattgtatgttaattaggtgctacaaaaatagaatatttaaactttgttctcccaggtactttaaaaaaggggcagtagggggcaggcatagtgctcatgcctgtagtcccagtgctttaggaggccaaggctgaaggatcacttgagcccaggagttcaagactagcctgtgcaacatagtgaaacgctgtctctagaaaaaattttaaaaattagccaggcatggtggtacatgcttgtgaagctgaggcagaagaattgcttgagcccaggagttcaaggctacagtgagctgtgatcgcgccactgcactctaacctgggcaacagagagtgaccctgtctcc

SEQ ID NO: 14425 - protein, 554 aa, Homo sapiens [sequence omitted]

SEQ ID NO: 14426 - DNA, 2170 bp, Homo sapiens
  CDS (32)..(1153)
tcattttacctctcttggtcatcagaaaataatgaaaagaggcaagaaatcgtatgaaggtaagaattttgagaacatctttactctgagctcatcgcttaatgaaaaccagagaaatctccctggagagaaacaatatagatgtactgaatgtggcaaatgcttcaaacggaactcttctcttgttttgcatcaccgaactcacaccggagagaagccttatacttgtaatgagtgtggaaagtccttctccaagaactacaacctgattgtgcatcaaagaatccacacaggagagaagccctatgaatgcagtaaatgtgggaaagctttcagtgatggctcagctctgacacagcaccagagaattcacacaggcgagaaaccttatgaatgcctagagtgtggaaaaaccttcaaccgaaattcatccttaattttgcaccaaagaactcatacaggggaaaaaccatatagatgtaacgaatgtgggaaacccttcactgacatctcccaccttacagtgcatctcagaatccacaccggtgagaagccctatgagtgtagcaaatgtggaaaggctttccgggacggctcgtacctcacccagcatgagaggactcacactggagaaaagccctttgagtgtgcagagtgcgggaaatccttcaacagaaactctcacctcattgtgcatcaaaagatccattctggggagaaaccctatgaatgtaaagaatgtggcaagactttcatcgagagtgcgtacctcatcaggcatcagaggattcatactggcgagaagccctatggctgcaaccagtgtcagaaacttttcaggaatatcgctggcctcattaggcaccagaggactcatactggtgagaagccctatgagtgtaatcagtgtggcaaagccttcagggacagctcctgtctgaccaagcaccagagaattcacactaaggagaccccatatcagtgtccagaatgtgggaagtccttcaagcagaactctcacctggcagtacatcagagactccatagcagggagggtcccagccggtgtcctcagtgtggaaaaatgttccaaaagagctcatcccttgttcgacatcaaagagcacacctgggagagcaacccatggaaacataatggttgggggccacatgagtcttccagttcactctcactcctgtgtttaggaggcgtgtcttagatctgactcctctctggtcagtagaaaagaatcctttaagctatccagtgaattgatgaatgtgagacattgctgagccacactgttaagtctgctcattggggaactccagagacaacttaggatgagggcagaaaagtctttggggatgattcagtctgtaccagacatgacaacacacacactggaatgaaatgtgcaaacatgggggtgacaccacagagagaacctgtgaatgcattcagaacatgattggaatgaagagccctgtagtagggagtttccaccttgtacgtaagcaaacactgaatcaacttttttttttttttcggacagagtctcactgtgcagtggcatgatctccactcacagcaacctctgcctcccaggttcaagcagttctcctgcctcagcctggccagcatggtgaaaccccatctctaccaaaaatacaggaaattatctgggcatagtagtgtgtgcctgtaatcccagctacttgggaagctgaggcaggagaattgcttgaacctgggaggtggaggttgcagtgagctaagatcgcaccactgcactccagcctgggtgacagagcgagactccatttcaaaaaaaaagactgaaacaagcttgtgctaagatggaaagggctgcttctaacagatgtggtttgttgctttagttgttgaagcaaaaatactgagttgttatgtttatgttatcaccccaccactacctccatggttgttcatttaggatgcttctaattcagccactgtgaaccattataaaggttttattgccatgttgaaaatgtttataatatggcaaaaaggggcatcaaatagaagatttactattattccagccatgtaaaaatatgtgcacatatggatgtatgttgaaagtggatgatggagaaataaaatgtggttttctttggggactgg

SEQ ID NO: 14427 - protein, 374 aa, Homo sapiens
MKRGKKSYEGKNFENIFTLSSSLNENQRNLPGEKQYRCTECGKCFKRNSSLVLHHRTHTGEKPYTCNECGKSFSKNYNLIVHQRIHTGEKPYECSKCGKAFSDGSALTQHQRIHTGEKPYECLECGKTFNRNSSLILHQRTHTGEKPYRCNECGKPFTDISHLTVHLRIHTGEKPYECSKCGKAFRDGSYLTQHERTHTGEKPFECAECGKSFNRNSHLIVHQKIHSGEKPYECKECGKTFIESAYLIRHQRIHTGEKPYGCNQCQKLFRNIAGLIRHQRTHTGEKPYECNQCGKAFRDSSCLTKHQRIHTKETPYQCPECGKSFKQNSHLAVHQRLHSREGPSRCPQCGKMFQKSSSLVRHQRAHLGEQPMET

SEQ ID NO: 14428 - DNA, 3047 bp, Homo sapiens
  CDS (349)..(2265)
aaactaaaactgctgcaactctatgagtctgtcagtcaattaaattcccttgattttcatttagacacaccattctctgataatgacttggctctgttactaaggcttgatgaaaaagaactgcttaagctccaggcattactagagaaatataagcaagagaacaccaggacaaatgttcgattttctgatgataaagatggtgtgttgcctgtaaaaacattcttggaatatttagaatatgaaaaggatgtgctcaacataaagaaaataagtgaagaggaatatgtggctttaggtagtttctttttttggaagtgtttgcatggagaaagctccactgaggatatgtgtcacactttggagtcggctggtcttagccctcagctgttgttgtctctgctcctgagtgtttggctttcaaaggaaaaggatattttggataaaccacagtcaatctactgtcttcataccatgctgtccctcctgagcaagatgaaagtggccatcgatgagacctgggattctcagtctgtgtccccatggtggcagcagatgcgcacagcctgtattcagtctgagaacaatggagccgctctgttgtctgcgcatgttgggcattctgttgctgcacagatatcaaacaacatgacagagaaaaaattttcccaaacagttttgggtgctgattcagaggccctcactgattcctgggaggcactttctcttgacactgagtactggaaactccttctgaaacagctggaggattgtctcatacttcagactctgcttcacagcaaagggaacactcagacctccaaagtgtcatcactgcaggctgagccacttccaaggctttctgttaaaaagttattagaaggaggaaaaggtggcattgcagacagtgtagccaagtggatatttaaacaggacttcagccctgaagtattaaaactggctaatgaagaaagagatgcagaaaacccagatgaacccaaagaaggtgttaacagaagtttccttgaggtatcagagatggagatggacttaggagccataccagacttactgcatttagcctatgagcagtttccttgtagccttgagctcgatgtcttgcatgcacattgctgctgggagtacgttgttcagtggaataaagatccagaggaagcacgtttttttgttaggtcaatagaacacttgaagcaaatatttaatgcacatgttcaaaatggcattgcactgatgatgtggaatacgttcttagttaaaagattttctgctgctacatacttaatggataaggttggaaaatcaccaaaagataggttatgccgaagggatgtgggaatgagtgacacagcaatgacatctttcctcggctcctgtttggaccttcttcagatcttaatggaggcagatgttagcagggatgaaatacaggtgcctgtgctggatactgaggatgcgtggctctccgtggaaggaccaatctccatagtggaactggcccttgaacagaagcacatccactacccactggtggagcaccactccatcctgtgctccgtcttgtatgcagtcatgaggttttctctgaagaccgtgaagccactttcactttttgacagtaagggaaaaaatgcatttttcaaagacctaacttcaattcagttattacctagtggggaaatggatccaaattttatttctgtacgacaacagttcttattgaaagttgtcagtgcagctgtccaggcccaacattcagccacaaaggtcaaagatcccacagaagaggccacacccactccttttgggaaagaccaagattggccagctctagctgtggatttagcccatcaccttcaagttagtgaagatgttgttagaaggcattatgtgggggaactatacaactatggagttgaccacttaggagaagaggccattctacaggttcatgacaaagaggtccttgcctctcagctgctggtgctcacggggcaaaggctggctcatgcgcttctccacacccagacaaaagaaggaatggagctgcttgccagacttccacccacactgtgtacttggctgaaagcaatggacccccaggaccttcaaaacactgaagtgccaattgcaacaacagctaaactagtaaataaagtaattgagcttttaccagaaaaacatgggcaatatggtctagccttacacctcattgaagctgtggaagccatatctcttccttctttatgacacttacctactggaaatagtctaaaattatgattataacatgaagtagtgcatggttattttacatagtaagacctggaattttatgggaaaagtatgtctttttttttccttttgtaaaataaataaaagtatatacaacttttaaaaagtgcaaccctggctaaattccactcctttggttaatactgaagataaaatataaacaaatgtcaactctgttataattaatacagatgttttactgtctatttctaattcaaacacttaagtagctttattgttaaactttgctatttaaaattggttataatttagattatgttcttataagattctatatttcctatctaaaatgttgttgtaattcaatttaaatgtgttcatgtacagtccccatcagtagcgtatagaacaccccactctcctttagtaaatgttgagaaaatgcctttgttgtcatgctccaaatcccacactgggctgccacctgggagttctggataccgaaaggttcctttcccagaggttctgctgttgccatcagaggaggatgaccgtgcttgaggaggaagaatgggttcaagatcatcatattcatcagaaggggacactaaatagaacccttaacctgttgtacttgccaaaattgagaatcagagatgtgtaaaatgcagcaaattaattataatgtaagttaagatttgctttttgccaagttgcaaagttgtatccacatcaggtcactgtaaaaatgtattatcttgtaaaacttatgt

SEQ ID NO: 14429 - protein, 639 aa, Homo sapiens [sequence omitted]

SEQ ID NO: 14430 - DNA, 2349 bp, Homo sapiens
  CDS (131)..(985)
gttgctgaatctgttgcctgctgctggtgaactccaggagtctggcctggccttgtgtcctgaggtccaagatcttcttgaaggttgtgaactgcctgacctcccctctagccttctgctcccagaggacatggctcttcgtaacctgcccccgctccgagctgcccacagacgctttaactttgacacggatcggcccctgctcagcaccttagaggagtcagtggtgcgcatctgctgcatccgcagctttggtcatttcatcgcccgcctgcaaggcagcatcctgcagttcaacccagaggttggcatcttcgtcagcattgcccagtctgagcaggagagcctgctgcagcaggcccaggcacagttccgaatggcacaggaggaagctcgtcggaacaggctcatgagagacatggctcagctacgacttcagctcgaagtgtctcagctggagggcagcctgcagcagcccaaggcccagtcagccatgtctccctacctcgtccctgacacccaggccctctgccaccatctccctgtcatccgccaactggccaccagtggccgcttcattgtcatcatcccaaggacaatgatcgatggcctggatttgctgaagaaggaacacccaggggcccgggatgggattcggtacctggaggcagagtttaaaaaaggaaacaggtacattcgctgccagaaagaggtgggaaagagctttgagcggcataagctgaagaggcaggatgcagatgcctggactctctataagatcctagacagctgcaaacagctgactctggcccagggggcaggtgaggaggatccgagtggcatggtgaccatcatcacaggccttccactggacaaccccagcgtgctttcaggccccatgcaggcagccctgcaggccgctgcccacgccagtgtggacatcaagaatgttctggacttctacaagcagtggaaggaaattggttgatactgacccccaggccctgcagtggggctgactccagatctctcctgccctccctggcagccaggaccagcacctgtagtcaccccaccacacgcggactcatgcacgcacacaggagggaggcctagctgctcagaggctgcggggagggcccaggagccggctgggagggtggggtccctttgttgccaagacgttaggaaagcgaggaaagtgcttggattaggagagtcttgtgggcccctggccagccttcctgcctcagctcccctgctgtctccaggggcaggtggtaggcatgggtacctgcatttcactggagtgggttcttggatctctgaggggaaggaacagcaaaagaggcccttcttcctcacccaagatgcagggtggttggggccgggagtttggaccctctaggtcttgggggaagagctgggtaatacctggtgtctgagtgattctctgcagacccttcccctcctcaaggatcacccatcctcctttcagccccctttatggggaccaggcagctctggagccagccacaggggctgttagagaagcaaggcctggagtggcctgcaccgagtagcagggtcagggttcgtgtgctcctcctcctgctgcaggggctgcacatcccattgccccacttctgctttgtgtctccctctgtctagcttccagggcagggagcaggccccacctagggctgcaggcagtctggcctgtgccagcacggtctcctgtgcccaccagccccacaggtgctgtgctttgtgctcttggctgctgtgctgggacagaatgggatgccaggaagagaagaaagggggtgcagtctgaggccaccaccccccttcctatctaagggagggctgaagacaaggggccggcattcagtgggcagcagaaaggagaggccccttgaagctgctcagtcagaggcccccgtccctccttttgccttccgcaggactgaagacctgaaggggctggcttttggagtgttgaggtgaatatctgggagcagagatcatgaatagctcagggcagtgaatggcgcaccaagagcagggctgtgtgtgggaggctgcagccaggattgcctcagctcctccccctcaggctgggaggatagcacaggctaggggctcggggtggagggtctcagctctgctgcccccaccccagtactagcctagcttcccaagctgtggcttagaggatagttggcttcctgcctctctcctctaaaatagcaagtctgggaaatcctggggtgagtggagtcaccccactcccagttgctggcagagactgagactaaagcatcacttaataaaccccccaagccc

SEQ ID NO: 14431 - protein, 285 aa, Homo sapiens [sequence omitted]

SEQ ID NO: 14432 - DNA, 3100 bp, Homo sapiens
  CDS (78)..(1391)
agctgcagttccacgatgtgcgggatgctgccgccgagttcctggagaagaaccttttcccctccaactgcctgggcatgatgctgctctcggacgcccaccagtgccgccggctgtatgagttctcctggcgcatgtgcctggtgcactttgagacggtgaggcagagcgaggacttcaacagcctgtccaaggacacactgctggacctcatctcgagtgatgagctggagaccgaggacgagcgggtggtcttcgagaccatcctccagtgggtgaagcacgacctggagccacggaaggtccacttgcccgagctcctccgcagcgtgcgtctggccttgctgccgtccgactgcctgcaggaggccatctccagcgaggccctcctcatggcagacgagcgcaccaagcttatcatggatgaggccctgcgctgcaagaccaggatcctgcagaatgatggcgtggtcaccagcccctgtgcccggccacgcaaggcgggccacacgctactcatcctggggggccagaccttcatgtgtgacaagatctaccaggtggaccacaaggccaaggagatcatccccaaggccgacctgcccagcccccggaaggagttcagcgcctcagcgatcggctgcaaggtctatgtgacggggggcaggggctccgagaacggggtctccaaggatgtctgggtgtacgacaccgtacatgaggaatggtccaaggcggcgcccatgctgattgcccgctttggccatggctcagctgagctggagaactgcctctatgtggtggggggacacacatccctggcaggggtcttcccggcctcgccttctgtctccctgaaacaagtggagaaatacgaccctggggccaacaagtggatgatggtggcccccttgcgggatggcgtcagcaatgccgcagtggtgagtgccaagctgaagctctttgttttcggaggaaccagcatccaccgggacatggtgtccaaggtccagtgctatgacccctcggagaacaggtggacgatcaaggccgagtgcccccagccttggcgttacacagccgctgccgtcctgggcagccagatcttcatcatgggaggtgacacggaattcacagccgcctcggcctaccgctttgactgtgagaccaaccagtggacgcggattggggacatgactgccaagcgcatgtcctgccatgccctggcttccggcaacaagctctatgtggtcgggggctactttgggacccagaggtgtaagactctggactgctatgaccccacttcagatacatggaactgcatcaccacagtgccctactcacttatccccacggcctttgtcagcacctggaagcacctgcccgcgtgaggagcacctgctgagcccagccagaccgcggccttcagtgtcacagcgtggccttgcttgtctgccacagcgggagctaagccggccctgggccagcactccgagaggtggaaggggccctgccagctctggggagcagcagccttgggctgttctgagctttaggcaagagaagagaagcatctcttgcatccgtgcccctgggggcctcttcagctttgcagtggtttgtgggaagacatacctcccagaggggcatgtactgccaccaggactgaccctggcgtcggggagaaggacacttgcagagccttgagatcacctgtttggcaggtcctggactggggccgggcaggcaggggcagggaggcgccccgggtgggctttggggctgcggcactgccgcacatcctttccctcctggcctgccctgctggggctctactgccatctatagatggtgtcctgggcctgggaaactaggttcccaggggttgagaccagaaaggtgaccaagacagattttttaaggtgcagaaactgcaggggggcctcagtgacatccatgaggccttattagcaaaggacacccagacctccaaggtttgtgggccccttccacaaagctgtaagtcccagcccacctactcagggccttgctcagtgctgtggcccggtggggacacagttgctcgtggccactcagtggagctgggcctgcagcagactcaaggctccgagtgccctgggggtcacccctcccctcccctcctcagagcccaccctgagaggcagcagtgacccccatggcacacacctgccaacagcactgggggcttctccccaggagaccacgctgccctccaagaccaggagcagctgtgagctggagacagcagagggaccccagggtgtcccctgcagatcccaccagggccgcatccatctcagtgtggaggacagtgacgggaccctcaccatcctcttgcgttttggcccccatttgctccctgagctccaagataagaatggccccgagagaactgctgaacatttgttcattgctgtcacctcctgagtcactggggtccctcaccagcacctccctgacacctgggctatggagaggttggcgcctgtcagtgaccatcctaatgcctctcgctcactcccaagccaccatttgagagggaggggtgttggtgccctgacagggactgggcagggtgtccaaacttggggcttcccaggcacctgcagtgtgaacactgcttggctggctcaagattagggccgcggagggggctgtgcacataccagttacttaagcagccacgagtgtcccccatgccttggtgcgggtcctggaggcctcttgggggtgggacctttgggcagggtttgcccactgacacgcccgccatggggcactggctgcatggggctccttggaccctgtagacccagcagaccccgcctgtgtcaggccagctgcccgaaggcacttggctgtggtcccaggggacggctctgctggcacactcaggagcctggccgcggggactgcagggagggtgcctggacccgtggggttgcttcattgagataaagcacacttatcacgtagcacaaaggacgtgccatggtgctttccccaaaagttgtgttgcttttatcagttttctaacttaataaaaagagttgag

SEQ ID NO: 14433 - protein, 438 aa, Homo sapiens
MMLLSDAHQCRRLYEFSWRMCLVHFETVRQSEDFNSLSKDTLLDLISSDELETEDERVVFETILQWVKHDLEPRKVHLPELLRSVRLALLPSDCLQEAISSEALLMADERTKLIMDEALRCKTRILQNDGVVTSPCARPRKAGHTLLILGGQTFMCDKIYQVDHKAKEIIPKADLPSPRKEFSASAIGCKVYVTGGRGSENGVSKDVWVYDTVHEEWSKAAPMLIARFGHGSAELENCLYVVGGHTSLAGVFPASPSVSLKQVEKYDPGANKWMMVAPLRDGVSNAAVVSAKLKLFVFGGTSIHRDMVSKVQCYDPSENRWTIKAECPQPWRYTAAAVLGSQIFIMGGDTEFTAASAYRFDCETNQWTRIGDMTAKRMSCHALASGNKLYVVGGYFGTQRCKTLDCYDPTSDTWNCITTVPYSLIPTAFVSTWKHLPA

SEQ ID NO: 14434 - DNA, 2187 bp, Homo sapiens
  CDS (11)..(649)
attgaggaacatggcgttgctggtgcgagtccttaggaaccagactagcatttctcagtgggttccagtatgcagccgattgatacctgtgtctcctacccaaggacagggggacagggctctgtctcgcacttcccagtggccccagatgagccagtcccaagcatgtggtggatcagaacagattcctggaatagacatacagctgaataggaagtatcacaccacacgtaagctttctactaccaaagattccccacagcctgttgaggagaaggttggtgctttcacaaagataatagaagccatgggattcacgggacctttgaaatacagtaaatggaagattaagattgcggccctgcgcatgtatactagctgtgtggagaaaactgacttcgaggaattctttctaaggtgtcagatgcctgatacattcaattcatggtttcttataaccctactccacgtctggatgtgtctagtccgaatgaagcaggaaggccggagtgggaagtacatgtgtcgtatcatagttcattttatgtgggaggatgttcagcagcgcggcagagtcatgggggggatcctttcagatgatcatgggctggccgctgccctctggagaaccttcttcaaccggaaatgttaagaccctcgacatcttgaattgctggtagagtatgtgaggaaacagatacagtacctggactccatgaacggggaggatctgcttctgacaggggaggtgagctggcgccctctagtggagaagaatcctcagagcatcctgaagccccattctccgacttacaacgacgagggactttgatgggctgggccctccgcacggcccgccagctggcttcgaggaacctccaggagagaagtgcctgttggtccaggaccctgcagaaagtggcctgaactgacctctgaacagcatctgtcaaatacctggccccatttgtgttgagtttcctcttagtgtgcccaggagtctgatctgctggggtacagggctgggagaacccctagctctcccggggtgtcctctcccttaggggaagccccgagtgagagtcccccagcacacactccccaaccccctccagcaactacatgtgactgatagcttttcccaaaggccaaggaagggatggtgtaggttcaaaagggaaaccccccagggcctgctgtggcctaggagcagattgtaatgctgccgagtccggtcggtgaccacgcgttgtccctcggctttcagccatggggttgagttggccattaaaagaaacagagacttctctctgccatggcccttctttattccagggacttagaaacttgcctgagatggtggacgcagtaatgagggcaccgcgcagctcagttagagacggagaaagggaagaggctgggatggtctctgctgctcttgcctctagttcatggagatgtgtctctgttcaggccaagatacagccagccaggcctgtcgtctgggacccaggaggcctctgatgaccaagggctttcacatcctaagtcatttggaaggaggccttgagaacaaagtcacctttgtcactcccagtgaactgaatgaggaacatgctgtctcctgtcttggcctcccctttcatgagatactggggagaagagaacattcctcctggcttagttgtagcagacccagacctgtgcccagctttggtcccccttcccaacttctgaagcacgtgctgcagagccaccttggtctgagcacctgaggaccagcccctcctccctcagtgcgggtcatctcttgggggattttcttaaagtgaagaaagggggtggggaaccatattgcccctccctcccccatcaaacttccttcatttaacttgctataaaatgagtcatataaagaaactctatatgggtgaggtatatcccacttctgtgaaaacattacaaatcaaaccgcttctctcagtttatttaagatgcttttgttgcgagcggagctctagagtgaagcctcctgtgtgtgtgtgagataataacaccttgtaactcattacagctgggcactatttacataaaccagagctgagccaggcaggaatttgctgattaatttatttttaatggagtgaagtataccatgcaccaaaataaactttactgtgtgtacct

SEQ ID NO: 14435 - protein, 213 aa, Homo sapiens [sequence omitted]

SEQ ID NO: 14436 - DNA, 2060 bp, Homo sapiens
  CDS (22)..(1446)
aagagcttttctctggtgaagatgccgtccctgcagcccgtggtgatgtgcgtcatgaagcacctgcccaaggttccggagaaaaaactgaagctggttatggctgacaaggagctgtatcgagcctgcgccgtggaggtgaagcggcagatctggcaagacaaccaggccttcttcggggacgaggtttccccactcctgaagcagtacatcctggagaaggagagcgctctcttcagtacagagctctctgtcctgcacaactttttcagtccttcccccaagaccaggcgccagggcgaggtggtgcagcggctgacgcggatggtggggaagaacgtgaagctgtacgacatggtgctgcagtttctgcgcacgctcttcctgcgcacgcggaatgtgcactactgcacgctgcgggctgagctgctcatgtccctgcacgacctggacgtgggtgaaatctgcaccgtggacccgtgccacaagttcacctggtgcctggacgcctgcatccgagagcggttcgtggacagcaagagggcgcgggagctgcaggggtttctcgatggcgtcaagaagggccaggagcaggtgctgggggacctgtccatgatcctgtgtgaccccttcgccatcaacacgctggcactgagcacagtcaggcacctgcaggagctggtcggccaggagacactgcccagggacagccccgacctcctgctgctgctccggctgctggcgctgggccagggagcctgggacatgatcgacagccaggtcttcaaggagcccaagatggaggtagagctcatcaccaggttcctcccgatgctcatgtccttcctggtggatgactacactttcaatgtggatcagaaacttccggctgaggagaaagccccagtctcatatccaaacacacttcccgaaagcttcactaagtttctgcaggagcagcgcatggcctgcgaggtggggctgtactacgtcctgcacatcaccaagcagaggaacaagaacgcgctcctccgcctgctgcccgggctggtggagacctttggcgacttggcctttggcgacatcttcctccacctgctcacgggcaaccttgcgctgctggccgacgaatttgcccttgaggacttctgcagcagcctcttcgatggcttcttcctcaccgcctctccaaggaaggagaacgtgcaccggcacgcgctgcggctcctcattcacctgcaccccagggtggccccgtctaagctggaggcgttgcagaaggccctggagcctacaggccagagcggagaggcagtgaaggagctttactcccagctcggcgagaagctggaacagctggatcaccggaagcccagcccggcacaggctgcggagacgccggccctggagctgcccctccccagcgtgcccgcccctgccccgctctgagggccctccagacctgctcgggtgctggggccatgccgagtcgcggccctgctcagccggaagaggctcccggacctggatgtacagggcagtctctcttcccggggctatggctgggcctgtcctgccgtcatggccccctgcttcctgctccttggagctggctcccggaccttgcccaccatccatgcagtggctcccagggcagagcctctccttgtactttggcagccatagaaagcgtgctcattttctgttttcctgtgttaggaaaaaaccacctgttttccaaggggagagggcggggcctgagggtgggggcggggcctcttcattggcccagcttggcgaaagcgaggcacactgcttactgccttggggttgtggagatggacccgtgacctcgtggaggccgtgtgggggcagcagcctggcctgtgccatggtgggtgtcctggggcctgtgcggagggagccacctcaccctgcagcccagtttgcaggtgtggccttgtttctccttgcccagcagtgctgccttcagcggccgtgacggggccagctggacacacggtgagattttctcgtatgtaaataaaaggcattttggt

SEQ ID NO: 14437 - protein, 475 aa, Homo sapiens [sequence omitted]

SEQ ID NO: 14438 - DNA, 2264 bp, Homo sapiens
gcttcatgggaaagggcctgctgtaccacggaaattgtgaccgcttcagaggcaaggcttgccacttgggtctgggtggaatcagaacgtgcaggtctcccaggatgtacactcactgcgccctttctgctgcttggtgttcttctggaggagcgtgagttctcagcggagcgcttctcggcacttctgatgtgcctcccatggagggagccgggcccttgctgctcaggaggtgcagactgccccgtgctctgggccttgcagctctgtcgctagacggttgttagaggggcagctctaggctggggcttgcgctgggccgtggtgggaggcacagtgtttacaggctctggtggcagagcagttggcacacctgtgggtgaatctgcctgatcccctggcatttggtcagagtacctcagagcaccccactgctcaggggctccttctggctgcagtaagctccctggatggtcacagtgccgccccatccccaggctgtgtgctcaaagcggacaaaactcaggccagagccacagctgggagacctgcactgtccctgcgaaatactaagaacacctagggtgtgctcactgtgggggccagtttctcctcggaacatgacaatgaagctcttttagagaaaagacctttgtagattcaacaattatgataggatttttacagacacctattttgggctcagttttcattattaccattaaatgcattggatagaaggggactgttcttcacacatcatattataggaagacataattccagtgcctttatggtggagcagaattcgacaacacatgtccattcagccctctgaatggatctgagacgaagacctttttaaagatatgtctgtattgaagagaaagccagttttgagttttttacacttgcacatcattatctgtgccgtcctgactagaaggttgtctgggcccccaaattccaagtcccagtatagccagggctcccattttgtttttcccgagttcgtggaggtggactgcagagcccagagcccttcatctctctgagggtcaaggataccaggggtcccaagtcacagatagacattccagtttgtattcttaggaatcattcttaggcagtgcggcagaagcaggcctctgtgaagtgtctgccgggtagaaataggccttgaagtcctggggctctccaggcagtggggttatgtgtcgactgaagggtgatgtgcagaagagcttggagagtggatcagagagactaggacagttactgcagagctcctaagtcaccactcaaccagtggctgtttcacaaggatttgagggcacttgcctgtcttgtgaggtctgtgccacaaggtgagtctgaactgactgctccagctaagtgatcaggcacgttgagagtatacggtgtcctcagcacatacacctgtgggaaaacggaccgctcttggctcctgactcccagggtacagcgcccagtaactcatccttcattcagaggtttgctggccttcccggtttcccaaggagcaagacctctgtctgccctttggcccggcctctgctctgactcctttttttacataagaaccaatctgtgtttcacattgggctaagtggattccttatccctttgttatatatattttttgcaacttggatttccagtttgtttacagagtagtcttaggtagtagcaaaagagccaaagaagagatttgtattgctgagctcaaagccaagcagaggccggcagtggaggctgagcagggactctccaggcttctctgcccataaacacccgggtcccaggccctccttcctttccctttggtgctccctcctccccatgtaccattgcgcgtgcagctggagcagaataccctcatttttaggaatctagtgatgcctcttgcctcagggaaacgtttctttgatggggagtttgagatttcttttccttgtttatgctttatttgtggtaatgaaagagcgaatgactgaacagccatggcaaggcagacctacaggcgaggccgcagcagagggtggggcagagcagcctcggggtctgggggctgcaggggtttccctggcgcagcgaaagtctctgagcacttaccgggcgtgaccgtttcttaggtgtgagaggggctgtggcttttgtgcagcgactatgttggtgttaggggtggtgtggagattgttaatcttgtataaagcaattcaataaattgtttcaaggtttcc

SEQ ID NO: 14439 - DNA, 2074 bp, Homo sapiens
  CDS (63)..(374)
ttatatttaagcatggagatgatttacgtcaagatcaacttattcttcaaatcatttcactcatggacaagctgttacggaaagaaaatctggacttgaaattgacaccttataaggtgttagccaccagtacaaaacatggcttcatgcagtttatccagtcagttcctgtggctgaagttcttgatacagagggaagcattcagaacttttttagaaaatatgcaccaagtgagaatgggccaaatgggattagtgctgaggtcatggacacttacgttaaaagctgtgctggatattgcgtgatcacctatatacttggagttggagacaggcacctggataaccttttgctaacaaaaacaggtaacaattaatgactaccagtagacatacattgtatatgtccatggtttttacccctgaatctatgtactaacaagataagttgcggcctggcgcggtggctcacgcccgtaatcccagcactttgggaggccaagacgggtggatcacctgaggttgggagttcgagaccagcctgaccaacatggagaaaccccgtctctactaaacacacaaaatttgccgggcgtggtggtacatgcctgtaatcccaactactcaggaggctgaggcaggagaatcgcttgaacccgggaggcggaggttgcagtgagccgagattgcaccattgcactgcagactaggcaacaagatcaaaacgccatcttagaaaaaaaaaaaaaaaaaagatgagttgcgtaattgaagataaatcagagagtcttaaaaattcctttaaatgttaccttggaagaacatttagggaaagtcctttcccttttaagaattgctttagtagtaatcctacagatggtcattttgcccacacttctgtactggaaaatgcctctttttatggaaagccaataatggatacaagtagcttagtctcttactgtatagctctagttagattgttaaaatgtcctttctcttacaaagtgtgcttaattcactttaatatctacctttaattatttgcttttccccttggagttctatgggataatcattctcagtcccctttgtcctgacaactctttagccctatgtatttatctttatgcagacagcttccagacttacagctttttacctcagtccatttcattaacttcaaattgaaatatcgaactgcttacttgaaattgtcattatatatggccagttgtaaaaggttgtcctttcctctactacctgcctaaaacctgtttctcacctcatttttccatttcaatagatagcaacatcacctacccagttgttcaagctctagacctcaaagtcattcttaacatgtctcttggcctcatctcatatactgaacctattagcaaatcttgtctactcctcaactccaaaatagatcatgaagttacccactgtcttcatttttactactttgaccccacttgaagcaaacaatatatgttgcctaaacaatttgaatgaaacctgaaccctttattggggccttgtggcttgtccaggcaggccatttgtctgaatgtcaaaccactcctgcctcagacaagagcctttgttgttttctctttctggaaagttatttattcagatctttgcagggctgactttagttattaagttgaagttctaatggcatctctttagagaagccctttctaactccttgatctgtaataacatatctgccctcttcctccaatgctctctacttattactgtattgtttatagcacttatcactagctgaagttaccttttttgtttaattcaacaactatttattgaacagctagtagatgctgggaataccaaagttaacagaagagacagaaatccttgctctcctagagcttgttgagttcttatcatcatcttctccccttcaggatgcaagttccatgagagcaggaacctttgtccattggggttacccccatgcctctggaccttgaacaccacctagctaaagtgttcaataaatcagtgttgaattaatgatgaataaatacttctgctcttc

SEQ ID NO: 14440 - protein, 104 aa, Homo sapiens
MDKLLRKENLDLKLTPYKVLATSTKHGFMQFIQSVPVAEVLDTEGSIQNFFRKYAPSENGPNGISAEVMDTYVKSCAGYCVITYILGVGDRHLDNLLLTKTGNN

SEQ ID NO: 14441 - DNA, 1767 bp, Homo sapiens
  CDS (142)..(1314)
attgtgcaacctctggcagaaactggactacaactctccaaacgaactttcagtactgtactaccacagattgatactactggacagttgtttgtacagactcggaaaggtcaggaagttcttattaaggtgaagcatttcatgaaacaacacattcttccagctgaaaaggaggtaactgagttctatgttcaaaatgaaaattcagtggacaagtggggaaaacctttagtgattgataaactcaaggaaatggccaaagtcgagggtctctggaacttgtttttgccagctgtcagcggactcagccacgtggactatgccttgattgctgaagaaacaggaaaatgcttttttgctccagatgtctttaactgccaagcaccagacacagggaatatggaggttctgcacctgtatggaagtgaggaacagaagaaacagtggcttgagcctcttcttcaagggaacattacctcttgcttctgtatgacagaacctgatgtagcttcaagtgatgccacgaatattgaatgcagcatccaacgagatgaagatagctatgtaattaacggcaaaaaatggtggagcagtggagctgggaatcccaagtgcaaagttgcaattgttttgggaagaactcaaaatacttctctctccagacacaaacagcacagcatgattcttgttcccatgaacacacctggagtaaaaataataaggcctttgtcagtttttggctacacagataattttcatggaggacattttgagatccattttaatcaagtgcgagttcctgccacaaatctaatactaggtgaaggtaggggatttgaaatttcccaaggccgccttggacctggcagaatccaccactgtatgagaacagtaggtttggcggaacgcgctttgcagatcatgtgtgagcgggcaacacaaaggatagctttcaagaagaagttgtatgcacatgaggttgtggctcactggattgctgaaagccgcattgccattgagaagatccgcttgttgactctgaaagctgctcacagcatggacactctgggcagtgctggcgctaagaaagagattgcaatgatcaaagtggctgccccacgggctgtcagcaaaatcgttgactgggccatccaggtgtgcggaggtgctggtgtttcccaggattaccctctggctaacatgtatgctataacccgagttttgcgtttagcagatggacctgacgaagttcatctttcagcaatcgcaacaatggagctgcgggaccaagccaaaagactgacagccaagatataaggagggtggcactgccacatcccactggcagaaactctcctttatacaaacttcattggctccaacatttgaatctcatatttttgtagcagtttgagcacagggttaattattcatttgtggtaaagattatagcatctattttgatcagtgggttttattatttcaagggtcacacagggttaagttcagtaagaaatgctgtagctgttgtcattcaatctagtgcctccttgaggccaggagttcaggaccagcctgggcaacatagcgagacccccattgctacaaaaaatttaaaaatgaaacaagtgtggtggcacatgcttgtagtcctagctacttgggaggctgaggcaggaggattgcttgagtctaggagtttgaggttacagtaagctgtgatcgtgacatggcctccagcctgggtgaccgagtgagactgtttct

SEQ ID NO: 14442 - protein, 391 aa, Homo sapiens
MKQHILPAEKEVTEFYVQNENSVDKWGKPLVIDKLKEMAKVEGLWNLFLPAVSGLSHVDYALIAEETGKCFFAPDVFNCQAPDTGNMEVLHLYGSEEQKKQWLEPLLQGNITSCFCMTEPDVASSDATNIECSIQRDEDSYVINGKKWWSSGAGNPKCKVAIVLGRTQNTSLSRHKQHSMILVPMNTPGVKIIRPLSVFGYTDNFHGGHFEIHFNQVRVPATNLILGEGRGFEISQGRLGPGRIHHCMRTVGLAERALQIMCERATQRIAFKKKLYAHEVVAHWIAESRIAIEKIRLLTLKAAHSMDTLGSAGAKKEIAMIKVAAPRAVSKIVDWAIQVCGGAGVSQDYPLANMYAITRVLRLADGPDEVHLSAIATMELRDQAKRLTAKI

SEQ ID NO: 14443 - DNA, 2160 bp, Homo sapiens
  CDS (233)..(1135)
aagcaaaaagttctttatagagttggaagcaagacatcagaataatatcttcatagatgacataagtgacattgtggaaaaacacacagcatccacatttgacccatatgtgaaatactgcacaaatgaagtctaccaacaacgaacactacaaaaattgttagctaccaatccatcctttaaggaagtattgtcaaggattgagtcccatgaagactgtaggaacttacccatgatctcttttctcattctccccatgcagagggtgacccgccttcccctgctgatggatactatctgtcaaaaaacacctaaggactctccgaagtatgaagtctgcaaaagagccttgaaggaagttagcaagttggttcgactatgcaatgagggcgcccggaagatggaaaggactgagatgatgtacacaattaactcccagctggaatttaaaattaagccttttcctttagtctcctcttcccggtggttggtaaaaagaggtgaattgacagcctatgttgaagacactgtgcttttctcaagaaggacatccaaacagcaagtctacttctttctctttaacgatgtgctcattatcaccaagaagaagagtgaagaaagttacaacgtcaatgattattccttaagagatcagctattggtggaatcttgtgacaatgaagagcttaattcttctccagggaagaacagctccacaatgctctattcaagacagagctctgccagtcacctctttactctgacagtccttagtaaccacgcgaatgagaaagtggagatgctactaggagctgagacgcagagcgagcgagcccgctggataactgccctgggacacagcagcgggaagccgcctgcagaccgaacctcactgacccaggtggaaatcgttaggtcatttactgctaagcagccagatgaactctccctgcaggtggctgacgtcgtcctcatctatcaacgtgtcagcgatggctggtatgagggggaacgactacgagatggagaaagaggctggtttcctatggaatgtgccaaggagataacatgtcaagctacaattgataagaatgtggagagaatgggacgcttgctaggactggagaccaacgtgtagtctctcagatggtcttttgttactgcaagatttgcacgacacttaccgggctggttggttctgggctagttttattgttaattttgtcacagcctatttaattaaaagaacgaaaacacttgcctttaagcttgccaggttgttctgctctctcatgagaagagcttggatacagtgagtttgcacagctcagtttttacctaaccacacacttgcagacctcctgaggtacacagaatagctgagcagttcacttcagggatcaggtcatctctgctcctcctagtttcaccatgttctggcaataaaaaacacatattatatcctggttttctctatccttgcattactaaggtgactgtctctctttatacatccttgtatggttctcccagtattagcaagattgtatatctgtaaagaatgtccagttttgtaaatatttccctgcctttttttttctttttttacatctgattttaatgcttcgttaacttcaaaaggaactggtagagttcagaaggtgagctattgtttttctaaacctcttcccaggaaggggacattgacacttgaatttttgtcacctttttcctcattagaaggaaagtagaaagccttactgtaggatttttaaaaaaaaatccatctcaccccatattggtcttaaataagtatagactaattaacctaagctacctttaacaacgtagaatttagatgggttcatatatgtgagaaaaacctgaatataggacaggggtcctacttttttccccacctctgtcgcccaggctagagtatagtggtgtgatcttggcccactgcaacctctgcttcctaggttcaagtgattctcctactttttgtatttttagtagagacagggtttcatcatgttggccaggatggtctcttaactcctgccctcaagtgatccaccagagaggagatcctcggcctccccaagtgctgggattataggcatgagccaccgtgcccagcctactttctaattaatt

SEQ ID NO: 14444 - protein, 301 aa, Homo sapiens
MISFLILPMQRVTRLPLLMDTICQKTPKDSPKYEVCKRALKEVSKLVRLCNEGARKMERTEMMYTINSQLEFKIKPFPLVSSSRWLVKRGELTAYVEDTVLFSRRTSKQQVYFFLFNDVLIITKKKSEESYNVNDYSLRDQLLVESCDNEELNSSPGKNSSTMLYSRQSSASHLFTLTVLSNHANEKVEMLLGAETQSERARWITALGHSSGKPPADRTSLTQVEIVRSFTAKQPDELSLQVADVVLIYQRVSDGWYEGERLRDGERGWFPMECAKEITCQATIDKNVERMGRLLGLETNV

SEQ ID NO: 14445 - DNA, 1976 bp, Homo sapiens
  CDS (217)..(999)
aaaacgagttcagggctcctgggcggccgccttttccagttccaggtgtgcagaggtgtcctctccccacgcgcggcgtgctgcacttggtcgctggctccgagatcgcgcggggccgccggaagcccaagacggtaccgggggccgcagccgcagccggcgccgccctccgccctccccaacagcaggccgagtcccgtagcatccggtagggaaatggtcgtgctttcggtccccgccgaagtcaccgtgatcctgttagatatcgaaggtaccacaaccccgattgctttcgtgaaggacattttatttccttacatcgaagaaaatgttaaagagtatctgcagacacattgggaagaagaggagtgccagcaggatgtcagtcttttgaggaaacaggctgaagaggacgcccacctggatggggctgttcctatccctgcagcatctgggaatggagtggatgatctgcaacagatgatccaggccgtggtagataatgtgtgctggcagatgtccctggatcgaaagaccactgcactcaaacagctgcagggccacatgtggagggcggcattcacagctgggcgcatgaaagcagagttctttgcagatgtagttccagcagtcaggaagtggagagaggccggaatgaaggtgtacatctattcctcagggagtgtggaggcacagaaactgttattcgggcattctacggagggagatattcttgagcttgttgatggtcactttgatactaagattggacacaaagtagagagtgaaagttaccgaaagattgcagacagcattgggtgctcaaccaacaacattttgtttctgacagatgttactcgagaggccagtgctgctgaggaagcagatgtgcacgtagctgtggtggtgagaccaggcaacgcaggattaacagatgatgagaagacttactacagcctcatcacatccttcagtgaactatacctgccttcctcaacctagagaagggttgttaaggcagaccgccctgttccccagagttgtccctgtagtgtctaggtttattctaatggtaaaagtaacttacttaaaaaacatatgtacacatatgtatgcaagtatgtatatatgtgtatgctcagattaacttccataggtacataagtgaaagaagtctcagttcagtgaacacaaaacttatttaaagatgctttatatgtagaaattgtttcaaatcatactctaacccttagtgagggcaaagtgtagttggtagaagaaattgctaaatacctatctaatgtgctatgtttatcaaatcgtgtactaaaatggaaagctagttttgagaaattattcagaagccttgttattttaaaaatgaaatatttcaaagactgaatattttcaaagaaaatgaataattcattgcccttgtgatttagaagattataacagctgtatttcatatttgcctccttatatatatcaaagaccaaggtatttccttctgcttcaaaagaacaaaattgggaaagaaaactcacttgagtcttgatcaaacaagtgtcttttacttaagaagaaacttggtaatcattgtggcacccacagcaagcagttgccttaccagtgaaaaaggtgcactgaggtaacatctaaaacagagatgtggttcttaatgtttaacagaacagttctaatcctgccacgtgttatcattatagattttatagttgcctttctaactacttagcacagtttgagaatacgttaattgctatttactatttaaaaagttttactgaaatcagtccataacattaagatgagccctaatatgtaagattttcctctggaatggatgtgagaaatgtaaattttataacagcagtatttatcctggtttaattctaatacgatgtcatgttaatttcatgttgtgattaataaaagcattttttcttcaaaaaaag

SEQ ID NO: 14446 - protein, 261 aa, Homo sapiens
MVVLSVPAEVTVILLDIEGTTTPIAFVKDILFPYIEENVKEYLQTHWEEEECQQDVSLLRKQAEEDAHLDGAVPIPAASGNGVDDLQQMIQAVVDNVCWQMSLDRKTTALKQLQGHMWRAAFTAGRMKAEFFADVVPAVRKWREAGMKVYIYSSGSVEAQKLLFGHSTEGDILELVDGHFDTKIGHKVESESYRKIADSIGCSTNNILFLTDVTREASAAEEADVHVAVVVRPGNAGLTDDEKTYYSLITSFSELYLPSST

SEQ ID NO: 14447 - DNA, 1886 bp, Homo sapiens
  CDS (424)..(867)
caaaaatgaaaagccaggtaaagtttccaagggctgtaagaagcctgcaaaacaaaatgggaagaaagcaacctccaaagtgccctctgctcctcagtttgttcactccaatgatcatgccaatcgagaggctgaaataaagaagagggttgaggagatgagggagaagcagcaagctgcccaggagcaagaaagacaaaaacgcaggtctatcaagagctactgtgaggatatcctaagacgccaggaggagtttcagtgtaaggaagaagttttgcaggaattaaatatgtttcctcagctggatgacgaggccactatgaaggcttattacaaggagtccgtgaggtggtagaatactctgatgtgattctggaagtcctggatgccagagacccattaggctgctgctgctgcttccaaatgggggaggctatcctatgggcagaaggcaacaagaagctggtcctggtcttgaaaaagattgacctggaccccaaggaggttgtgaagtggctggattaccttcggaatgagttgccaactgtggctttcaaggccaggacccagcatcaggtcagctttggagctgaaaacctcatgagggttctggggaactattgctgccttggtgaaatgcgcacccacatccatatggacattgtaggccttcccaatattgggaaaagcagcctgattaaaagcctgaagcacagccatgcatgcagtgtgggagccattcctggggtcacgaaattcatgcaggaggtctacctggacaagttcatccggctgctggatgctccagccattgttccagggcccagctcagaggtgggcaccatcctgcataactgcatccacatctagagactggcagaccccatgaccccagtggagaccatcttgcagtgctgcaacctggaggagatttccaactattaccttctctctgggtaccagactactgagcactttctgacagcagtggcccaccatttggggaagaagagagacttacacagtcaggagcaggcagccaaaactgtcctagctgactgggtgagcgggaagatcagcttctatagaccaccaccacccactcacactctgcctgcccatctcagtgctgagaattaaggaaatgaccaagttctttgacatcgaggataccgagcaagtcaatgaagacaccatggaatgcttggccactggagaatctgatgagctattgggtgacacagacccactcaaaatggagatcaagttgctccattctccgatgatggaaatagcagatgccattgaagataaagctactgtatataagattggagatctcactggttattgcaccaatccgaatcgtcatcagatggggtgggctaaactcaatgtagaccaccaccctaaaaaaaaacagtaaggtggatgtgtgcccagtggactgctgcccagtactgcagaggatcatggagatggaccccctacaacagggccaggctctagcatcctccctgaagagtaagaatttacagaaatgtgcagataaaatccccagggagctgtctgattccatgatgtctgccctccacctctctggcaatgctgatggcagtgttggtaactaattgactgatctcacttcccttccgatccaagcaccagttccagtgggacgggagattaccagtgaaatagtttggttctccctgaagcatctgcatattaaaagaacccttccccaactatgtgtctttgcctcccactgttctctccactctctccaggaaaaagagtcccaagaggctggagctgacaaacccaataccctttatttaacccctactctgttttacaacagaaataaaagaagtatcagcagg

SEQ ID NO: 14448 - protein, 148 aa, Homo sapiens
MGEAILWAEGNKKLVLVLKKIDLDPKEVVKWLDYLRNELPTVAFKARTQHQVSFGAENLMRVLGNYCCLGEMRTHIHMDIVGLPNIGKSSLIKSLKHSHACSVGAIPGVTKFMQEVYLDKFIRLLDAPAIVPGPSSEVGTILHNCIHI

SEQ ID NO: 14449 - DNA, 2590 bp, Homo sapiens
  CDS (31)..(714)
ctgacgattagaacacagaagtttaaagcaatgttgtggatgtgtgaagagtttcccctctctctggtggagcaggtcattcccatcattgacctaatggctcgaacgagtgctcattttgcaagactgagagatttcatcaaattggaattcccacctggatttcctgtcaaaatagaaattcccttgtttcatgtcttaaatgcacggattacatttggaaatgttaatggctgtagcactgccgaagaatctgtatctcaaaatgtggaagggacccaggctgattcagcttcccacatcacaaactttgaggttgatcaatctgtgtttgaaattcccgaatcttactatgttcaagacaatggcagaaatgtgcatttgcaagatgaagattacgagataatgcagtttgccatccagcaaagtctgctggagtccagcaggagccaggaactttcaggaccagcttcgaatggagggatcagccagacaaacacctatgacgcccagtatgagagggccatccaggagagcctcctcaccagcacagaaggcctgtgccccagcgccctgagcgagacaagccgttttgataatgacttgcagctagccatggagctctctgccaaagagctagaggaatgggagctccggctccaggaggaagaggctgagctccagcaagtcttacagctgtcactcactgacaaatagacctttcagcctgtgagcctctgcacaaagcagaggctgtgggctgtcacagatgctgtgtcaaccagggccctagggctaagggcctgcaccttgcgtgcatgcagcaggcaacaactgccccttctttatgcagaggtgcagaaccagggactcctgggcccatccaggctgctccctggggtggagaagggaccagggattgcaggccccatctccaggctaaggggaggggagcatcatcactttccattagctgtattggcttgcaggtcacatttttactaccagctttagacaaaaccccaatccccgcaggtttgtagataaatttttatcaaggagtgataacaagacaagttattgcagagtcagggtgcttttatatataagagcagcagccgcctttgtaaagtgtgatctatgggaattggagacacttctttactgttcaccaaagaaatgggtaatctgtgctgatctccttatttttacctttttacagggtttctaggacattgtcattattcttcctccatctatctgattccattccttccacacccagctaaagttagaggagatacatatagaatctattttagattattgttaactatttgcatcaaattaagatacacaaatggccatggatgttgccttagccttaaacattactaatagtttcacatcacctcactgcacgcatcgaaggatctgatttgaatttgtaaaggcaattcttttgagagcaggattctccaggctaaatcaaaggcagctaatcctgtccctgaaggagcagctaggggaacctgaggcttgttcttgaagtgggcaagctggccaaaatattggaacacacagaaccaaaccaggtgtgttctacacctgcatgagtgaaggatttccacgtagacacctaggaagagcccgcatgccctagactcactccagaggaaggattgatttgcaaccagaaagggagctgaaaaccacggagctccatggctcttcattcaaaagggaaaataatgattccacgttgctttttagagttcaaatcaacatctttctggataaatctattttttaacaatctttttattatttgtaaaagatataaaaacaactcccatcagtagcaatacaaggttatacattttaaccagattttctcaggccttttttggatacctttagtagttaactctcttttgtcaaaccctcttgtatataaccatcgcacaacatacagaaccctggggaatacagccaagggcactgctcactgtggcccgtgtattcattcccacaggctgcactgaaataacctggtaaacaacaccctcctccattttgcgtctatttcttctattgtgcttctttggggataggaagagaaacataactactgttccaggtaacgtctgtatcatacagttagtgttgccagtgaaacgttcccagatacaaagaattgtgcttttaattccatttcacaatctgttttgtttttttttttttgtcattgtctgaccaaaattccttctgcacatgaggccagtataggcaacgtcacatttgtttgtttcaaatatgcagtgtggtattttgtttactttgcatttaccgtgagcaaagatacttcttggaatggctgcagtgaggccgtgtcattggctcacaaaagtgactcataggtaatttctgtgtttgcattccactgctctgctccctaaggtccttgactttctccccaggaattcacttaaaaagggactgagcattgtgtcaacctgttgcagtgtttttcatatatgtgtccactctaaaaatgcaaataaagactgcttccttagagggtgctcat

SEQ ID NO: 14450 - protein, 228 aa, Homo sapiens
MLWMCEEFPLSLVEQVIPIIDLMARTSAHFARLRDFIKLEFPPGFPVKIEIPLFHVLNARITFGNVNGCSTAEESVSQNVEGTQADSASHITNFEVDQSVFEIPESYYVQDNGRNVHLQDEDYEIMQFAIQQSLLESSRSQELSGPASNGGISQTNTYDAQYERAIQESLLTSTEGLCPSALSETSRFDNDLQLAMELSAKELEEWELRLQEEEAELQQVLQLSLTDK

SEQ ID NO: 14451 - DNA, 2832 bp, Homo sapiens
  CDS (553)..(2223)
attttcttgccactattgaggaagatctaatgaagctcatcatcaaatatggcatgactgtagtgcaacattgtgtgagctgtcttggagctgttgtaaataaagtgacacaaaattttaaatttgtgtgggcttgtttcaatagatactatggtgccatttcaaaattaaaaagtcaacaccaagaggacccaaataacacttcacttctaacaaacaaaccagcacttcttagatcccttttcaccgttggagcactatgtcggcattttgattttgatctggaagattttaaaggcaacagcaaggttaacataaaagataaagtacttgaactattgatgtattttacaaaacactcagatgaagaagtacaaacaaacgctatcattggtctaggatttgcctttattcagcatccaagtctaatgttcgagcaagaagtgaagaatctatataataatattttatctgataagaactcctcagtcaatttaaaaatacaagtgttaaaaaaacctccagacctacctacaagaagaagatacacgtatgcagcaggcagatagagactggaagaaagttgcaaaacaggaagacttaaaagaagtgggtgatgtttcctcagggatgagtagttccatcatgcagctttatctcaaacaggtgcttgaggcattttttcacacccagtcaagtgtacgccactttgccctaaatgtcattgcattgactctaaatcaaggtcttattcatccagttcagtgtgtgccatatttaattgctatgggcacagacccagaacctgctatgcggaacaaggctgatcagcaacttgtggaaatagacaaaaaatatgctggattcattcatatgaaagcagtggctggtatgaagatgtcttaccaggtacaacaggcaatcaacacatgcctaaaagatcctgtaaggggtttcagacaagacgagtcctctagcgctttgtgttcacacctttactctatgatccgtggaaaccgccaacacagacgagcctttcttatttctttactcaacctctttgatgacacagcaaaaacagacgtgactatgctcttgtatatagcagacaatctagcctgttttccataccagacacaggaagagccgttgtttataatgcatcatatagacattacactctcagtttctggtagtaacctactgcagtcattcaaggagtctatggtaaaggacaaaaggaaagagagaaaatcatcacctagtaaggaaaatgagtcaagcgacagtgaagaagaagtttccaggcctcggaagtcacggaaacgtgtagattcagattcagattcagattcagaagacgatataaattcagtgatgaaatgtttgccagaaaattcagctcctttaatcgaatttgcaaatgtgtcccagggtattttattacttctcatgttaaaacaacatttgaagaatctttgtggattttctgatagtaaaattcagaagtactctccatctgaatctgcaaaagtatatgataaagcgataaaccgaaaaacaggagttcattttcatccaaaacaaacactggacttcctgcggagtgacatggctaattccaaaatcacagaagaggtgaaaaggagtatagtaaaacagtatctagatttcaaacttctcatggaacatctggaccctgatgaagaagaagaagaaggggaggtttcagctagcacaaatgctcggaacaaagcaattacctcactgcttggaggaggcagccctaaaaataatacagcagcagagacagaagatgatgaaagtgatggggaggatagaggaggaggcacttcagggtcattgagaaggtcaaaacgaaattcagactctacggagttggcagcacagatgaatgaaagtgttgacgtcatggatgtcatcgctatttgctgtccaaagtacaaagatcgaccacaaattgcaagagtagtgcagaaaaccagcagtggcttcagtgttcagtggatggcaggctcctacagtggctcctggactgaggctaagcgccgtgatggccgcaaactggtgccttgggtagacactattaaagagtcagacattatttacaaaaaaattgctctaacgagtgctaataagctgactaataaagttgttcagactttacgatccctgtatgccgccaaggatgggacttccagctaatgaatttgtacatgcagccaaatttacaggaatttttttaaaaggcagaaaaacttgaaataccaacattctggcaaaaaaaaatcagttttatgaagagtaagtggaacctgggatgcaggaacaaaagaaggaaatgttgggcaaacatttttgtgggagctcccttcgctgttgtgcagcagaaacagattctcagttcatttttactcccattgtattatagtttaacaaaaattgtttatatcttggaaaaaaactttctgtttaaaaaaaataaacaagtgaatgttggaaattagtctgttaatgttcttaataaagtgttcttggagtttaacctagcatcggatggctttctttagcttagcccagtttccagggaagcattgttttttccaggctgtaaaatggcagaatctcctggatatataatttattctgttgaaaaaaaaaaaagcatgcagtatctatgacctatctgcagaaggagtttttgtaaatgtagattttgatgtattaggtcaccctgaaaacaatacaagaaaagggatccccaggtaatctggtggagcgaatactgcaataaatttttttacttctctt

SEQ ID NO: 14452 - protein, 557 aa, Homo sapiens
MQQADRDWKKVAKQEDLKEVGDVSSGMSSSIMQLYLKQVLEAFFHTQSSVRHFALNVIALTLNQGLIHPVQCVPYLIAMGTDPEPAMRNKADQQLVEIDKKYAGFIHMKAVAGMKMSYQVQQAINTCLKDPVRGFRQDESSSALCSHLYSMIRGNRQHRRAFLISLLNLFDDTAKTDVTMLLYIADNLACFPYQTQEEPLFIMHHIDITLSVSGSNLLQSFKESMVKDKRKERKSSPSKENESSDSEEEVSRPRKSRKRVDSDSDSDSEDDINSVMKCLPENSAPLIEFANVSQGILLLLMLKQHLKNLCGFSDSKIQKYSPSESAKVYDKAINRKTGVHFHPKQTLDFLRSDMANSKITEEVKRSIVKQYLDFKLLMEHLDPDEEEEEGEVSASTNARNKAITSLLGGGSPKNNTAAETEDDESDGEDRGGGTSGSLRRSKRNSDSTELAAQMNESVDVMDVIAICCPKYKDRPQIARVVQKTSSGFSVQWMAGSYSGSWTEAKRRDGRKLVPWVDTIKESDIIYKKIALTSANKLTNKVVQTLRSLYAAKDGTSS

SEQ ID NO: 14453 - DNA, 1793 bp, Homo sapiens
  CDS (152)..(760)
aaaaaaaaaaaaaaaaaaatataatccacacctactactcaataccttagaaaatcttcgcttccctaataatgttgaaccagttacaaatcgttttattacacagtggcttaatgatgttgactgtttcttggggcttcatgacagaaagatgtgtgttctcggactctgtgctcttattgatatggaacagataccccaagttttaaatcaggtttctggacagattttgccggcttttatccttttatttaacggattgaaaagagcatatgcctgccatgcagaacatgagaatgacagtgatgatgatgatgaagctgaagatgatgatgaaaccgaggaactggggagtgatgaagatgatattgatgaagatgggcaagaatatttggagattctggctaagcaggctggtgaagatggagatgatgaagattgggaagaagatgatgctgaagagactgctctggaaggctattccacaatcattgatgatgaagataaccctgttgatgagtatcagatatttaaagctatctttcaaactattcaaaatcgtaatcctgtgtggtatcaggcactgactcacggtcttaatgaagaacaaagaaaacagttacaggacatagcaactctggctgatcaaagaagagcagcccatgaatccaaaatgattgagaagcatggaggatacaaattcagtgctccagttgtgccaagttctttcaattttggaggcccagcaccagggatgaattgagttatctctttctttcctgctgtgtgcttgtagtgaagagcttgtgttcctcctagtagtggttccagaactggttcatgttatctattctaaactaataatcaatagatggacaaaagaaacaacaaccccaggagatgggacctgatcatgcaacctggcactggaaaagaaatcagcgggattttgggggtgggggggatgggaggtaccttagagggagtattttctttattttttgaagaaagtaagatcctgactctgaagcttcaaagtgacactgtggaaatctgaaacgaggggatgtcatgaaggcagcttttctttttctgaggaaaaaataggcatgggctacaggactatttaaaatgtctcatttacagtataaaactcaaaggtagatgtaatttttacacctatgagtatttgtccaatttctgtctcttcctcaccattgggtatctattctttatatgtaaataagataaggtcatctgatagccttattcagtcttcatcattttcatcattgttcctatgtagattattggacatttattgtagcactacataactgattataaaaatctgtaaatgaattagcactttcatattgaaacaagcctgctagcctatgtataaaatagcaaaatgtttgctgtttataaaaagatgtaatggggtggggggcaggggtaatttcaagttattaatttaaaaatgaactagcaattttgtacctggtgactttgtggtgcactcacctctgatagtgacttgaattcggtatgtaaaaaggggttagtggtatttcattgctgctaaaaatgacaactccctctgtgtcctgtttttcttaaagctgtcagtgtacaagtgggtatttgaataccagaccttactgtaaaaaataaaaaaggtggtatctagagcatgtaaattggatataaagttctgctcttaaagagttgatctaagagtatggctaaacatctatatatgcaatctattaaaagaacttaattcggct

SEQ ID NO: 14454 - protein, 203 aa, Homo sapiens
MCVLGLCALIDMEQIPQVLNQVSGQILPAFILLFNGLKRAYACHAEHENDSDDDDEAEDDDETEELGSDEDDIDEDGQEYLEILAKQAGEDGDDEDWEEDDAEETALEGYSTIIDDEDNPVDEYQIFKAIFQTIQNRNPVWYQALTHGLNEEQRKQLQDIATLADQRRAAHESKMIEKHGGYKFSAPVVPSSFNFGGPAPGMN

SEQ ID NO: 14455 - DNA, 1944 bp, Homo sapiens
  CDS (235)..(942)
acgtattttagaaacttgaaaaagaaactgacccagaacaagctcatcttgaagggggagttgataaccttactacatttgtgtgagtctcgggaccatgtggaactggctaaaaatgtcatttacaggtaccatgcagagaacaaaaatttcactttgggggagtataaatttggaccgctttttgtgaggttgtgttacgagttggatctcgaggaatctgcagtggagctcatgaaagaccagcatttacgaggtttcttctcagactccacatcattcaatattttgatggatatgttatttatcaaaggcaaatataaaagtgctttgcaagtattgatagagatgaaaaacctagatgtgaagttcaccaaagatacctatgttcttgcttttgcaatttgctacaaactgaatagccctgagtctttcaaaatctgtactacattaagagaagaagctctactcaaaggagaaattctctccaggagagcatcctgtttcgctgtggcattagctctgaatcagaatgagatggcaaaagctgtgtccattttttctcaaatcatgaatccagaaagcatagcctgcattaatttaaatattataatccatatccagtcaaatatgttggaaaacctgataaagactctaaaaaatgctgcagaaggaaatttatcaaaatttgtgaaaagacatgtgttctcggaggaagtgctggccaaagtgagggaaaaagtgaaggatgtgcctgcccttgtggccaaatttgatgagatctatgggacactgcacatcactggccaggtcaccactgattctttggatgctgtgctctgccacacccccagggacaggaaatctcacacgttgctattaaacaagaggatggtcagccgtcgcaccttccagccactcagccagtccctgttggctgagtaaccctggtttcagtccacctatggatctgaggggcctgcttctagtgagttattacctttcctaagaagccaggtatcgcacttcagcagacagtgtgctgacacttggtcttctcctgaaattcccaaattcactgaatggtaccatgccgatctctgagaagttatgttgcaccactgtgaaggtctagatgcaagcttggctccctcagaaaggcgcttcccttttgcatggctgaggatccttgaaggaacctggtcagtctccggttcagcttccgacaccagagtggaacccagtaagcaccatcaggaatgaatttcactacaagtgtggataactctgattttcaaaggagtagttacttgcaaattacatccttgctgaattcaggaggttaaggaaacgatccatgcaagagaggcccaatctcaactgtagactgtgtcccagtaagagagtcacagcttcaggtgtttgctgaatccaggtctgagatcacaatcccacctgaggacaggatccgcatatgagagtcgcacattggtataattgatttgtggtagagctgagattagaatccagattcctagtctagtatccttcccactgtaccacattatctcttttcagaggggaaaaaggagcagctcttaagaaacagaatactaagggcccctactgtgtggccctgggcatcctcagtttcctcatttggtaaatggggataatggtaccgacctcttaggcttggtgtgaggatgaaatgagatagggaatataaagcaagcagacagtggctggcacatagtacatgcaatatgcttgaaactagttaaggaattataaaaacaaatgagttcttccttctgctcaaaaatattgaatttcttgtccttgtgctctgtgaaacattgaacagccccatttagagaaacaaattctctgccctcatagaatcctaattgtttctgtatgtgtctggtgttttgcacatgc

SEQ ID NO: 14456 - protein, 236 aa, Homo sapiens
MKDQHLRGFFSDSTSFNILMDMLFIKGKYKSALQVLIEMKNLDVKFTKDTYVLAFAICYKLNSPESFKICTTLREEALLKGEILSRRASCFAVALALNQNEMAKAVSIFSQIMNPESIACINLNIIIHIQSNMLENLIKTLKNAAEGNLSKFVKRHVFSEEVLAKVREKVKDVPALVAKFDEIYGTLHITGQVTTDSLDAVLCHTPRDRKSHTLLLNKRMVSRRTFQPLSQSLLAE

SEQ ID NO: 14457 - DNA, 1891 bp, Homo sapiens
  CDS (8)..(1102)
ttataagatgctactgagccttcctgaaaaggtcgtgtccccacctgaacctgagaaggaggaggcggccaaggaagaagccaccaaggaggaagaagccatcaaagaggaggtggtcaaggagcccaaggatgaggcacagaatgagggcccggctacagagtcagaggccccgctgaaggaggatgggcttttgcccaaaccactctcttctgggggagaggaagaagaaaaaccccggggcgaggcttctgaggacctgtgtgagatggccctggacccagaactgttgcttctgagggatgatggagaggaggagtttgcaggagcaaagctggaggattcggaggtccggtccgttgcctcaaaccagtcagagatggagttctcttcacttcaggacatgcccaaggagctggatccctctgctgtgctccccttagactgtctgcttgcttttgtgttctttgatgccaactggtgtggctacttgcaccggcgagacttagagaggatcctccttacccttgggatccggctcagtgcagagcaggccaagcagctggtcagcagggtggtgacccagaacatctgccagtaccggagccttcagtacagccgccaggagggcctggatggtggccttcccgaggaggtgctcttcggaaacctggacctgctgccccctcctgggaaaagcacgaagccaggtgctgcccccacagaacacaaagccttggtgtcccacaatggcagcctgattaacgtggggagcctgctgcagcgcgcggagcagcaggacagcggccggctctacctagagaacaagatccacacactggagctgaagctggaggagagccataaccgtttctcagccactgaagtaaccaataagacgctggcggcagagatgcaggagctgcgagtccggctggcggaggccgaggagaccgcccggacggcggagcgacagaagagccagctccagcggctgctgcaggagctccgcaggcgtctgacccccctgcagctggagatccagcgggtggtggaaaaggctgacagctgggtggagaaggaggagccggcacctagcaactgacggcctcgcacggaactgccatcctgtgagggcagcggtggcgcccggcaaagttggagcccttgcggtaccagaaagcagcgagagcgagacctgggagccagggcaggggtggctgaccccatgctcagcctctaggggacggcaggccatcaggctgggggctgtgctatgtgggatggatgtgtgaggaaccccggttccacttaacaactaaatacaacatcttttgcacccctagaatgtcattttgccctcaaccttggtatttctcctggggcccttttagtcttgtgctgactttctcctgtcctcttccagtttagaataagacaggggagaaaaaggcttttcgagtgtgggacaaggtctgatgtcagtgaacggaattgaagagcaagacatggagcctggctggggctaagcagccccctcctccggatggcacaggctctgctaggttccggacacaggcttctgggggaagggtctcccttggccatcacgggaatggagtccatgctagaaagagctcagtgttgggctgggtttgccagtagaacactgcgttccagtcaccccggtcttgccagaagaaaccagcacctctttcccgtggctcctgtgttcagaatgtggtattggctctggcccagccttctcccctgttacccataattcttgcctctttccataatccgtggtttcagtttgactttgtatataaagttggggttttttttttttttttttggcttgttttttaaataaaccaaagtcaaaaac

SEQ ID NO: 14458 - protein, 365 aa, Homo sapiens
MLLSLPEKVVSPPEPEKEEAAKEEATKEEEAIKEEVVKEPKDEAQNEGPATESEAPLKEDGLLPKPLSSGGEEEEKPRGEASEDLCEMALDPELLLLRDDGEEEFAGAKLEDSEVRSVASNQSEMEFSSLQDMPKELDPSAVLPLDCLLAFVFFDANWCGYLHRRDLERILLTLGIRLSAEQAKQLVSRVVTQNICQYRSLQYSRQEGLDGGLPEEVLFGNLDLLPPPGKSTKPGAAPTEHKALVSHNGSLINVGSLLQRAEQQDSGRLYLENKIHTLELKLEESHNRFSATEVTNKTLAAEMQELRVRLAEAEETARTAERQKSQLQRLLQELRRRLTPLQLEIQRVVEKADSWVEKEEPAPSN

SEQ ID NO: 14459 - DNA, 2200 bp, Homo sapiens
  CDS (173)..(1450)
gtcaggccccccagtcttaggtggaaacagcaactccaactcctctggcggggctgggaccgttggtaggggactggtcagtgatggaacgtcccctggggaaagatggactcaccgttttgagaggctgagactcagtcggggagggggcgccttgaaggatggagcagggatggtgcagagggaagagctgctgagtttcatgggggctgaggaggcagcccctgacccagccggagtgggccggggaggaggggtggctgggcctccttcagggggaggagggcagcctcagtggcagaagtgtcgcctgctgcttcgaagtgaaggagaaggaggaggaggaagtcgcctggagttctttgtaccacccaaggcctctcggccccgactcagcatcccctgctcttctatcacagacgtccggacaaccacagccctggagatgcctgaccgggagaacacgtttgtggttaaggtggaaggtccatccgagtatatcatggagacagtggatgcccagcatgtgaaggcctgggtgtctgacatccaagaatgcctgagcccaggaccctgccctgctaccagtccccgccccatgaccctccctctggcccctgggacctcattccttacaagggagaacacagacagcctggagctgtcctgcctgaatcactcggagagtctacccagccaggacctgctgcttggacccagcgagagcaatgaccgcctgtcgcagggggcatatgggggcctctcagaccgcccctcggcatccatctcccccagctctgcctccattgccgcctcccattttgactcgatggaactgcttcccccagagttgcccccccgcatccccattgaagagggacccccagcagggacagttcatcccctctcagccccctaccctcccttggacactccggaaacagccacagggtccttcctgttccagggggagccagagggcggtgagggggaccagcccctctcagggtatccttggttccacgggatgctctctcggctcaaggctgcacagttggtgctgactggcggcactggctcccacggtgtcttcctggtgcgccagagtgagacaaggcggggtgaatacgtcctcaccttcaacttccagggcaaggccaagcacctgcgtttgtcgctgaacgaggagggtcagtgccgggtccagcacctgtggttccagtccattttcgatatgctcgagcacttccgggtgcaccccatccctttggagtcgggaggctccagtgatgttgtccttgtcagctatgtcccatcctcccagcgacagcagggccgggagcaggctgggagccatgcgggggtgtgcgagggagatggatgccaccccgatgcctcctgcaccctcatgcccttcggagcgagtgactgtgtaaccgaccacctcccatgacccaccccagccccctgaacccccttcatggacagatcccccacagcctggggcagaagaggcgtcgagggcgccagaagtggcggcagcagcagccgcagcagccaaagagaggcaagagaaagagaaagcgggcggtggaggggtcccggaagagctggtccccgtggttgagctggtccccgtggttgaattggaagaggccatagccccaggctcagaggcccagggcgctgggtctggtggggacgcgggggtgcccccaatggtgcagctgcagcagtcaccactagggggtgatggagaggaagggggccaccccagggccattaacaaccagtactccttcgtgtgagccaaccccacccgctccaccctttttaaaccccccagccctgctcgtgagattgggctgggtagggacagaggaggccgaaatccctcccccatgcttcctgacccttgttggccaagggcatctttgatggtacaagcagaggctcgggagaggctcccgtcacacactacaggtcccctccccagggcaggggatttgggctccatgagctccttgaggggctcttctggtcagccccaccctgggggccatttccccattaactacccccagcccgaggcagggtgagggggaagggctgtcagttacattaaggtggttgttgttgttgttttaaacaaaatggagaagcataaataaataaaaaggtttatctcggttctatcgtg

SEQ ID NO: 14460 - protein, 426 aa, Homo sapiens
MVQREELLSFMGAEEAAPDPAGVGRGGGVAGPPSGGGGQPQWQKCRLLLRSEGEGGGGSRLEFFVPPKASRPRLSIPCSSITDVRTTTALEMPDRENTFVVKVEGPSEYIMETVDAQHVKAWVSDIQECLSPGPCPATSPRPMTLPLAPGTSFLTRENTDSLELSCLNHSESLPSQDLLLGPSESNDRLSQGAYGGLSDRPSASISPSSASIAASHFDSMELLPPELPPRIPIEEGPPAGTVHPLSAPYPPLDTPETATGSFLFQGEPEGGEGDQPLSGYPWFHGMLSRLKAAQLVLTGGTGSHGVFLVRQSETRRGEYVLTFNFQGKAKHLRLSLNEEGQCRVQHLWFQSIFDMLEHFRVHPIPLESGGSSDVVLVSYVPSSQRQQGREQAGSHAGVCEGDGCHPDASCTLMPFGASDCVTDHLP

SEQ ID NO: 14461 - DNA, 2385 bp, Homo sapiens
  CDS (110)..(2077)
agaagtgtttgcatcatggaagcagcagtgcctgaaccgtggcaagcaagacatcagcgagaggctcatcagtgcctcattatttctccgttttctgtgtccagccattatgtctcccagtcttttcaaccttatgcaggagtatcctgatgaccgcacatctcggactctaactcttattgccaaggtcattcagaacctggccaactttgccaagtttggtaacaaagaggaatacatggcattcatgaatgattttttagaacatgaatggggtggaatgaagcgctttcttttggagatctctaatccagacaccatctcaaacaccccaggctttgatggttacattgatctgggccgagagctttcagttttgcattccttactgtgggaagtagtttcccaacttgataagggtgaaaattccttcctacaggcgaccgtggcaaaattggggcctctccctcgtgttcttgctgatattaccaagtcattgactaatcctacgccaatacaacagcaactgagacgcttcactgaacataactccagtccaaatgtcagtggaagcctctcctctgggctgcagaaaatatttgaagaccccactgacagtgatttgcataaactaaaatctccaagccaggacaacacagacagctacttcagagggaaaacattattgctggttcagcaagcctcctctcagagcatgacttattctgaaaaggatgaaagggaaagtagccttcctaatggtcggagcgtctccctcatggacctccaggacactcatgctgctcaagtggagcatgcatctgtcatgcttgatgtgcctatacgcttgaccggaagccagctttccataacccaggtggccagcatcaaacagctgcgggaaacccagagcactccccaaagtgcaccccaagtgagaaggcccctgcacccagccttgaaccagccaggtggccttcagcccttgtcgttccagaaccctgtctatcacctcaataacccaattccagcaatgccaaaggcctctatagattccagtttggagaacctaagcactgccagttccagaagccaaagtaacagtgaagacttcaagctcagtggacccagcaatagcagcatggaagatttcactaaacgtagcactcagagtgaggacttctccaggcggcacacggtgccagatagacacatacctcttgctttgccacgacaaaatagtactgggcaggcccagatccgaaaagtggaccagggtgggttaggtgcccgagccaaagccccaccatccctgccacacagtgcttctttacgtagcaccgggagcatgtcagtggtgtccgcagccctggtggccgaacctgtgcagaatgggagccggtcccggcagcagtcctcttcctccagagagagccctgttcccaaagttagagcaatccagagacaacagacacagcaggttcagtcacctgtggactctgccacaatgtccccagtagagaggacagcagcctgggttctgaacaatgggcagtatgaagaggatgtggaagaaactgagcaaaatctagatgaagccaagcatgctgagaagtatgaacaagaaattactaaactgaaggagcgcctgagagtttccagccggcgactggaggaatatgaacgccgcttgctggtgcaggagcagcagatgcagaagctgctgctggaatacaaggcccgactggaggacagcgaggagcggctccgaagacagcaggaagaaaaagatagccagatgaaaagcatcatcagcaggctaatggctgtggaagaggaactgaagaaggatcatgctgagatgcaagcagttattgatgcaaagcagaaaataattgatgcacaggtcataaatggagatgagattattcaaacaggaaaaacggatcgtgtccctggattcagccaacaccagactgatgagcgcgctgacccaagtgaaggagcggtacagcatgcaggtccgcaatggcatctcccccaccaaccccaccaagctttccatcacggagaatggtgaattcaaaaacagcagctgctgacgggctttgtctgtggaaggagacagaaggaaattgacccactctcctatctccagacctttacctagcccctccaggtttacagaatgttgctacttcacaatggcgatgtggtgagaaactcctgaatgaagaaaggaaccttgtctttcagggcataaggcggcgacttccaaggtcaatgcttttcccccacatctctatgtacatagggaacttagttctgggccatgtacagaaaatatcactgtaatataccaaaaggaagttaataatgtagatt

SEQ ID NO: 14462 - protein, 656 aa, Homo sapiens
MSPSLFNLMQEYPDDRTSRTLTLIAKVIQNLANFAKFGNKEEYMAFMNDFLEHEWGGMKRFLLEISNPDTISNTPGFDGYIDLGRELSVLHSLLWEVVSQLDKGENSFLQATVAKLGPLPRVLADITKSLTNPTPIQQQLRRFTEHNSSPNVSGSLSSGLQKIFEDPTDSDLHKLKSPSQDNTDSYFRGKTLLLVQQASSQSMTYSEKDERESSLPNGRSVSLMDLQDTHAAQVEHASVMLDVPIRLTGSQLSITQVASIKQLRETQSTPQSAPQVRRPLHPALNQPGGLQPLSFQNPVYHLNNPIPAMPKASIDSSLENLSTASSRSQSNSEDFKLSGPSNSSMEDFTKRSTQSEDFSRRHTVPDRHIPLALPRQNSTGQAQIRKVDQGGLGARAKAPPSLPHSASLRSTGSMSVVSAALVAEPVQNGSRSRQQSSSSRESPVPKVRAIQRQQTQQVQSPVDSATMSPVERTAAWVLNNGQYEEDVEETEQNLDEAKHAEKYEQEITKLKERLRVSSRRLEEYERRLLVQEQQMQKLLLEYKARLEDSEERLRRQQEEKDSQMKSIISRLMAVEEELKKDHAEMQAVIDAKQKIIDAQVINGDEIIQTGKTDRVPGFSQHQTDERADPSEGAVQHAGPQWHLPHQPHQAFHHGEW

SEQ ID NO: 14463 - DNA, 2092 bp, Homo sapiens
attttatttgtaggagaggctcctgagcgctaggtccgcactgtggtgactgaacccagaagtcggggagcagttgtcctccgctgcacagaggctactctggagctctgtgacggcgcccagcgtgacccactcctgggccaggatacggaccgtcgtgcccatatctcctggctggtcgccctatcctcccgactctgcttaaaaccacgtggttcgatggctgccgcggctacgctgaggctctccgctcagggcacagtgacttttgaagatgtggctgtgaactttacctgggaggaatggaatctccttagtgaggctcagagatgcctgtaccgtgatgtgacgctggagaacctggcacttatatcctccctggtctatgcaacaaggtccagccagatgaagcctgtagccaggtagaactgtggtaatatcacctcctgactttgatccgttttatctctaagcatttcacaacctggtagcaaatcctgggttaatcttacaagggtgtttacattggttgacagaaatgggaatacctccatataacctgtcatggacttggtatcctggcttcagagattctccagggtcctcggatcaaaggactgaaaaaaatggcacttaagagtcccaggacaccacaagctagagaacctgtagatggcgtcaggaccaatgagggaatggaacaccctccacttccctgtgtgggttccctaagtgcttctgcagccaggagtgcctgaggggaaaggcagacattacaaacatgtcacaggatttgataagctcaggactccctgaaccctttcttgtccctggaaccaggtaaccctaaggctggttgtctgacctgcttttctcagtgcaaaatgtcatctctaccatctatgtgatctacaaaacggattcaacctcccaaggccccaaagtcctcatcctctctctctatgatgttcttcctttgattggcctttgggaaacttcttaaaagcctggatttggatcatgtccctcctttcttcaaaactctccatggcttctagaatcctcatgatgaatgcacagcccctggcctgcttgctctaccaggaagagctccatctcacacgttgttcctgacagatgcctgtgaaccccaggttccatccttccagctctgtccatctgcaggccattgcctgcacccctacctgtgcctgtcactctccccactgcatcccactggtgtcagaaacaggtgaaaccgactttgcaaaattataactgacgaaattatgacagtgaaagaaatcagacctaaccgactccatcttgcttccaacctttcagccgtcttttttcattcctgggcataggctgaattaactttggaaaagaattcagttcatggtttcactctgaaacaaaattgataatagccctttcctgaaaagacccctttcttgcctggggaccagcctgtctttgcaggactaacaaattagctacaagaatagaaattacggtttaggggtcatgcagcttctggctccaagagtctgaacctccccaagttgctcctgaagataaccttactattgtaaaacctaatgtgagtttctggggtgctagttgagttggtctcccctgtgtgagacacccatgggaagccatgggcggcctctgaggagaaaagtctccttattgccttcatgtctttatgccccgagagcataactcttcagcagcattccatgggttgctcagggagatcacactcccttgaagcagtggagcataatcaaacatcttggctcctcctgaaacccgcagccacccgtttcagttaagttaaagatcttaagtagtttagacacacgcctttgttcaaggaaattcacagaaacggccagtgctttacatcttatggaatgactcacgagttctcctttactgattaatccttttcctgatcgcttcctccccctccaatcagccataagaacaaagagcttgtaaaccaataaactgggtggagcccaagagctctgggccgccaggaagcctccaatgctctggccacctggacccgcctttt

SEQ ID NO: 14464 - DNA, 2169 bp, Homo sapiens
atccatgttaagttcagcatcctgcattttgttcatgaatcacattttaaaaggagaaaagctcctaagtttttttaaacagtgatttcaaagagaagataggcctttcataattgctaattatacatataggattaatagtcataaattatagtaaataaaacttgtacctattccttttataaatatgaattggctaggcacagtggctcacagctgtggtcccggcactttgggaggctgaggcgggcagatcgcaaggtcaggtgtttgagactagcctggccaacatggcaaaaccctgtgtctactaaaaatacaaaaattagccaggcgtggtggcaggcacctgtaattccagctactcaggaagctggggcacgagaatcacttgaaccctggtggcagagtttgcagtgagctgagattgttccactgcattcctgggcactgcctgggtgacagaatgagactctgcctcaaaaaaaaaaaaagttattaaaaatagatatttaagattccaaaatgtagttgatccagtttgtttccctgtagcaagtagtgggatttgggtttcatgacatataattaaaatgttaatcacataactataatgccaacaattttctttatacatttttgtttaattatgttgacatatactttgtgttgtaccttatttcatgttactaaattttacataaagatgctggtctatttttatttaatcatatactgttatggtttgaatatagtttgttcctaccaaaactcatgttgaaattagattccccatgtgctagtgttgggaggcagagcctaatggaaggtgtttgggtcatgggggcagatagatcccacatgaataaactaatgccctcctactggggtgagtgagttctcattcttgctgtcgtgggaatggattagttctcacaagcaagggttactaaagagtctggctttcttgattttctcctttttgcctcctgccttcccatgtgatctctttgcacatacctactcccctttcactttgtaccaagagtggaagcaacatgagaccctcaccagatacagctgcccaatcttgagccttccagccaccagaatcatgagccaaataaaactctttttaaaaataagttacccagtcttagatattctattatagcgacacaaaatggactaagctgtactctgttgcattaaaatgtgttgtttatatgcaagtgacaaaaactcaaaatagtgtcagcatgaagggcagttcattggcttatatacagggaagtccaggcaatgactgggtcctgggtccaaacgtcaaaagcagtcatcttgccatcctacacacttggctctgattattttcttctttatggattggttttcttttcagattttccctttggggatattctgtatgggatgaggaacagtgaggtgagaggatggtggataacagcaattgacattttcagcttaccttagcataacaaggctgaaagcttttataaagcaagctatgtaaaattttggagaagtacttttattttgcccagattggatcacattccgttcctgagctaatcaagagaggaattcacccaaaggagggggaaatttttagaagaaagccagaatgtagggagcaggtgaggaaaggtagttactgggaatacgaaagtaacacattcattgcaccctgtttgaatttgagtagcaagaagtttctgatttgtactaacagaaggagtaaagttcagatttaatctgcaagtcttgattgtttttaactagagattttaatctcttcttcttattattgctgctttgagttgccattataggtttttggattttttttttaatgccatccatttttatttgacatcatgttgttgctagtttgagcagatgcacatagcatatgtttccattaccaatttggaaatttttcccagtggcatcagcatttgagagatactgattttgaaattagagtactaggggaaaatgcttcaaaaatgaagactacttaaataaaaattggctttaaataaacctttggggatctgtacttgactaaaaagtattttctttaaactttggtctttgaaaactaaagtgtgtgtgcatgtgttcattaaaatgacctataacatg

SEQ ID NO: 14465 - DNA, 2108 bp, Homo sapiens
  CDS (7)..(1707)
ataaagatgcttcagactgcaaagaatttgttgaaagaggagaaattggtgcatagctatccgtatgactggaggaccaagaaacctgtggttattcgtgccagcaagcagtggtttataaacatcacggatattaagactgcagccaaggaattgttaaaaaaggtgaaatttattcctggatcagcactgaatggcatggttgaaatgatggacaggcggccatattggtgtatatcaaggcaaagagtttggggtgttccaattcctgtgtttcatcataagaccaaggatgaatacttgatcaacagccaaaccactgagcatattgttaaactagtggaacaacacggcagtgatatctggtggactcttccccctgaacaacttcttccaaaagaagtcttatctgaggttggtggccctgatgccttggaatatgtgccaggtcaggatattttggacatctggtttgatagcggaacttcatggtcttatgttcttccaggtcctgaccaaagagcagatttgtacttggaaggaaaagaccagctcgggggttggtttcagtcatccttattaacaagtgtggcagcaaggaagagagcactttataagacagtgattgttcatggatttacccttggagaaaagggagaaaagatgtccaagtctcttgggaatgtcattcatcctgatgttgtcgttaatggaggacaagatcaaagcaaagagcctccgtatggtgctgatgtccttcgctggtgggtagctgattccaatgtcttcaccgaagttgcaattggcccatccgtgctcaatgctgccagagatgatattagcaagcttaggaatacacttcgctttcttttgggaaatgtggctgatttcaacccagaaacagattccatccctgtaaacgatatgtatgtcatagaccagtacatgctacacttactgcaggatttggcaaacaagattaccgaattatacaaacaatatgattttggaaaagttgttcggctgttacggacgttttataccagagagctctctaacttttatttcagtataatcaaagataggctctattgtgaaaaggaaaatgaccccaaacgacgctcttgtcagactgcattagttgaaattttggatgtaatagttcgttcttttgctcccattcttcctcacctggctgaagaggtgttccagcacataccttatattaaagagcccaagagtgttttccgtactgggtggattagtactagttctatctggaaaaagcccgggttggaagaagctgtggagagtgcgtgtgcaatgcgagactcatttcttggaagcatccctggcaaaaatgcagctgagtacaaggttatcactgtgacagaacctggactgctttttgagataatagagatgctgcagtctgaagagacttccagcacctctcagttgaatgaattaatgatggcttctgagtcaactttactggctcaggaaccacgagagatgactgcagatgtaatcgagcttaaagggaaattcctcatcaacttagaaggtggtgatattcgtgaagagtcttcctataaagtaattgtcatgccgactacgaaagaaaaatgcccccgttgttggaagtatacagcggagtcttcagatacactgtgtcctcgatgtgcagaagttgtcagtggaaaatagtattaacagctcactcgagcaagaaccctcctgacagtactggctagaagtttggatggattatttacaatataggaaagaaagccaagatttaggtaatgagtggatgagtaaatggtggaggatgggagtcaaaatcagaattatagaagaagtatttcctgtaactatagaaagaattatgtatatatacatgcagaaatatatatgtgtgtgtgtatctgtggatggatatatgtatatctcttcctatatatatccatagtggacttattcagaacatagatatgtattcagcttgtcttcaaatacggccaagcagaaaatgttttatattttataaatcatcttttgactctgtatttaaattctatgatactgaaaataaaggcattctg

SEQ ID NO: 14466 - protein, 567 aa, Homo sapiens [sequence omitted]

SEQ ID NO: 14467 - DNA, 1985 bp, Homo sapiens
  CDS (77)..(595)
aagtcattctgtgcaattcctcagagctctgtgggagaagacccaggcagggggtgctcacagctttgaaactgccatgatggagtccacgtttccacagcagaaggatctggaccaggtacagctccatctggaagaagtgaggttctttgacgtgtttggcttcagtgaaacagcaggagcatggcaatgcttcatgtgcaacaatcctgagaaagcaactgttgtaaatcaagatggccagcctctcatagaaggaaaacttaaagagaagcaagtcagatggaagttcatcaaaaggtggaaaacacgctattttacactggctggaaatcaacttctgtttcaaaaaggaaagtctaaagatgaccctgacgactgcccaatagaactcagcaaagtacagagtgtgaaggctgtggccaagaaacgcagggaccgctctctcccccgggctttcgaaatcttcacagacaataaaacctatgtctttaaggccaaggatgagaagaatgcagaagaatggctccagtgcatcaacgtggcagttgcccaagccaaagaaagggaaagtagagaagtaaccacatatctgtagggatttataagtcagccatgacaattatacaccacaggcattgtattatcattgccaatgtcaagaaaaagagctaaatttaccaagccatgttgttttttactaaataccaatggaattgttgtcctttaagaagaagggcctaaaatggcaggattcttagtaaatgtcatactctaacagctttagtattgacttcagaatatatctgatgcccacaaaaataaaataaaataaaaggagctacagagtatgccctcagatagtgtggggccaggaagggaaaagtcactgataaaagaacttctgtagatatgtcatttaaaactgtgagaaaacaacatgaaaagatgcctgaactctccatcctgaggaaagattagcacttctgatgaaaatcacagtctgtcaaaggtattaaaagaaaactttaaaaaaaaacctttagaaacgttgaactaatgtacactgagaaaaaccatataacttacttatagacatataattacatgatcctctcttactacaactgaggctaacacatggtaaaatggttcccaaatcaagccagttatgtcattaaatacttgtctttcagaattacttatttaattattccatttaagttcatataatataatctacagtttagatacttggacatatatcctgcccaaggcactaagtgtaatataggaaaaggatagaaagccattttctctatcttcaaaataatgtgccatctccgttaaaattaagactttaaagttctataattttttctttgtattcaactttttaatacctccaaattacaaacatctatttttttcactacatagatatataattacactatgatagacagaattctagagtgattctcaataatccatgccttggtataatcctctcccccattgagagtgggtgggacatgtaacctgcttctaaccaacagaatatggcaaaagtgatgggatcatctctcccatattatgttatgttatataacaaaagtgaagagaagttgcagatatacataaggtttctaatcagctgactttgagttaatcaaagagatcccctgggtgggcctgacctaatcagactagtcttttaaaagagagtgaaccagtcagagactctctctcctattagccttaaataagcaagctgccatgagctctacggctgcaaggaaataagttttgtgaacaaccatgtgatcttggaagaagcatctgaacctcagataaaagcccagccccagccaacgccttgcttgcagctttgtgaaactctgagcagaggacccagctaaatcacgtttggactcctgacccacagaaactttcagataataaatgtatgctgttttaaatct

SEQ ID NO: 14468 - protein, 173 aa, Homo sapiens
MMESTFPQQKDLDQVQLHLEEVRFFDVFGFSETAGAWQCFMCNNPEKATVVNQDGQPLIEGKLKEKQVRWKFIKRWKTRYFTLAGNQLLFQKGKSKDDPDDCPIELSKVQSVKAVAKKRRDRSLPRAFEIFTDNKTYVFKAKDEKNAEEWLQCINVAVAQAKERESREVTTYL

SEQ ID NO: 14469 - DNA, 1952 bp, Homo sapiens
  CDS (265)..(576)
ttaaagcttccagaaccttcagcctcattgccaaatcctccatcaaagctcctctgcagctggtatgtttatctcctagatccagagaatggagaagccaatcataaaccacacctgactgcaaattgcagcgttccttcagcccaggccagatcccagatgagttaaactctgctccaagacagggaaataaacatgtgcaccagcttgtcagtgaggtcatttcttcagccagcaaagtaacggatgccttgagaatgtaaaatggacatattgtggatgttacaaactttccttctcccttgcattgttttcttggccttcaaggtagctaaaatgctcataattttttatgtcattccctgtataaaggtggtggtggctccaaagacattgtccttagaaaaggacagaaaattgaaagtacagcagtgtttgtttgggcctatgttcagcatgttgtcaaaaaaaaatgcatgttttactctcttggagaatagcactgggcagaagtctgttgctgtaagatctaaggactgctctaggccagacccatgcgtctttcattccggtagttaatctctgacagtagctctagaggacctagagaggcacagttgtcttgctgaaactaagagggtaggttctcagcgtgcttcttatttttcttcatccaaaaatgaagcagatttttttctcccaaatatctatcttccttagtaacttagagatcattcatgaattgatctaaacctattcttgaaagctttaaccttggataccttttggagtaatatgtttcataactttattcttctctgctcctgatttctgttttcttattttaattttcagaatttaagttgtttgtgacttcatcatttatgatttagatcagagatcagcaaaccttttcttctaaagccagacagtaaatattttaggctccatgaagcagatggactctattgcagctactcaactctgctgttgtattgtgaaaacagccacagataatacataaacgaatgagcatggctgtgttccagtaaaacttcatttataaaagcaggcagccagctggatttggcccctgggccatcatttgccaagccctgattttgattttggcatcttgctcttcctaaaccccagccttgtcttctatattatttgagttgcttttcgaggtcttctactctgtgtctttctggggttccagtgtacacatgacaaactatactagacgatgtaccatcgtttaaacaagcgtagaacatatcttctgctagctttcctgtctgtatccaggatttgattgatttttacagtaatatagttgactgtttccaggaaatatattccagtagtcattaggtatctttgtatctatgttgtaatcgatagcgtggagcctgtcatctttaatatgttttatattattttcctttactatcatatgtctgcctttgttgaaactcagcttccaaccctcacttgctccagtcttttcaatttgtcactgtcagcaagcagagttgaatgcaaccagtgggtttggagatgttcccgagttccttcttgcaaatcatttgtaagaaggcctaacattatccctgtggtactctgcagtttgttctctttccagaactgtatccatttagtcatagcctttgttactgtctttctgagccacttctctgctgaaacaatctcccaaatccatagggatttggtcttttaaataacaaaaattttagtaaatgcttcaatcatctttttttccaatatattcaacagtgcactgggaataacatacaaactagttatatgtagaggctaccacaatcattttctttttttaaacacttgtaactggtatcttgttttgttgtgagctattaaaacacctgaacaagtcatttctccaattaaacattttatgtccatac

SEQ ID NO: 14470 - protein, 104 aa, Homo sapiens [sequence omitted]

SEQ ID NO: 14471 - DNA, 1905 bp, Homo sapiens
  CDS (128)..(1519)
gttagtctccgctgctagttcttggctctgggaggcccaggtggctctgcagcagcctctgccaccctgtgacctgcgagtattgggacatccctagctgacgccaggacacccgggaagccgaggaatggtgagtggactgcgcctggcttcccgaagtggagaagagggctggttgaaacctgctgtggcgcgactcgggcctccacgccatcggctccggaacctgcggaccgagtcgccgtggcgtagccggggctcagtcctcttctgttcagggccgggccgggcggggcgggcagcggaacccctgcatcctgtctgtacctgcgggcgccacttccgccggccggatccctgtcgggaacccctcgcctcccctatccaggactcggtggcttttgaggatgtggctgtgaactttacccaggaggaatgggctttgctagattcttctcagaagaatctctacagagaagtgatgcaggaaacctgtaggaacctggcttctgtaggaagccaatggaaagaccagaatattgaagatcacttcgaaaaacctgggaaagatataagaaatcatatcgtacagagactgtgtgaaagtaaagaagatggtcagtatggagaagttgtcagccaaattccaaatcttgatctgaacgagaacatttctactggattaaaaccatgtgaatgcagtatttgtggaaaagtctttgtacgtcattccctctttaataggcatatcctagctcactcaggatacaaaccatatggagagaagcaatataaatgtgaacagtgtgggaaattcttcgtttctgttccaggtgttagaagacacatgataatgcacagtggaaatccagcttataaatgtacgatatgtgggaaagctttttattttctcaattcagttgaaagacatcagagaactcacacaggagaaaaaccctataaatgtaaacaatgtggtaaagcattcactgtttccggttcttgtctaatacatgaacgaactcacactggagagaaaccctacgaatgtaaggaatgtgggaaaacattcagattttcttgttcttttaagacgcatgaaaggactcacactggagaaagaccctataaatgtaccaaatgtgataaagccttcagctgttccacttcccttcgttaccatggaagcattcatactggagagagaccctatgagtgtaaacaatgtggcaaagcctttagtcgtttgagttccctttgtaaccatagaagtactcataccggagagaaaccctatgaatgtaaacaatgtgatcaagccttcagtcgcctcagttcccttcacctccacgaaagaattcatactggagaaaaaccctatgaatgtaagaaatgcggtaaagcctacactcgttccagtcaccttactcgccatgaaagaagtcatgatatagaggctgggtgtagtgactcagcctataatcccagcactttgggaggccaaggcgtgtggattgcttgagcccaggagttcataaccagcctggattaaaacaatgtgaaacaacctgggcaacatggtgaaaccctgtctttacaaaaaataaaataatgccgggcacggtggcttacgcctgtaatcccagcactttgggaggccgaggcgggtggatcacgaggtcaggagatcgagaccatcctggccaacacggtgaaaccccgtctctactaaaaatacaaaaaattagctgggcgtggtggcgggcgcctgtggtcccagttactcggggggctgaggcaggagaatggcatgaacccgggaggcggaacttgcggtgagccgagatcgcaccactgcacttcagcctgggtgacagagtgagactctgtctcaaaaaataagat

SEQ ID NO: 14472 - protein, 464 aa, Homo sapiens
MVSGLRLASRSGEEGWLKPAVARLGPPRHRLRNLRTESPWRSRGSVLFCSGPGRAGRAAEPLHPVCTCGRHFRRPDPCREPLASPIQDSVAFEDVAVNFTQEEWALLDSSQKNLYREVMQETCRNLASVGSQWKDQNIEDHFEKPGKDIRNHIVQRLCESKEDGQYGEVVSQIPNLDLNENISTGLKPCECSICGKVFVRHSLFNRHILAHSGYKPYGEKQYKCEQCGKFFVSVPGVRRHMIMHSGNPAYKCTICGKAFYFLNSVERHQRTHTGEKPYKCKQCGKAFTVSGSCLIHERTHTGEKPYECKECGKTFRFSCSFKTHERTHTGERPYKCTKCDKAFSCSTSLRYHGSIHTGERPYECKQCGKAFSRLSSLCNHRSTHTGEKPYECKQCDQAFSRLSSLHLHERIHTGEKPYECKKCGKAYTRSSHLTRHERSHDIEAGCSDSAYNPSTLGGQGVWIA

SEQ ID NO: 14473 - DNA, 1810 bp, Homo sapiens
  CDS (209)..(1684)
cttactgctggacttgttctttaagtacacctggaataactttttgcacttccaagtggaactatgcatagccgctattctctcccacgctgcccgtgaggagaggacagaagccagcggatccgagagcagggtggagcctccgcatgagaacgggaaccggagcctggagactccccagccggccgccagcctccctgacaacacaatggtgacccacctgttccagaagtgctgcctggtgcagaggatcctggaggcctgggaagccaacgaccacacgcaggcagcgggtggcatgagacgtgggaacatgggccacctcacacggatcgccaacgcggtggtgcagaacctggagcggggccctgtgcagacgcacatcagcgaggtcatccgagggctccctgcggactgccgtggccgctgggagagcttcgtggaggagacgctgacggagacgaaccgcaggaacactgtggacctggccttctctgactaccagatccagcagatgacagccaacttcgtggatcagtttggcttcaatgatgaggagtttgccgaccaggacgacaacatcaatgcctcgtttgacaggatcgcagagatcaacttcaacatcgacgctgacgaggacagtcccagcgcagctctgtttgaggcctgctgcagtgaccgcatccagccctttgatgatgatgaggacgaggacatctgggaggacagtgacactcgctgtgctgcccgggtgatggccagacccaggtttggagccccccatgcttcagagagttgctcaaagaatggcccagagcgtggaggccaggatgggaaggcgagcttggaagcacacagagatgcacctggggcaggtgccccaccggcccccgggaagaaggaagccccccctgtggagggtgactcagaagcaggcgccatgtggacggcagtgtttgatgagccagcgaactcaacgcccacagccccaggagtggtgagggacgtgggttccagtgtgtgggcagctggcacctcagctccagaggagaaaggctgggccaagttcactgacttccaacctttctgctgctccgagtcagggcccaggtgcagctctccggtggacacagaatgcagccatgctgagggcagccggagccaaggccctgagaaagccttcagcccggcttctccatgtgcctggaacgtgtgtgtcaccaggaaggcccccctgctggcctctgacagtagctcctctgggggctcccacagcgaggatggcgaccagaaggcagcgagtgccatggatgcggtgagcaggggtcccggccgggaggcccccccgctgcccacagtggccaggacagaggaggcggtcggcagggtcgggtgtgctgacagccggctgttaagccctgcctgccccgcgccaaaggaagtgactgctgccccagccgtggctgtgccccccgaggctactgtggccatcaccacagcactgagcaaggctggccccgccatacccaccccagcagtctcttctgcactggccgtggcggtccccctagggcccatcatggcagtcacagcagccccagccatggtggccaccctggggacagtgacaaaggacgggaagacagatgccccgccagaaggagctgccttaaatggcccagtgtgatgctgctgccgcccggccacggcccaccctggtcaggctgcctccttaatcgagaaaactacctggtgatgcaatctttttttttttaatttaatttaattttaaaataaatgctgcattggt

SEQ ID NO: 14474 - protein, 492 aa, Homo sapiens [sequence omitted]

SEQ ID NO: 14475 - DNA, 2112 bp, Homo sapiens
  CDS (20)..(451)
agaaagacaaaaggctgaaatggctttgcttatgatggatgaggacgaggacagtaagaaacacttcaattacaacaagattgtggagcaccagaatctgagcaaaaagaagaaaaagcagctcatgaaaaagaaggaattaatagaggatgactttgaggtaaatgttaacgatgcacggtttcaggcaatgtacacttcccacttgttcaatttggacccctcagatcccaatttcaagaaaacaaaagctatggaaaaaatccttgaggagaaggcccggcaaagagaacgaaaagaacaagaacttactcaggcaataaagaaaaaagagagtgagattgaaaaggaatcacaaaggaagtccattgatcctgctttgccaatgttgattaaatctataaaaaccaaaacagagcagtttcaagcaagaaaaaagcaaaaagtcaaataactggatgttacttatttttgaactgaatacatcttttcctaaaatgtacaaaaatagtaggagggaatatttattgggaacaaagctatctttcaagaacatgaataaaatctttttctggacatagtaaaatttttctccataaataattgtacttaattgtggatgactgacaaatttttattgtatattcctacagatcagtcataattaaattacctgcattatagggtttataaaatttttatattttacaatgttcagttctaactagtggaaagttactctagctttttaaaaggctgtttacaattctgtgtaaaaatagagcagtatctactcaagtttgtgtaaatgttagggataatttgaaaaatatatatatttaatacattaatttctctggaagcaggaggcatgtttaaataactattaaaataatttatttttctagccataaaggatggaagtcaagaactttttgttgtttagtcatgttaagtatagtttatgaaattaacttgtaaataaaagtgtaaaatattttcattattttgtatagcactgatttattccattttatgcatctcaaagtactctctggaaaaatatctgaaaaccgattttaactttttaagaggacaactccatttaaaggcagttctagagttgcattgctcgtaaattgcatttgaaatattcatgagctctccagtggtttttctgtttggtagcaacagaaaagtcttctgtctgtccttcacatttttggaatactttagaaggatggatatgctgctgtagagtttaaggataccttaattcttcttaaaattaaaacacatctttaaggccttaacactcttggatctcatctggtctaaatattatagacaactgacagtcaaattagatatgctgtataagtaaatgtaaataaaaccagacttgtaacttggagcaaattataaatatggtaacttctgaaagacaacaggaatttgaccaggtttgtggttaaacttgacatttggggtattaaaaatcaaacctactgaccaggcaaggtggctctcacctgtggtcccagcactttgggaggctgaggcaggagaattgcttgaggccaggagttttgagaccaacctgggcaatatagtaagaccataggctgggtgtggtagcctacgcctgtaatccccccactttgggagactgaggcaggcacatcacttgaggtcaggagttcaagaccaggctggccaacacagtgagaccccccatctctaccgaaactacaaaaaattggccgggcgtgatggtgcatgcctgtggtcccagctactcaggaggctgaagcaggagaatcacttgaacttgggaggcggaggttgcagtgagccgagattgagccactgcactccagcctgggcaacaggagaccctgtctcaaaatatatatatatacacgtctgtgtgtgtgtgcgcgcacacgtgcgtataacaagccaagtgtggtgatacatacctgtggtccttgctactcaggaggctgagatgggaggatcatatgagcccaggagtttgagtttacagtgagctgtgattgtatcactgcattccagcctgggtgacagagcaagaccctgtctctattt

SEQ ID NO: 14476 - protein, 144 aa, Homo sapiens [sequence omitted]

SEQ ID NO: 14477 - DNA, 2245 bp, Homo sapiens
  CDS (199)..(1719)
ttttcaagagcttgggatgttcttcttgaccatatacagtcagcagcactcagcaaaaacaatgaagtatctctggctgctctgaaaagcttccaggaaattttacagattgtgtcccctgtcagagactcagataagcctgagacaccacctgtagttaatgtacctgtgcctgttcttatagggcccatatcaggcatgagcaggccatttgtaagaacagattccattggagaaaaactagggagatatagtagctctgagccacccattgttactgatgagcttgaagatttgaatctatggtgggctgcgtggaatacctggtatagaattggatctgaaagtactaagcctcctattacttttgataaactaacttttattcctagccagccttttcttacagctttaattcagatatttccagctctctaccaacacataaaaactggtttcaatatggatgacttgcaaaagttgggagtcatattgcacagtgctatttcagtcccaataagttcagatgcatccccttttattcttccatcttataccgaagcagttttgacaagtttacaggaagctgtacttacagctttagatgttctccaaaaggccatttgtgtaggaccagaaaacatgcagataatgtatccagctatatttgaccagttgttggcatttgtagagttttcctgtaaacctccacagtatggacagctggaaacaaagcacgttgcaaatgcaaaatataatcaggcggaatgggtagccttgaattatgtgccgtttgctgaaaggtctttagaagtagttgtggatttataccaaaaaacagcgtgtcacaaagcagtggtgaatgagaaagtgctccagaatattattaagactcttagggttcctctcagtttgaagtattcctgcccttctgaaagcacatggaaactagcagtatcctctctcctcagagttctttctattgggctacctgttgcccggcagcatgcttcttctggaaaatttggcagtatgtggccagaactagccaatacttttgaagattttctctttactaaaagcatacctccagataatctctctattcaagagtttcaaagaaatgaaaatattgatgtcgaggtagttcaacttatcagcaatgagatactaccttatgccaattttattcctaaggaatttgttggtcaaataatgacaatgcttaacaagggctcaatacattctcagtcatcttcatttacagaagcagagattgatattcgtttgagagaggaattttctaaaatgtgttttgaaacattactccagttttccttcagtaataaagtcacaacacctcaagaaggctacatctcacgaatggcactctcagtgcttttaaagaggtcccaagatgtactacatcgctatatagaggatgaaagattaagtggtaaatgccctcttccaaggcaacaagtaacagaaattatatttgttttaaaagcagtcagtactcttattgattcacttaagaaaactcagcctgagaatgttgatggaaatacctgggcacaagtaattgccttatacccaactttagtagaatgcatcacctgttcttcttcagaagtctgttctgcacttaaagaggcactagttccttttaaggatttcatgcagccaccagcatccagagttcaaaatggagaatcttgaccggctacaatatatttgaaagcaggaagatagtctaaaaaatgtttgctcctaattgagtcttctgtgagaaggacatttcttactgcagataattcttggcagctgttgttggcctcctttaaattctacttacctgagttcagtaattcatattacaggcttgcatatcaacaaaggctcctgaatgaacagcagtgtaaggctttaataaattaaactgatgggagggataattaacactacagtatacatgctaccatatctccagttggtgatttaaagtgagcttatgtacagtttgtggtgtatgtgttaatgatgtactttttaaaaagaaagaagagatatttcaattcagtcagatttattagtctggtgtttttgcaccctttttcaagtacaaaatcgtactagaattttatgcaagatggtactgtaacattccatattatctataaccagcctttgttaacaaagggaactgatatacttgtgtgtataataaatggtacagttctgt

SEQ ID NO: 14478 - protein, 507 aa, Homo sapiens [sequence omitted]

SEQ ID NO: 14479 - DNA, 2037 bp, Homo sapiens
  CDS (83)..(979)
actctaggcctttcggttcgcgcgagcgggcaggaaagcgtgcgtgcggctaagagagtgggcgctctcgcggccgctgacgatggaagaactggagcaaggcctgttgatgcagccatgggcgtggctacagcttgcagagaactccctcttggccaaggtttttatcaccaagcagggctatgccttgttggtttcagatcttcaacaggtgtggcatgaacaggtggacactagtgtggtcagccagcgagccaaggagctgaacaagcggctcactgctcctcctgcagctttcctctgtcatttggataatctccttcgcccattgttgaaggacgctgctcaccctagcgaagctaccttctcctgtgattgtgtggcagatgcactgattctacgggtgcgaagtgagctctctggcctccccttctattggaatttccactgcatgctagctagtccttccctggtctcccaacatttgattcgtcctctgatgggcatgagtctggcattacagtgccaggtgagggagctagcaacgttacttcatatgaaagacctagagatccaagactaccaggagagtggggctacgctgattcgagatcgattgaagacagaaccatttgaagaaaattccttcttggaacaatttatgatagagaaactgccagaggcatgcagcattggtgatggaaagccctttgtcatgaatctgcaggatctgtatatggcagtcaccacacaagaggtccaagtgggacagaagcatcaaggcgctggagatcctcatacctcaaacagtgcttccctgcaaggaatcgatagccaatgtgtaaaccagccagaacaactggtctcctcagccccaaccctctcagcacctgagaaagagtccacgggtacttcaggccctctgcagagacctcagctgtcaaaggtcaagaggaagaagccaaggggtctcttcagttaatctgttgtggcctcagctgctgaggatggacttggagaacagcttccaagcttcaccttgaaagaagcttacatggcagcaatatttctaaaatagtgatacagtcagaggcctcctgtaagggcgagagaactgaagttgatgttgacaggcccacagggaattggccttccctgttcaagtggaagccagtctctgagaatcccgtgctctcctctcttttggtggaggttctgtaggttcaggtttctaccatggactttaggtatatagggcaagtcagcaagaaagcaccacacactcaggaagccttgtctacctttccctagcgtctctagccagccagccccagatactcctcagagacccacttctctcttttgcatggaataaaaagcactcacagtccctgcttttgggattacttatgctgtggaactcataacccaattcacttccttcactgggtcccaccccattgttgtctctggatgaagtctagccatcagtctggtccttcagattcttcgtaaacttttctgcagttgccagagctaagtctccatttggaaactttggtctcaagaactctcttgatggtgggcacaagacagatagatgattgctgctttcctttgccaaacttggatgcatttttctctttgtttccaaagtataggcaacaggttaaactaccacgtggggtagtttatcaatcctcccgcctcatccttctgcataactgggactaaaggcacacaccaccacacctagctaatttttgtatttttttgtgtgtggagacaaggctttgccatgttgcccaggctggtcttgaactcctggactctagtgatctgcccacctcaacctcccaaagtgctgggattacaggcatgagctaccacgcctatccaatttctggtttatttactttcgatggttaaatgcctccttattcaaatatcctgtatatatactggcgtttctgtcctgatgtcaagtctcgagagaagatgatcaaacaataataaaataattataataagaacaac

SEQ ID NO: 14480 - protein, 299 aa, Homo sapiens
MEELEQGLLMQPWAWLQLAENSLLAKVFITKQGYALLVSDLQQVWHEQVDTSVVSQRAKELNKRLTAPPAAFLCHLDNLLRPLLKDAAHPSEATFSCDCVADALILRVRSELSGLPFYWNFHCMLASPSLVSQHLIRPLMGMSLALQCQVRELATLLHMKDLEIQDYQESGATLIRDRLKTEPFEENSFLEQFMIEKLPEACSIGDGKPFVMNLQDLYMAVTTQEVQVGQKHQGAGDPHTSNSASLQGIDSQCVNQPEQLVSSAPTLSAPEKESTGTSGPLQRPQLSKVKRKKPRGLFS

SEQ ID NO: 14481 - DNA, 2311 bp, Homo sapiens
  CDS (100)..(2217)
agacacaaggagaggcttggagagagcagacgccttctggattcaagaagacgaggcccattcccctcaggctcacctgttactcggcctcccagaaagatggataggagaaatgactacggatatagggtgcctctatttcagggccctctgcctcccccggggagcctggggcttcccttccctccagatatacagactgagaccacagaagaggacagtgtcctgctgatgcataccctgttggcggcaaccaaggactccctggccatggacccaccagttgtcaaccggcctaagaaaagcaagaccaagaaggcccctataaagactattactaaggctgcacctgctgcccctccagtcccagctgccaatgagattgccaccaacaagcccaaaataacttggcaggctttaaacctgccagtcattacccagatcagccaggctttacctaccactgaggtaaccaatactcaggcttcttcagtcactgctcagcctaagaaagccaacaagatgaagagagttactgccaaggcagcccaaggctcccaatccccaactggccatgagggtggcactatacagctgaagtcacccttgcaggtcctaaagctaccagtcatctcacagaatattcacgctccaattgccaatgagtcagccagttcccaagccttgataacctctatcaagcctaagaaagcttccaaggctaagaaggctgcaaataaggccatagctagtgccaccgaggtctcgctggctgcaactgccacccatacagctaccacccaaggccaaattaccaatgagacagccagtatccacaccacagcagcctccatccgaaccaagaaagcctccaaagccaggaagacaattgctaaggtcataaatactgacactgagcatatagaggctctaaatgtcactgacgcagctaccaggcagattgaggcctcagtagtggctatcaggcccaaaaaatccaagggcaagaaggctgccagcaggggcccaaattctgtctctgagatctctgaggccccacttgccactcagatagtcacaaaccaagccctggcagccaccctgcgggtcaagagagggtctagggctcggaaggctgccactaaggctcgggcaactgaaagccagactccaaatgctgaccaaggggcccaggccaagatagcctctgctcagaccaacgtaagtgcccttgagactcaggttgctgctgctgtccaggccctggcagatgactatctggctcagttgagcctggagcccacaaccaggacccggggcaaaagaaaccgaaagtccaagcatctgaatggggatgagagaagtggcagtaattacaggcggatcccatggggccggaggcctgcaccaccgcgagatgtggccattttacaagaaagggctaataagttggtgaaatacctgttggttaaggaccagacaaagatccccatcaaacgctcagacatgctgagggatgtcatccaagaatatgatgaatatttcccagaaatcattgaacgagcaagctacactctggagaagatgtttcgagtcaatctgaaagaaattgataagcaaagtagcttgtatattctcatcagcactcaggaatcctctgcaggcatactgggaacgaccaaggacacacccaagctgggtctcctcatggtgattctgagtgtcatttttatgaatggcaacaaggccagtgaggctgtcatctgggaggtgctgcgcaagttggggctgcgccctggggtgaggcattcactctttggggaagtgaggaagctcatcacagacgagtttgtgaagcagaagtacctggagtacaagagggtccctaacagcagaccacctgaatatgagttcttctggggcttgcgctcctaccacgagactagcaagatgaaagtcctcaagtttgcatgcagggtgcagaagaaagaccccaaggactgggctgtgcagtaccgcgaggcagtggagatggaagtccaagctgcagctgtggctgtggctgaggctgaagccagggctgagatttattccccatgtttacagataccgctaataaattgcagtagtccttcccatggagccaaagtacatccttggaatctttgtccacacagcagtcaaggcagttatggccaatcagctgagggtgtcatgtgatggaaaaatctgtttgctgttcctgctttattgtttgctttctgtgtgctgtcatattttggtatcagagttacattaaatttgcaaaatg

SEQ ID NO: 14482 - protein, 706 aa, Homo sapiens
MDRRNDYGYRVPLFQGPLPPPGSLGLPFPPDIQTETTEEDSVLLMHTLLAATKDSLAMDPPVVNRPKKSKTKKAPIKTITKAAPAAPPVPAANEIATNKPKITWQALNLPVITQISQALPTTEVTNTQASSVTAQPKKANKMKRVTAKAAQGSQSPTGHEGGTIQLKSPLQVLKLPVISQNIHAPIANESASSQALITSIKPKKASKAKKAANKAIASATEVSLAATATHTATTQGQITNETASIHTTAASIRTKKASKARKTIAKVINTDTEHIEALNVTDAATRQIEASVVAIRPKKSKGKKAASRGPNSVSEISEAPLATQIVTNQALAATLRVKRGSRARKAATKARATESQTPNADQGAQAKIASAQTNVSALETQVAAAVQALADDYLAQLSLEPTTRTRGKRNRKSKHLNGDERSGSNYRRIPWGRRPAPPRDVAILQERANKLVKYLLVKDQTKIPIKRSDMLRDVIQEYDEYFPEIIERASYTLEKMFRVNLKEIDKQSSLYILISTQESSAGILGTTKDTPKLGLLMVILSVIFMNGNKASEAVIWEVLRKLGLRPGVRHSLFGEVRKLITDEFVKQKYLEYKRVPNSRPPEYEFFWGLRSYHETSKMKVLKFACRVQKKDPKDWAVQYREAVEMEVQAAAVAVAEAEARAEIYSPCLQIPLINCSSPSHGAKVHPWNLCPHSSQGSYGQSAEGVM

SEQ ID NO: 14483 - DNA, 1977 bp, Homo sapiens
  CDS (104)..(895)
ggggtgatcatggacgcttgacaacctgcgggcaggcgccgggaggccgagccagcgactaagaggaccgagaggtggcgtggacagatttcaaggccagagaatggcaggggaacagaaaccctcaagtaatctcctggagcagtttattttactagccaaaggtaccagtggctcagccctcactgctctcataagccaggtcttagaggctcccggagtgtatgtctttggagaacttctggagctggccaacgtgcaggagcttgcggaaggagctaatgctgcttatttgcagttgttgaacctgtttgcctatgggacatacccagattacatagccaacaaggagagcctgccagaactgagcacagctcagcagaacaagctgaagcatcttaccatcgtgagcttggcatcaagaatgaagtgtatcccctactccgtgttgctgaaagacctggagatgcggaatctccgggaactagaagaccttatcattgaggctgtctacactgacatcatccagggcaagctggaccagcgaaaccagctgctggaagtggatttctgcattggccgtgacatccgaaagaaggatatcaataatattgtcaagaccctgcatgaatggtgtgatggctgtgaagcagttctactgggcatcgagcagcaagttctgagagccaaccagtacaaagagaaccacaaccgaactcagcagcaggtagaagcagaggttaccaacatcaagaagacactcaaagccaccgcatcctcctcggctcaggagatggagcagcagctggctgaacgggagtgtccccctcacgctgagcagaggcagcccaccaagaagatgtccaaagtgaaaggtctggtctccagccgccactagggccggctggggcagctggcactcaccaggcctgggtcaggtggggaggggacaccaagggcccatttcctcccctctctacctgcagtgagttccagacctgcccgtcccctcaccagcgcctccccaccctgttggtactgttccagaaaaactgttactccccctcacccactccctccttccccagttgttcccttcagactcaggggctccaccaatgccatcccaaaacagggtcagacactgctcagcttccctccaggaggttcttgtctctgtgtaagggcttgtctccctcccagtttttcttttgctccacgtcattttgtcaggctggttataagccggaggcagctttaaccagcccccagggatgattgtgaaggaggcccctccccttgtgaggagggggcactcctctccagcccctggtaccacagtcctcacgatggtgcagtgatttctagccaggcgtcaagatgcgctgctttccctctcctgcctcattccttgttggcagctccagttcaggccgtggagggacgtgatgctgggctgtgtttactaaacccacgggttttcagcctcttaagcccagctccgatctccaattagttgagagcgctgggttgactaacctctggtatctgagcacagacagagggtgctgtgggtctgctgggtggcagaaatggttccttccggcttggcgttctctcctggccactcttcctgctgcctctgactactcagccttgttttcggtgtgtaggccccagctgcccactggaactgccggctaatgcttgctctcccaagatctttaactcctcctggctgcacctgggtagggatggtggcatcgatgcccctctgtctgctgaaggacctgttgctgcttctgtcttttcacccctccttggctgatgacccagagccctctgatgatggcattctcctggcaagagaaaaagacttaactagacttctgaacttgaacagtttcaggttatattttaatttttttttttttgtacaggttctgattctaatacatttcaacatgcttttgtccc

SEQ ID NO: 14484 - protein, 264 aa, Homo sapiens
MAGEQKPSSNLLEQFILLAKGTSGSALTALISQVLEAPGVYVFGELLELANVQELAEGANAAYLQLLNLFAYGTYPDYIANKESLPELSTAQQNKLKHLTIVSLASRMKCIPYSVLLKDLEMRNLRELEDLIIEAVYTDIIQGKLDQRNQLLEVDFCIGRDIRKKDINNIVKTLHEWCDGCEAVLLGIEQQVLRANQYKENHNRTQQQVEAEVTNIKKTLKATASSSAQEMEQQLAERECPPHAEQRQPTKKMSKVKGLVSSRH

SEQ ID NO: 14485 - DNA, 2280 bp, Homo sapiens
  CDS (174)..(2279)
attacgcgctcttaaggtttctccgtggtgttttggaaggtcccggcacggctaccgtcgccccacgctaggaaatttttttttattttcaacctttgttacatagcactgaggctacaagatcatagttcatttaaagcccccatccctgcaaggtggtgctttctaccaatatgaatcttttcaacctggaccgttttcgctttgagaaaaggaataagattgaggaagcgcccgaagcaacccctcaaccttcccagcctggcccttcttcaccaatttctcttagtgctgaagaggagaatgctgaaggggaagttagcagggcaaacactcctgattcagatataactgaaaaaacagaagattctagtgttccagaaactccagataatgaaagaaaagcaagtatatcatatttcaaaaatcaaagaggaatacagtatattgatttgtcttctgatagtgaagatgtcgtttccccaaattgctccaatacagttcaagagaaaacattcaacaaagatacagtgattatagtttctgagccatctgaagatgaagagtcccaaggccttcctaccatggcacgtagaaatgatgatatttcagaactggaagacctttcggaattggaagaccttaaagatgctaaacttcagactttgaaggaactttttccacaaagaagtgacaatgatttacttaagttgattgaatcaacaagcactatggatggagcaattgctgctgccttgctgatgtttggtgatgcaggtggtgggcccaggaaaagaaaattatcttcttcttcagagccatatgaggaagatgaatttaatgatgatcaatctataaaaaagacaagactggatcatggagaggaatcaaatgagtctgcagaatctagcagtaattgggaaaagcaggaaagtattgtactgaaattgcaaaaggaatttcccaattttgataaacaggaacttagagaagtactcaaggaacatgaatggatgtacacagaagctttagaatctctaaaagtgtttgcagaagaccaagatatgcaatatgtatcacaaagtgaggttccaaatggaaaagaagtttcttcaagaagtcaaaattaccctaaaaatgcaactaaaacaaaactaaaacagaaattttcaatgaaagcacaaaatggctttaacaagaaacgtaaaaaaaatgtttttaatccaaagagagttgttgaagactctgaatatgattcaggttctgatgtcggtagttcactagatgaggactatagtagtggtgaagaagtgatggaggatggctataaaggtaaaattcttcacttccttcaagatgcttcaattggtgaacttactttgattcctcagtgttctcagaaaaaggctcagaagataacagaactccggccctttaatagttgggaggctctgttcacaaagatgtccaaaactaatggcttatcagaagatttgatatggcactgtaaaacactgatccaagaaagagatgtagttataaggcttatgaacaaatgtgaagacatttcaaataaattgaccaaacaagttaccatgcttactggaaatggaggtggatggaacatagaacaaccttccattctaaaccaaagtttgtcactcaagccctatcagaaggttggtttgaattggctggcattggtacataaacatggacttaatggcattttggcagatgaaatgggcctaggaaaaactattcaagccattgcatttctggcatacctctatcaggagggtaataatggtcctcatttgatcgttgttccagcttcaactatagataactggttaagggaagttaatttatggtgccctactttgaaggtcctctgttactatggttctcaagaagaacgtaaacaaattagatttaacattcatagtagatatgaagattacaatgtaattgtgaccacatataactgtgcgatcagcagttctgatgaccgtagtctgtttcgacggctgaaacttaattacgcaatttttgatgagggccatatgctgaagaatatgggctccattcgctaccagcaccttatgacaattaatgcaaataaccgtttgctgctcacaggcacacctgtacagaacaatctgttagaactcatgtcgctgttgaattttgttatgccacacatgtttagtagtagcaccagtgaaatacgaagaatgttttcctctaagacaaaatcagcagatgagcaaagcatat

SEQ ID NO: 14486 - protein, 702 aa, Homo sapiens
MNLFNLDRFRFEKRNKIEEAPEATPQPSQPGPSSPISLSAEEENAEGEVSRANTPDSDITEKTEDSSVPETPDNERKASISYFKNQRGIQYIDLSSDSEDVVSPNCSNTVQEKTFNKDTVIIVSEPSEDEESQGLPTMARRNDDISELEDLSELEDLKDAKLQTLKELFPQRSDNDLLKLIESTSTMDGAIAAALLMFGDAGGGPRKRKLSSSSEPYEEDEFNDDQSIKKTRLDHGEESNESAESSSNWEKQESIVLKLQKEFPNFDKQELREVLKEHEWMYTEALESLKVFAEDQDMQYVSQSEVPNGKEVSSRSQNYPKNATKTKLKQKFSMKAQNGFNKKRKKNVFNPKRVVEDSEYDSGSDVGSSLDEDYSSGEEVMEDGYKGKILHFLQDASIGELTLIPQCSQKKAQKITELRPFNSWEALFTKMSKTNGLSEDLIWHCKTLIQERDVVIRLMNKCEDISNKLTKQVTMLTGNGGGWNIEQPSILNQSLSLKPYQKVGLNWLALVHKHGLNGILADEMGLGKTIQAIAFLAYLYQEGNNGPHLIVVPASTIDNWLREVNLWCPTLKVLCYYGSQEERKQIRFNIHSRYEDYNVIVTTYNCAISSSDDRSLFRRLKLNYAIFDEGHMLKNMGSIRYQHLMTINANNRLLLTGTPVQNNLLELMSLLNFVMPHMFSSSTSEIRRMFSSKTKSADEQSI

SEQ ID NO: 14487 - DNA, 2427 bp, Homo sapiens
  CDS (1646)..(2266)
acgatgcctgagatcagagtcacgcccttgggggccggccaggacgtgggccgaagctgcatcctggtctccattgcgggcaagaatgtcatgctggactgtggaatgcacatgggcttcaatgacgacgtgagtcccttgggcaggaggcccagaggctgggagagccggccatccacagctggaccctgggcctcagagccgggacagtggggtggtgggcagcagtggttgtgcttggatggctgcaccctgtggggagcagggatgggtgggcctggccgaggtgagcccctgcatggtggggtccccctgtgctggcgctgagccccagccccggggtcctgtaggctggactccgtgagaccctgggctcagcttccagctcacatctgtcagtgaggttgggggtaacctcggcccctccggatgctgtgagcagccaggggtcctggtgccacctgcgggatgggagtgcccagcctgagtctgcacatagaaccccccttcctgggggcccctccctggggcatgggtggccccagatgctgcctggagaccactgtgcaacctgaaacccccacatccttcctagcgacgcttccctgacttctcctacatcacccagaacggccgcctaacagacttcctggactgtgtgatcattaggtgggttcctgttgggggccttgagggtcccatgtctgtgcctgtggggcttgggccaccttgcttggtctcggcagcgtttggcaaggggcctgtgccatccttgatcctcagggggcttctaggccccaggatctgctccctgcctgccttactggtcacacacatggcctggtctctgtctgttcttccggccctgccctctgaaccctactttctgaacccggccctccaggcttcaccctctctgatgccttcactgtctcaggatctttaaaccccactgtcttgttggcgattccagagtcccgagtctgccctgaccccagcctttagggttcagcagctcatgacccgctggtctgggtggcctcgtctggacggccacagcactcctgctggccccctgcccttccctgccctgtcctcccagcagccaggcccgtgaagcctggagaagccccttctcctctccggaggcagtgtcctcagctgcccctgagcccctcgtggttgtggtttcttctcagacacggtggggtccccaatgccttcctggggcttgccaggcgctgcccttgccctcaggtctgtgccaccttcacctgcagctccactcagcctgtcctgactgcctgaaaagccagcggctcccctatgcgcggttccctcagcagctttgcattgtctcgcgagcatgtcgccgtcaccgacgtgttcaatttcccgtttgcttattgccttgctagactttgagactgaaagttccagggagacagttttgtgtttgctcattactgactcttcggtactcgggatgaggcctggcgcacagcaggcgaatgaaggggccagtggcccacaagcccagagcgggggtgaaggctggggcagggtgggcccaggctgacctgtgctgcgtccccctagccacttccacctggaccactgcggggcactcccctacttcagcgagatggtgggctacgacggccccatctacatgactcaccccacccaggccatctgccccatcttgctggaggactaccgcaagatcgccgtagacaagaagggcgaggccaacttcttcacctcccagatgatcaaagactgcatgaagaaggtggtggctgtccacctccaccagacggtccaggtcaggttcccagggccacagctggcacagtcactgcccacccccacaccaaccatgccctccgcccgttctacacagtttctggaaggctggggcctcagggtgagcccaccccacctcactcttgcgtccagcaccgtggggacaccaggaggcgtcagcgcgaggatgcgggtcccagaccagactgggcgccgacccgggagagcacgtgcagggtgggggtatgcactggcttacgaacccaccaggctctgtccgagcggcattgaaatggccagagtgggacaggctggtgccctcagagcgcttggagcggccagagactcgctggagctcccggggtgttgccgggcagggaggcaggggctggaggggagatgggccagctctggagggtgcctggttctgggtgtgggtcagggaagaagtgaaggttaaatcagcgagtgacaggtgaaattccatttctgacaaagattatgggtttgtctgtgtctcactcgaatctctgggtattgcttttatatttcttgaaattatattaggtacctatgtattttggaacatctaattttctgattgaacttgtcaaaatg

SEQ ID NO: 14488 - protein, 207 aa, Homo sapiens
MVGYDGPIYMTHPTQAICPILLEDYRKIAVDKKGEANFFTSQMIKDCMKKVVAVHLHQTVQVRFPGPQLAQSLPTPTPTMPSARSTQFLEGWGLRVSPPHLTLASSTVGTPGGVSARMRVPDQTGRRPGRARAGWGYALAYEPTRLCPSGIEMARVGQAGALRALGAARDSLELPGCCRAGRQGLEGRWASSGGCLVLGVGQGRSEG

SEQ ID NO: 14489 - DNA, 2420 bp, Homo sapiens
  CDS (257)..(814)
aaagggaccgaaacccttcagggaagtcattgcagggcccttgcttagaaacaatgggcagtctctggagagcagcagcctggaggggtctcacgtgggcgtctatttctccgcacattggtgtccgccctgccgaagcctcacccgggtcctggtggaatcctaccggaagatcaaggaggcaggccagaacttcgagatcatcttcgttagtgcagacaggtcggaggagtccttcaaacagtacttcagtgagatgccctggctcgccgtcccctacacggatgaggcccggcggtcgcgcctcaaccggctgtacggaatccaaggcatccccacgctcatcatgctggacccgcagggcgaggtgatcacgcggcaggggcgggtggaggtgctgaacgacgaggactgccgggagttcccctggcaccccaagcccgtgctggagctctccgactccaacgccgcgcagcttaacgagggcccctgcctcgtcctttttgtagattctgaggatgacggagagtccgaggcggccaagcagctgattcagccgatagctgagaaaatcattgccaagtacaaagccaaagaggaggaggcaccccttctgttcttcgtagccggggaggatgacatgactgactccctgcgagattacaccaacctgcctgaggctgcccctttgctcaccatcctggacatgtcagcccgggccaagtacgtgatggacgtggaggagatcacccccgccatcgtggaggcctttgtgaatgacttcctagcagagaagctcaaaccggagcccatctagcgtggctccggcctcctgagacgttatttaaaactcagccttctcctcctccccctccttccttccgcccttggacttacccagcgtgccccgaatcccaccacccaagtgtccagcctctctgtggtgccttgtttctgcagtaaactcctcagccagcaccctggggtgtggaatcagcagcggcagagtccaccgtgtttggagactctgtttgggagcacgggatggccgggggcccggccagagcggggctgcatggctttcgcaaagtcactagcttttggtgaaggatctgccagggtgtcctgggcagagtgagcgtggagggccggtgggtcccgctcgggctctgactctgacgtcggcacacacggccccggacggccagaggggaaccgccgggtgacacctgcgtggaggctgagctgagaaagggcctccgcttagagctgcgggtgaggacgtccttttctaagcaacacagtcttcctcggtctgagagaaaagcagcccactcttgtgttctcaggcaggggatctccaaatgcaaaaggaagcttatagaggttttttgggtgagaagaaaaatgtagctaaggtaatggttcatatcatacaaacagctcccacgatcctgaaattctgttaacgaatccttctctttggacatcttcccaagaaacttagccctgagtcctaggaggagcacctctgcaccagcacggacctctcgctccacccagctctgtgcccaaggcccctgatctctgctgaggtgcccacacccacgttcgatcacccctgccattcccttttattttcttttttttgagatggagtcttgctctgtcgcccaggctggagtgcagtggcgccatcttggctcacttcaacctccgcccccagggttcgagtgattctcctgcctcagcctcccgggtggctgggattacaggcacccgccaccgtgcctggctgatttttgtatttttagtggagatggggtttcaccatgttggccaggctggtctcgaactcctgacctcaggtgatccacccgcctcggcctcccaaagtgctgggattacaggcgtgagccgccgtgcccggcccccttttcttttcaaagcagaactacaaagatgagaaattaccagaagcctcgccttttcctaagcaccagcggaaggagctgtgccccgggatggagtgagggtggagggcgcgtcagccacgggtgggccttgtgtcgccttgtatcggcccaggtaggttgttggcctcttacttgggctgacctgacccccgaaagagaaacagacaactctgttctcaggattggggatggacggcttcggccaagcgttttagcctcattcactcaggccccactcagcactctgccagccaagaccattgatttggaaaatccggtccccacccgctaatgagctgttgacactgttgttccttgctgaattggattgttgacttgtagttcagaggcgtacaactagttggcgattagacttgttatgtgatgttaccagcctgaaatgcgatcaccccgtaggaaataaagcaggcatctctggacctc

SEQ ID NO: 14490 - protein, 186 aa, Homo sapiens; identical to SEQ ID NO: 11194

SEQ ID NO: 14491 - DNA, 2211 bp, Homo sapiens
  CDS (107)..(718)
atttgggagcggccccgagacgcgcctggcgcggatcctaaatcccgacagctttatagagcccaggcctggcaggctcccagaacttgaagccaccagaccccacatggaaccaaaggcctcctgtccagctgctgcacccttgatggagagaaaattccatgttcttgtgggtgtcacggggagtgtcgcagccctgaagttgcctcttctggtgtcaaagcttttggacattcctgggctggaagtatcagtggtcacaactgagagagccaaacatttctacagcccccaggacattcctgtcaccctctacagcgacgctgatgaatgggagatgtggaagagccgctctgacccagttctgcacattgacctgcggaggtgggcagacctcctgctggtggctcctcttgatgccaacactctggggaaggtggccagtggcatctgtgacaacttgcttacctgcgtcatgcgggcctgggaccgcagcaagcccctgctcttctgcccggccatgaacaccgccatgtgggagcacccgatcacagcgcagcaggtagaccagctcaaggcctttggctatgtcgagatcccctgtgtggccaagaagctggtgtgcggagatgaaggtctcggggccatggctgaagtggggaccatcgtggacaaagtgaaagaagtcctcttccagcacagtggcttccagcagagttgacctgggatttctgtcatgggtgtccctctgtactcagaatgggttcaggccaagtcggtgaagatggatgttggcaaaataggaggataccctcatttgctgaatgggggacctgctctgagcctgcccaggggccaggcctgctccaggttaaactggacggaaggcccaggtctcagtttctttcaaccaggagaggccgctgcctagagcccctccccaccttttcctggatgggtgaggcaagccaggagagcaagcagtgttgtcctcacgggaggaggactgagcgactgggaaaactcggctctacatctcacccagaacggcttttagaaacaccacagctggagagtcctggctgagccttgggagtttcagctctttggcggggtgcccaggtgccatgcgatcagcgaagcctgcgagttggcaggactctgaggtttcctgcagaccatgccatgagattgaaggtgcggggaaataaagaaaaatcaccatttaggagactccattctttccctacaacccagctgtggtcccagagatcagggggtgttgccaggtgtggctggggaagggtctgggttcacaactcaccggcactctttagtccccgtataacatggtggttaaggataaagatctgaagccagacagcccctagttccaatcccagctctgccgcttactagcagtggcagtttggttcaggacttagccttcctgaccttcacttacctcagctatcttgttatcctaccctcagggagttgttgagaggattcagtgaaattttgtgtgcagaatacccatgccactgagtgcctggaacgtagtaaatgtcaaatcaatggaagttaaaactaggcatgcatatatgccagagagctttcctagcatttactgcaatgccctgtctcattttgggaaaaaggaaatcctggatgctaagttgacacatccctttatgcaagtgacaggtaagcagccaggagggttgaccctgccctgggtcccaggcctcttgcctgcttcttggtttcctctgttctcatcctttcagctttgctggacctgaggcaggggcctgggtgtctgtgcctccctaccccccagtacacatgaccaagggaagtagatccagagacaccatgcactctggcccagaaaccctctgctacccagcttttgacttaattgccatttggtgtggctgcagcggggagggcttgtctgcgtatttggagctgaggctgaggctggcttcctgccctctggcttccaggccaggtgtgagggacatcccatgtgggctctgagagcactgagagtagaggtgccttgaggggaccaggaagcctactggctggaatcagtgctccagcagcctccacagcctttatctcaacagcacttgacttcaccaggtgaccctttgggataaaattgccttagggtatgaaataaactataactaaaatggt

SEQ ID NO: 14492 - protein, 204 aa, Homo sapiens
MEPKASCPAAAPLMERKFHVLVGVTGSVAALKLPLLVSKLLDIPGLEVSVVTTERAKHFYSPQDIPVTLYSDADEWEMWKSRSDPVLHIDLRRWADLLLVAPLDANTLGKVASGICDNLLTCVMRAWDRSKPLLFCPAMNTAMWEHPITAQQVDQLKAFGYVEIPCVAKKLVCGDEGLGAMAEVGTIVDKVKEVLFQHSGFQQS

SEQ ID NO: 14493 - DNA, 2574 bp, Homo sapiens
  CDS (59)..(1567)
aaaacaaaataaggatttccagaatgcatttaagatacacaatgccatcacagtacacatgaacaaggccagtcctccatttcctcttatctccaacgcacaagatcttgctcaagaggtacaaactgttttgaagccagttcatcataaggaaggacaagaactaactgctttgctgaatactccacatattcaggcacttttactggcccacgataaggttgctgagcaggaaatgcagctagagcccattacagatgagagagtttatgaaagtattggccagtatggaggagaaactgtaaaaatagttcgtatagaaaaggctcgtgatattccgttgggtgctacagttcgtaatgaaatggactctgtcatcattagccggatagtaaaagggggtgctgcagagaaaagtggtctgttgcatgaaggagatgaagttctagagattaatggcattgaaattcgggggaaagatgtcaatgaggtttttgacttgttgtctgatatgcatggtactttgacttttgtcctgattcccagtcaacagatcaagccgcctcctgccaaggaaacagtaatccatgtaaaagctcattttgactatgacccctcagatgacccttatgttccatgtcgagagttaggtctgtcttttcaaaaaggtgatatacttcatgtgatcagtcaagaagatccaaactggtggcaggcctacagggaaggggacgaagataatcaacctctagccgggcttgttccagggaaaagctttcagcagcaaagggaagccatgaaacaaaccatagaagaagataaggagccagaaaaatcaggaaaactgtggtgtgcaaagaagaataaaaagaagaggaaaaaggttttatataatgccaataaaaatgatgattatgacaacgaggagatcttaacctatgaggaaatgtcactttatcatcagccagcaaataggaagagacctatcatcttgattggtccacagaactttggccagaacgaattgcgtcagaggctcatgaacaaagaaaaggaccgctttgcatctgcagttcctcatacaacccggagtaggcgagaccaagaagtagccggtagagattaccactttgtttcgcggcaagcattcgaggcagacatagcagctggaaagttcattgagcatggtgaatttgagaagaatttgtatggaactagcatagattctgtacggcaagtgatcaactctggcaaaatatgtcttttaagtcttcgtacacagtcattgaagactctccggaattcagatttgaaaccatatattatcttcattgcacccccttcacaagaaagacttcgggcattattggccaaagaaggcaagaatccaaagcctgaagagttgagagaaatcattgagaagacaagagagatggagcagaacaatggccactactttgatacggcaattgtgaattccgatcttgataaagcctatcaggaattgcttaggttaattaacaaacttgatactgaacctcagtgggtaccatccacttggctgaggtgaaagaaacatccattctgtggcatgttggacttgatctggcaaaaactgccaataggaggactgcccgacactgcagcaagattgaggataagatggaaggcagcagtataagctgtagatctgttcttagatctcttgaattagtgagacgacagttcccttaggcagtttgtgcatggcatcctttattctctatacatggctttagcggttcttgcctcattttgggattctaaatggaagctttcaacagagcattccattttgtcctgttaaaaccttttgttttcacctaaaccctttctgcttagttgtatctctgtgaaaaacttgtatacacaagcgtccatgtctcacacaaatattgatgtgattattcttaagtgttaaatcattaacacttaaatgacttcattgggaatattgagcagagggactgtgcttctatgcactgggcaaggcagtatttgcttaggaaactaatttagtcatcagagatactttcctaaaaaggaaaaataaaaaacaaaatggtgccactttgggttgaagctactttgttaggcttgaattcatttatatgtcttttgattcttaaaaaaacaaaaaacattccattagaagcaccagttttttttgctcagactttgtggatcagactctacactcaacacactctaatctacttaaaggtatacaaaatatgctgatctttttaaattatgatttcctgaatttttcttaagtcgtctcaactgatttactcacttagcttcccttccctcatcagcatagtataatagaatgtatgttacatttttatgaatggcaggtgttcattataatctgtattgacttaaaaagtttcttcctcatgatgctaatagttttttgtatacatgggaggatagcacatttgacagtttttgcatttttatgtatgagcacagtatcctatgactgtgctacgtatatataggtaataaactggaattctgttgatg

SEQ ID NO: 14494 - protein, 503 aa, Homo sapiens
MNKASPPFPLISNAQDLAQEVQTVLKPVHHKEGQELTALLNTPHIQALLLAHDKVAEQEMQLEPITDERVYESIGQYGGETVKIVRIEKARDIPLGATVRNEMDSVIISRIVKGGAAEKSGLLHEGDEVLEINGIEIRGKDVNEVFDLLSDMHGTLTFVLIPSQQIKPPPAKETVIHVKAHFDYDPSDDPYVPCRELGLSFQKGDILHVISQEDPNWWQAYREGDEDNQPLAGLVPGKSFQQQREAMKQTIEEDKEPEKSGKLWCAKKNKKKRKKVLYNANKNDDYDNEEILTYEEMSLYHQPANRKRPIILIGPQNFGQNELRQRLMNKEKDRFASAVPHTTRSRRDQEVAGRDYHFVSRQAFEADIAAGKFIEHGEFEKNLYGTSIDSVRQVINSGKICLLSLRTQSLKTLRNSDLKPYIIFIAPPSQERLRALLAKEGKNPKPEELREIIEKTREMEQNNGHYFDTAIVNSDLDKAYQELLRLINKLDTEPQWVPSTWLR

SEQ ID NO: 14495 - DNA, 1922 bp, Homo sapiens
  CDS (147)..(668)
ttatttacctttttactttttaaaaaattcttgtgaagttactttgtgagttttccaggatgtgtgtaaactacacacatcagccacctaggtagttttgagttgctttgaagttcagctgttgttgacttcaaaggcagcagcttatgaaagttggagaaatagaacattttccagtccctattcaggggttggtgacctccgtggcccccagcctcgtggctttgggctttggaaggctggtgtctggtctcactgatggctacaggctggactcacccccaccatctctgtcctcaccaaccctgtccccagccccctggctcatccccagtatcctctacaaacctgctcctactcgggtccagggcaggaggctgagcactgtgggccatcctgggagcctcaggctgcacaggttgctgaccttggactgtaagggctgggtacgaaggcagaaggtggggattctcaggcaatgcagcaggcctgcgagagactctggggaggagcaacagggctctctaaattgccacctgcaagtggctgcgtcctcctaccatggggcacccaggacccagctcaggcttgcacctgggttcttccttgttgaacctgtggcaaagcaaggaggagacttggtctactccctcctgggcagcctctgctgactgccctataggtgctgggcactgtgtctgggacacagagactgtgaaaggcctcctctcccacagtggagagctgccagcagcatgaggaggccgggttcatgcagggtccttggcaggcctgagggccagtggggatcctgggggctttctggggtgtaccctcagctctgcatgctttgaaaggcccctttaaagtcaggtcctggtcagatctagaagcgggcaagtctcagctgaggctgaaacctcggcctccctgagccttgtgacttgcccagggtcggaggcccaacgccccctgaggaattctcttcctggtacggcagagaaaggtgggggccagggaatcagggtggggaaatcccagctgcctctccctgcaccctggcccatctcccccaggtcatgagccatcccccttcgactgttttcccaccataagggactatgatttacatctaccaaactctgccaccgacaaggacagtgtgggaagagggtgagccctgagtggagccaggtgagctggattcaaagcccagttccgcagcagagagcctgggagagccatctcttaaccttgggtacaccacaggccctttctgcacccacaggtctgtcttgctcatgagtgggtctcagagtttacaaatatagactgaggatcagagaggctgcatgcgtgcctgaggtcacacagctcagatccccagaaagagagcagaatggcagctcagacattccgagtcagtgcttttaaccatagtgctgcattatataccctcagcaccagccccaggcttccatcctcagtagcctgtctacatttcaagggttagttctccttcccctccatttcaaatgcccccctttcaagttccctcagggaaggccagtggtttttggggtcacctgggccagggttttctgcagctcaacccatcaggggtctaggtgatgactgggatttctagggggaaacaagggaaataaacatggctttttctgccaaaaggctctctcagccgagacttgctggcacggatattgcccctgccctgggctggctggcgtgagttgtctgcgcctccctgaaggcagacttcaggggctagctgtgatgggctagctgcggtgaggagtcccctgagccctgagtcacatcagaagcacattgctccaccccagggctcggccttgcccagggcctcaaaggcaccaaacgtatacacctgagctagaaagtgt

SEQ ID NO: 14496 - protein, 174 aa, Homo sapiens
MKVGEIEHFPVPIQGLVTSVAPSLVALGFGRLVSGLTDGYRLDSPPPSLSSPTLSPAPWLIPSILYKPAPTRVQGRRLSTVGHPGSLRLHRLLTLDCKGWVRRQKVGILRQCSRPARDSGEEQQGSLNCHLQVAASSYHGAPRTQLRLAPGFFLVEPVAKQGGDLVYSLLGSLC

SEQ ID NO: 14497 - DNA, 2888 bp, Homo sapiens
  CDS (135)..(437)
aatcaatagttgcccagtgaaatcactgtcttcgttgcctgtagctgatttttaaaagcattggtgctgatgagaccgtccaaggacaaggaggtcggaggctgatcagcttctctctctcagatttccaagccatggggttgaagaaagggatgtttttcaacccagacccttatctgaagatttccattcagcctgggaaacacagcatcttccccgccctccctcaccatggacaggagaggagatccaagatcataggcaacaccgtgaaccccatctggcaggccgagcaattcagttttgtgtccttgcccactgacgtgctggaaattgaggtgaaggacaagtttgccaagagccgccccatcatcaagcgcttcttgggaaagctgtcgatgcccgttcaaagactcctggagagacacgccatagggtaaacctgtgactgagatcttactatcactaggttcccaccaacaggtcgtgcccaaaggtggcctgtaggctgcaatagtatagtctcacagagagtcaaaatggtatcattatatttcctttgtttttcctactaattatgttgcctgagccaacataagtgtttgttatattaaacaaacccatcccttttcacttgatgtgtaacactggttacttacccaagagagtaaaaaatcctattaaaaatattaaacagtattaaaagaagccctcaatggggcatttttctgtacaggtagaaactaaagtttgttttactatgaagaatattatttcattcatatgccagtctggtatgtaagatttaatcatatgtgacatttccataacaagatggaatactgggtaactactgtagagtttcttacttagaagacactagtatctgcagatgctagataacatggataagaatttgaaagcatgattctcatggaatgacagcagttaagatgctcacagaattcaattgtatatgagaatgggtttctgttttgtctcttttacattcatgtccactcatggttctcattaaagtggactatgaccagataacagccctatgtataatatgtatttctttaggtaacagggactacatttgaaaacactaaataaagctttctattgataaacatatacttatatacaatgtaacccttacaaagatagcaaaagaatgagaaaaaaatatgcagaatttccaagtgtcttaatttaaagttctttggattatcagaaggactttggaatcacggataattatcataaagacatttattattaattggaaccttatggtgtgtaggcagcagggtgcacagagacctgccactaactctccagccaaagggagctgagtttatggagctgcagtcacgtgtcacatgcagtgtttgcacttgccattcatggttgtgaggattaaacagacaaaaagtgtacataaagaacctagcacggccactggcacgtagtaggaacacaaaagaaaatggtattccttgtgatcttttttatttcatttagtcctcataatgcttctgtgacagcattatcaccattcctgcacgaggaaacaaggcttcaaaaggatcaataattatgtaaacccaaggcttgtgggtggcagagatccggccggaattcagactcacacctgtgtctctccaaagtccgagggccatccccacacaacaggcttctctcagggttcctaggactgattctgtagtttattgtgggccatgcttttcatttctctccttctctgccctactggctgctctcacagctgttagcacctctgccagggggtgggctggagaacaaaaacaggggctgtgtgggattctttctagcccagcacccagtgcactgccgcccagcatgcattagatagataccagttcgtacgtaaggaacagaacttctctctccagctcgctgcagccgcagagcccctctgccctcccatgctgagttctctcctaagtccaagctgccggctcctatcttcttagcactgtcccgccctccaagcctcccactgtggaaaggcacatccccagctgaaagcaagtacctgaggtggaaaagggtgtccccgaccaaaagaaggttagctatgattttcccagtgttcttgccacccagggaaatggagagcacagatcgagtgtgattgagcttacacctctccaagaggcaacaacagcaagccatggaggcgtttttcctcccaccctctttgatgggatgatagactgccccctggtggcggcgcagagcagctcctcctccaaagccttctgcttccacagcccctgggggccacttctgcagtgctgcctcctccggaggtgccccaccgtggttaggagcagagtgttggggtgatggccatggaagcagtggccatgcagcctgagccatggcagaaccccagagtgcacccacaacaaaagtgaatccactttgcaccgcagcttccctctgccctcagcacatgctctccccataaagccccctgcatccgtggtttctgaaacgtttggctccacctgtactggctgcctccctgccctgagatatttgcacctttcccccctgggcacacatgcactctcatttccaatcctccttcgattccttggcctgtaaaatcccaggcttctgttggctgtctgcctgtaactctaaccatctcaccttcgcattgaagtgtcactggctgtcttgaaccattatttagtggtcctaccttatgcccccagctggacataagctatttaaaggcaggggcgatgtatgacatgctttgtatcaactgcagcacctttcacatggcaggggctcaaaaaatatttgttaagtgggtgaaaagc

SEQ ID NO: 14498 - protein, 101 aa, Homo sapiens [sequence omitted]

SEQ ID NO: 14499 - DNA, 2064 bp, Homo sapiens
  CDS (80)..(1468)
gctaaagagcgcgggtcctcggccgtggagggtcaagtggcttcttctgagcgctgagggaggggagcgtgcgtaggggatggtgccagcgctgcgttatttggttggtgcctgcggacgggcccgcgggcttttcgccggtggctcccctggggcgtgcgggttcgcgtctgggaggccaagaccgctgtgtggaggtagccgcagcgccagcaccagctcatttgatatagtcatcgttggtggcggaattgtggggcttgcctctgccagagcactcatcctgcgacatccatcactttctattggtgttctggaaaaggagaaagatttagctgttcaccagactggacataacagtggtgtcatacatagtggaatttattataaacctgagtctctgaaagccaaattatgtgtacaaggtgcagccctcctctatgagtactgtcagcaaaaggggatttcctacaagcagtgtggcaagcttatagtagctgttgaacaagaagaaattcccagacttcaggccctatatgagaaaggcctccagaatggtgtcccgggcctgaggctgatccagcaggaggatataaaaaagaaggagccatattgtaggggtctaatggctattgattgtccacatactggcattgtggactatcggcaggtggctttgtcatttgcccaggatttccaagaagcaggtggctctgtcttgaccaattttgaagtaaaaggtattgaaatggctaaagaaagtccttcaagaagtatagatggaatgcaatatccaattgttataaagaatacaaagggagaggaaattcgatgtcagtatgttgtgacatgtgcaggactttactcagaccgtatttcagagttgagtggctgcactcctgatcctcgaattgtaccattccggggagattacctgcttttgaagccagaaaaatgttatcttgtaaaaggaaatatttatccggtcccagatagccggtttcctttcctaggagttcacttcacaccaaggatggatggcagtatttggctagggcctaatgcagttcttgcctttaaacgagagggttacagaccctttgacttcagtgccacagatgttatggatataattatcaatagtggcttgattaaactggcatcccagaatttttcctatggagttactgaaatgtataaagcatgttttcttggtgcaacagtgaagtatcttcaaaaattcatccctgaaattactatcagtgatatacttaggggcccagctggagtaagagcccaggccctggatagagatggaaatctggtagaagattttgtatttgatgcaggagttggggatattggaaatcgcattcttcatgtgagaaatgcaccttctcctgctgctacttcttccattgcaatttctggaatgattgcagatgaagtacaacaaagatttgaattataaataatgaaaggagctaggtatgcactgtaatcttcatgtcagcaacaagaatgtactaattgcattctttaatttaaaaaatggtttttaaactttcgtttttaggtcaaagataaccactgcattgttaaaatgatgtaacatagaaataataattttctacaaaaattagccaggcatggtggcgcatgcctgtaatctcagctactcaggaggctgaggcaggagaatcaattgaaccgagcagacggaggtgagctgagagctgagattgcaccactgcactccagcctgggtgacagagcaagaaaataataataataataattttcaaaatgttaggctgggggccgtggccagcactttgggaagccaaggcaggtagattgtagcccaggagtttgagaacagcctgggcaacatggcaaaaccctgtttctacacaaagttagctgggtctggtgcctctgtggttccagctcctcagtaggctgaggtgagaggatcacttgagcccaggaggtctaggctgcagtgagcttatgttcatgactctgtattccaggctggatgatagagcaagatcttgtctc

SEQ ID NO: 14500 - protein, 463 aa, Homo sapiens
MVPALRYLVGACGRARGLFAGGSPGACGFASGRPRPLCGGSRSASTSSFDIVIVGGGIVGLASARALILRHPSLSIGVLEKEKDLAVHQTGHNSGVIHSGIYYKPESLKAKLCVQGAALLYEYCQQKGISYKQCGKLIVAVEQEEIPRLQALYEKGLQNGVPGLRLIQQEDIKKKEPYCRGLMAIDCPHTGIVDYRQVALSFAQDFQEAGGSVLTNFEVKGIEMAKESPSRSIDGMQYPIVIKNTKGEEIRCQYVVTCAGLYSDRISELSGCTPDPRIVPFRGDYLLLKPEKCYLVKGNIYPVPDSRFPFLGVHFTPRMDGSIWLGPNAVLAFKREGYRPFDFSATDVMDIIINSGLIKLASQNFSYGVTEMYKACFLGATVKYLQKFIPEITISDILRGPAGVRAQALDRDGNLVEDFVFDAGVGDIGNRILHVRNAPSPAATSSIAISGMIADEVQQRFEL

SEQ ID NO: 14501 - DNA, 2355 bp, Homo sapiens
  CDS (392)..(1078)
agctgtgttttattgcacacctaaatcctgattataggcttttcatttctccgcaaagcctttattttggcagttaagccaaatgtgttttccagaaagttagttattttctcctctttctttcctttctttcctccctttttcccgtctgaccccaaacgttattgtccaaacatgactggacagcagcttttgtttcttgaccctgtaatatgacagtctgctaatattgacagaaggtgcagtttttgggttatagtcgtgattttcgctaatcaatcatattagcaggaaaaaaaatgacttgtttctgttgtacttgagtcttaagaaaaagtgcccatagtttagtgacaatttccaaaggctttagtaccacctgtatttcaaaatgggggacccaaactcccggaagaaacaagctctgaacagactacgtgctcagcttagaaagaaaaaagaatctctagctgaccagtttgacttcaagatgtatattgcctttgtattcaaggagaagaagaaaaagtcagcactttttgaagtgtctgaggttataccagtcatgacaaataattatgaagaaaatatcctgaaaggtgtgcgagattccagctattccttggaaagttccctagagcttttacagaaggatgtggtacagctccatgctcctcgatatcagtctatgagaagggatgtaattggctgtactcaggagatggatttcattctttggcctcggaatgatattgaaaaaatcgtctgtctcctgttttctaggtggaaagaatctgatgagccttttaggcctgttcaggccaaatttgagtttcatcatggtgactatgaaaaacagtttctgcatgtactgagccgcaaggacaagactggaatcgttgtcaacaatcctaaccagtcagtgtttctcttcattgacagacagcacttgcagactccaaaaaacaaagctacaatcttcaagttatgcagcatctgcctctacctgccacaggaacagctcacccactgggcagttggcaccatagaggatcacctccgtccttatatgccagagtagagtactgaccagcaaaatggagaagatcagagaatgcagcagcagttttttttcttgttttcttaccactttattctttcagagtttaaagaaaatggactcatgcacagaacactatgcattttgaaacttgttcatcctggatttttttaaatcatttttatctcagaacttaaacaaaaattagatgtcgtgcacggactgtgtgaaagaagatgctttgcatatttgctgcactgcatcagtatcttactaaaaatgtgaaatgaaaggactattgtacactgaaatgcttaaatgtatctgaaagcacaaggtgatactcatttttatggtcttcccatttgtgctggtttttgcctctttgacatctgtcatcagtatttagagggtgagaagtgaatgtaacaggtataaataacatttttaaaaacaataactttgctataatcacagttgttccagagcactgtcagatacattctaatgaccagaactggtttaaaaaaagaaaatacaaccatgggaaagaaatcttaaatgaaaaacgcatctcattgtaggcatttttgcctcatattttactgggccatgtttgtttcctggtactcatgtatttttttttttccagatctctttccccaagttgctattgtaagagtattctgctgcgtgtggatgcagttatacacattaaagcagatctggagtctgaagtagctataaagcagctataaaacagaaatacatgcatagctgcagaaaccatgataggtagaggacttttcttttggttttgttttgttttgttttgttttgtttttggttttacagagaagagatttttattacaaagaaaaaaattccagtgaattgtgcagaaatgctggtttttacaccatcctaaagaaaaactttacaagggtgttttggagtagaaaaaaggttataaagttggaatcttaaattgtaaaattaaccattgagtgtcaaagttctaaaagcagaactcattttgtgcaatgaacataaggaaagactactgtataggttttttttttttttctccttttaaatgaagaaaagctttgcttaagggttgcatacttttattggagtaaatctgaatgatcctactcctttggagtaaaactagtgcttaccagtttccaattgtatttagcttctggttggaatttgaaaaaaaaaagaaaaaaagaaaaagaaaacctaaataaaataggtgaaagttccctgactattcaggtgaatac

SEQ ID NO: 14502 - protein, 229 aa, Homo sapiens
MGDPNSRKKQALNRLRAQLRKKKESLADQFDFKMYIAFVFKEKKKKSALFEVSEVIPVMTNNYEENILKGVRDSSYSLESSLELLQKDVVQLHAPRYQSMRRDVIGCTQEMDFILWPRNDIEKIVCLLFSRWKESDEPFRPVQAKFEFHHGDYEKQFLHVLSRKDKTGIVVNNPNQSVFLFIDRQHLQTPKNKATIFKLCSICLYLPQEQLTHWAVGTIEDHLRPYMPE

SEQ ID NO: 14503 - DNA, 2667 bp, Homo sapiens
cttagcctatgctggctacatcccttatccgaaggaggaactccctttaaggagcagccccagccctgctaacagcactgctggtaccattgacagcgacagctgggacgcgggtttctcagacatcgcgtcctcagtgcccttgccagtctctgaccgctgctttagccacctgcagcctactctcttgcagcgagccaagcccagtaacttcctgctggacagaaagaaaacggacaagctgaagaagaagaagaagaggaagcgcagggacagtgatgcgcctgggaaagaggggtacagggggggcttgctgaagctggaagccgctgacccctacgtggagacccccacgagtcccaccttgcaggatatcccccaggctcccagcgacccctgctcgggctgggactccgatactccctcgagtggatcttgtgccactgtgtcacctgatcaggtcaaagaaataaaaactgaaggcaaacggactatcgtccggcagggaaagcaggtggtgttccgagatgaggacagcactggcaatgatgaggacatcatggtggactcagatgacgattcctgggacctcgtgacctgcttctgcatgaagccatttgccggccgccccatgatcgagtgtaatgagtgccacacctggattcacctgtcctgtgcgaaaatccggaaatccaatgttccagaagtgtttgtctgccaaaagtgccgggactccaagtttgacatccgccgttccaaccgctcgcggacgggctcccggaagctgttcctggactgactgctggctggcgagtaggctgcgagcgtggaatcggaagcgaccgtgggcttttttgcccttctcttagttgagcacagaaccctcagctctggtgcgggcagatccctgccatttaggtgcctaagcaaaaggacaggctgtccaaggtagaaactgtacatagccggtgaccgaatgcgacctttgccagccagagctgctgccagagctgcgttccctgcagtggaggtggactggacacccacgtgcagcgggtttggctcatttgaaaatgagggtccgtggtagctgtgcgttttgctatcattgctaagagattcccgctgattgggctcagtgccagctgttattctgcttccactgtgttggggagaggtgttcggtttccccagcctgttaatgaacagccatacgtgtaagctttttcttgagtgttaagtcttttaccaaaagtgtctgtacagcagccatccaagttgcccctacttagtggcttgccctctgcctgcctcagctgctgcctgaccggctgggggaggcactggcgggaggcctcgggctcccctggaagggcgctgggctggcgggtcagctggtggttcttaggtttccttctgtttgttaaaagggacaatgtggccacttctctgtggaaagggagttggttggggggttgagatggcccgtgttcataactcagtttcctgttttgcacgatgtaaaaaccctgtctttttgcacgatacagccaaaagtattggctgatttcttgctgagtgccctcttagttggtgtgtgaggtcttggtgggctcaggccagctgtttgcgagtgtgggaactcataggttctgtctttgtctcttcctttcacctcattctggtagcagcataaaggttaggcaatcactgggacccgcatggtgttcctccaaagaatagggtaaaggagagctgggagggagccctctccgttgggtgactcttgtgtgccctttagacaggctggcctgccggttccacagggtacagttaggacttgagtctttctttttctgttttgagttggtgagtgagtgatagggtaacatgggccttcaggatgaccccttggaactgtgccgagttccttaaatctcagctgggatcctggacctgggaggcccctgtgagggccagctctggaaaaacctgggagttgatgccggaggctgtggaagaactctgctcgagggcagggtgccctggaacactggtagttctggggctgggagggagaggggctccggctttctctgaaatgaacactgctcttcagcagttcaagtacttgttctcaaaacattttctaattgattggtaggttttcataagcattgtttctttaaggcatggaaagggaagaatgctcaagcaagtcatgtttgttttcagtgggatgggcccgcgttctcactgctgggggcttccccttcatgtggcacctttgtgccaggccaccaggcagactcttcccaccttctcccactgaagcaccaagaggcttgaaccgtaatttggctaatcagaggcattttttttgtcctagtatctttcacacttgtccaaccgtcttatttttttaaaagttctgttgcttgtattaacacgaaactagagagaaatagtttctgaagccagtttattgtgaagatccccaagggggaggttcggtagagaaaaatagtaagctggtttagaaactgacgagggcaaacagccaggacgcattggagaggaatttgccaaagatctaccctgagataacgcctgtccagtgtcttcaccacgtgaataaccagcgctccaaagtgtttttctgctttg

SEQ ID NO: 14504 - DNA, 2399 bp, Homo sapiens
  CDS (291)..(1073)
cacatttttgcccaaatgttaaacttaaagctcagacatatgaactccaggaaagtaatgttcaattgaaattgaccattgtgaatacagtgggatttggtgaccaaataaataaagaagagagctaccaaccaatagttgactacatagatgctcagtttgaggcctatctccaagaagaactgaagattaagcgttctctctttacctaccatgattctcgcatccatgtgtgtctctacttcatttcaccgacaggccactctctgaagacacttgatctcttaaccatgaagaaccttgacagcaaggtaaacattataccagtgattgccaaagcagatacggtttctaaaactgaattacagaagtttaagatcaagctcatgagtgaattggtcagcaatggcgtccagatataccagttcccaacggatgatgacactattgctaaggtcaacgctgcaatgaatggacagttgccgtttgctgttgtgggaagtatggatgaggtaaaagtcggaaacaagatggtcaaagctcgccagtacccttggggtgttgtacaagtggaaaatgaaaaccactgtgactttgtaaagctgcgggaaatgctcatttgtacaaatatggaggacctgcgagagcagacccataccaggcactatgagctttacaggcgctgcaaactggaggaaatgggctttacagatgtgggcccagaaaacaagccagtcagtgttcaagagacctatgaagccaaaagacatgagttccatggtgaacgtcagaggaaggaagaagaaatgaaacagatgtttgtgcagcgagtaaaggagaaagaagccatattgaaagaagctgagagagagctacaggccaaatttgagcaccttaagagacttcaccaagaagagagaatgaagcttgaagaaaagagaagacttttggaagaagaaataattgctttctctaaaaagaaagctacctccgagatatttcacagccagtcctttctggcaacaggcagcaacctgaggaaggacaaggaccgtaagaactccaattttttgtaaaacagaagttccagagcacagaaggtcatcatcacaagcaaactttattaaaaaaaaactagaagtgtgctttgattttgctgttatttgttttatcacttctatatttggtgaacagccacagttactgatatttatggaaaagtactttcaagtacaaggtcaatacataagccagagtgaatgatactacaagttgagcatctctaattcaaaaatctgaaatccagaagcttcaaaatctgaatctttttgagcactgacttgaccccacaagtggaaaattccccacccgacacctttgctttctgatggttcagtttaaacagattttgtttcttgcacaaaatttttgtataaattactttcaggctatatgtataaggtggatgtgaaacatgaattatgtaattagagtcgggtcccgttgtgtatatgcaggtattccaaacctgaaatccaaaacacttctggtccctagcattttggataagggatactcagcttgtacctatatattcatatatattcactgttgttagaaatgtttaagttgctgttctgtgatgaatctaaatcttttctcttgctaccaagctattgtcactgcagtgcattataccaaagagcgaagtcagtgccactgaaaatacagaacccattaatatcgtggctatctgattacatttatattccaagatgaaccttttttatatatgctaaaaattttggggaatatgttttgggatgtattatggagctaaaactctaacctcttaatagttttatagaacttaaaaattttttatacaattacccaattggtgatatgatcttaagcttttgtgtcagattatttaatatgatgacttcatgctttattatgccttattatggctgacgtattactgtggtgaaacaaaatatctttaaaagttaaaacatccagatatataagctattttttcctaaggataaagtacctttgagcatgagtgtatcacagctttcattaggaaaacttttcattacatacttgtttaaactctgtcttccagggtaaaaataataaggttgaatcattttattaaaaatactttttaagaaaataactatgaacatctgaatattaaagatataaaaatgcacataattcatatttcaggtggtatttgcattcagtgccttactggtattctcagaacattttaatgatttctaacatttcttaacagtcatagatatatacattttcattttttgtacttgaatattctaaataaaactgacatttactcttgacaaataaaacatatatttact

SEQ ID NO: 14505 - protein, 261 aa, Homo sapiens
MKNLDSKVNIIPVIAKADTVSKTELQKFKIKLMSELVSNGVQIYQFPTDDDTIAKVNAAMNGQLPFAVVGSMDEVKVGNKMVKARQYPWGVVQVENENHCDFVKLREMLICTNMEDLREQTHTRHYELYRRCKLEEMGFTDVGPENKPVSVQETYEAKRHEFHGERQRKEEEMKQMFVQRVKEKEAILKEAERELQAKFEHLKRLHQEERMKLEEKRRLLEEEIIAFSKKKATSEIFHSQSFLATGSNLRKDKDRKNSNFL

SEQ ID NO: 14506 - DNA, 1701 bp, Homo sapiens
  CDS (67)..(1701)
aattttcctcaagaggtgaaagatcttctctcctgcaatcataccgtattggatccagatctgcgaatgacattttgcaaagctttgatcttgctgagaaataagaatctcatcaatccatcaagcctgctagaactcttctttgaactttttcgttgccatgataaacttctgcgaaagactttatacacacatattgtgacggatatcaagaatataaatgcaaaacacaagaacaataaagtgaatgtagtattgcaaaatttcatgtacaccatgttaagagatagcaatgcaaccgcagccaagatgtctttagatgtaatgattgaactctacagaaggaacatctggaatgatgcaaaaactgtcaatgttatcacaactgcatgtttctctaaggtcaccaagatattagttgccgctttgacattctttcttgggaaagatgaagatgaaaaacaggacagtgactccgaatctgaggatgatggaccaacagcaagagacctgctagtacaatatgctacagggaagaaaagttccaaaaacaagaaaaagttggaaaaggcaatgaaagtgctcaagaaacaaaaaaagaagaaaaaaccagaggtgtttaacttttcagccattcacttgattcatgatccccaagattttgcggaaaaactactaaagcagcttgagtgctgtaaggagaggtttgaagtgaagatgatgctcatgaaccttatctccagattggtgggaattcatgagcttttcctcttcaatttctatccctttttgcaaaggtttctgcagccccaccaaagagaagtaaccaagatccttctgtttgctgcacaagcatctcatcacctagtacccccagagattattcaatcattgcttatgactgtggcaaacaattttgttaccgacaagaactctggagaagtcatgacagtaggaatcaatgctataaaggagataacagctcgatgtcctctggccatgactgaagaacttctccaagacctggctcagtataaaacacacaaggataagaatgtaatgatgtctgctagaactttgattcacctcttccgaacactgaatcctcagatgctgcagaagaaattccggggtaagcctacagaggcctccatagaagcaagagtacaagaatatggagaattagatgctaaagattacattccaggagcagaagttctggaagttgagaaagaagagaatgctgaaaatgatgaagatggatgggaaagtaccagtctcagtgaggaggaggatgctgatggtgaatggattgatgtgcaacactcttccgatgaagaacagcaagaaatctccaagaagctgaacagcatgcccatggaggagcggaaggccaaagctgcagccatcagcactagccgagtcttaactcaggaagacttccagaaaatccgcatggcccaaatgagaaaagaacttgatgctgcccccgggaaatgccagaagaggaaatacattgaaatagacagtgatgaagagcccaggggtgaattactttctcttcgggacattgaacgccttcataaaaagccaaagtctgacaaagagacaagactagcaacttcaatggctggaaagacagaccgaaaagaatttgtgaggaagaaaaccaaaacaaatccattttccagttcgacaaat

SEQ ID NO: 14507 - protein, 545 aa, Homo sapiens
MTFCKALILLRNKNLINPSSLLELFFELFRCHDKLLRKTLYTHIVTDIKNINAKHKNNKVNVVLQNFMYTMLRDSNATAAKMSLDVMIELYRRNIWNDAKTVNVITTACFSKVTKILVAALTFFLGKDEDEKQDSDSESEDDGPTARDLLVQYATGKKSSKNKKKLEKAMKVLKKQKKKKKPEVFNFSAIHLIHDPQDFAEKLLKQLECCKERFEVKMMLMNLISRLVGIHELFLFNFYPFLQRFLQPHQREVTKILLFAAQASHHLVPPEIIQSLLMTVANNFVTDKNSGEVMTVGINAIKEITARCPLAMTEELLQDLAQYKTHKDKNVMMSARTLIHLFRTLNPQMLQKKFRGKPTEASIEARVQEYGELDAKDYIPGAEVLEVEKEENAENDEDGWESTSLSEEEDADGEWIDVQHSSDEEQQEISKKLNSMPMEERKAKAAAISTSRVLTQEDFQKIRMAQMRKELDAAPGKCQKRKYIEIDSDEEPRGELLSLRDIERLHKKPKSDKETRLATSMAGKTDRKEFVRKKTKTNPFSSSTN

SEQ ID NO: 14508 - DNA, 1922 bp, Homo sapiens
  CDS (1302)..(1757)
tcagccttgacctcagttggaccaacatctctaaaaagcaactgacatggctcgtcaataggctgccaggactgaaagacctcctcctagcaggctgctcctggtctgcagtctctgccctcagcacctccagctgcccccttctcaggacccttgatcttcggtgggcagtaggaatcaaggaccctcaaattcgggacttgcttactccaccggctgataaaccaggtcaggacaatcgcagcaagctccggaacatgaccgacttccggctggcaggccttgacatcacagatgccacgcttcgcctcataattcgccacatgcccctcctgtctcgactcgacctcagtcactgcagccaccttacagatcagtcctccaatctactcactgctgtcgggtcttccactcgctactctctcacagagctcaatatggcaggttgcaataaattgacagaccagaccctgatctacctacggcgcattgccaacgtcaccttgatcgaccttcgaggatgcaagcagatcactcgaaaagcctgcgagcacttcatctcagacttgtccatcaacagcctctactgcctgtctgacgagaagctgatacagaagatcagctaagacacacccagcccagattcaacaggaaaccgatcttcccctgactccccaccgaggagagcctctcctcgaccctgcacgggctctgaggccagcgtcacactccctctctgctctcctgtcccttgagcccttcctctacaggtggggcagagagggtggtggacaccaggcttatctgcctgctcctctccctcctaaggaaaagggagtagcagattgatctgaggggaaagcacaggctgtgctgtcgaggcgcctgctcgcttactcgcctgccaggaggccgggctctcagtttggggtgtttgtgcaaccttcatctgcactgggccctgtgcccctcctccccatccatggtccccagcagtgcctggttctgagcaaactcccagggaagaaaacggccctgtctccatggccaggttcttgtggtgtccagtgcgcgtctctcctccatcacactctcccggcttgcgcaggaggggccagcagccccaggagtcccagacccgtgccgatcacactggtgctgttgagatctcccaaacctcacgtccttaactgtgctctccctcctttcctctcccttgagcttggttctgcccagcactcgtgcttgttcacataattaggtttcccaccccagcctacccgacttacttgctagtctctatgaggtccttattgcacttattggggttgaagctcttcagaggagctggaactgtctaccccagggacacacccatttcgttgctacccaagtggattctgagacaggcaccatctccttgttccccctctctcttttgcctcccactgactgcccttttccatgtgtcttcattctgcctgaagaaggctttcccaggatgcacgtcctcagagggagcagcctatctcccccaagctggaggcggcagaggactgggccaagccccaacctgcctcccagccaggctcctccaggcctctggtttagcggagccccctgagcccaggcctgtgtctagccccagtggctcactgaactttcagggcagtcagggggtcctgcttagaagccagtcaccagccctctgcctgcagccatggaagggggtgtgcacgtgcctctgtgtgtgtggctgagtgtattctgcgcgtgtgtgtggagggagggagggaggggagcatggtgtctcccgctccaccgccctttgttgagccccatcagctgcccccttttactttgcattgaacggcctgtccaaagatcctctctctagggcagcagagagctttttgcacttt

SEQ ID NO: 14509 - protein, 152 aa, Homo sapiens
MRSLLHLLGLKLFRGAGTVYPRDTPISLLPKWILRQAPSPCSPSLFCLPLTALFHVSSFCLKKAFPGCTSSEGAAYLPQAGGGRGLGQAPTCLPARLLQASGLAEPPEPRPVSSPSGSLNFQGSQGVLLRSQSPALCLQPWKGVCTCLCVCG

SEQ ID NO: 14510 - DNA, 2048 bp, Homo sapiens
  CDS (122)..(817)
acctgtcgccatccccggctccctgcccagagcaccatcgctacactcgccatcctctgcgtccacctcgccgctcggttcgctgtcccagcccctcccagggccggtgggctcctcagccatgacgcctccccagcagccgccacccctgcgttcagagccgggcacactgggctctgcagcctcatcctacagccccctaggtttgaacggtgtccccgggagcatctgggactttgtttccggcagcttctcccccagcccctcccccgtcctgagtgccggccccccatcctcttcgagtgcaagtccaaacggagctgagctggcccgggtcaggcggcagctggacgaggccaagaggaagatccggcagtgggaggagtcctggcagcaggtgaagcaggtctgcgatgcctggcagcgagaggcgcaggaggccaaggagcgtgcccgtgtggccgatagcgaccggcagctggcgctgcagaagaaggaggaggtggaggcacaggtgaagcagctgcaggaggagctggagggcctgggcgtagcctccacactgccggggctgcggggctgtggggacatcggcaccattcccctgccgaagctgcactcgctgcagagtcagctgcgcctggacctggaggcggtggacggcgtgatcttccagctccgcgccaagcagtgtgtggcctgccgggagcgggcccacggtgctgtcctgcggccctgtcagcaccacatcctctgtgagccgtgtgcggccaccgcacctgagtgcccctactgcaagggccagcccctgcagtggtgacctcagcggggacagccacctcctgctgggcaccctggctccagcgctcctcctgaccacggacatgtcgtcactcgcttctggtgccaccgacgtgaggaccgaggctgggagcccttcctgttacacgttatcatgaggctgggagccccgcctgcgcttggcctgacagcctttcctgtcacacgttgtcacctatctagtcctaccgacggtttcaaggtattttcctcaaaaaccttaaatgcaaacccacagaacccgcctgcctgtccctgaggggcctggtgcctccgggatccacgcggcgctgtgatcacagcagtttgtggtcctgacactactgtgactaggccactgggagctggggtctttcaaagcactttgtaaaccgaggaatttagttagaggttataaattgctctaagctgctttctgtttttttttaatatgcgataatatgaagctttatatgtgtactgtgaacttaaatatttcatatcagtttattgtcaattcatagtatgctaaatatattagatttcatattctgaaactagtacttatgaaatgagtgtttatctagtagtaagacctaggatttttacattttccaattaagtgcaaatagtatttataagcagagtgattatggattgagatgtttttaacttgatggaaggagctagttttcctgagcctgtgtgtgcaccaggcactggggctgatgttccagcctcgtggcgtgggagcaggagagctccgtcctgcatttctgtggtccgtggccgctgtttctgtgcgcctgcgcctcggagagcaagtgaaggagcatcatgggttttgttttctcccttaaccctctgaaagacagtttgatactaacaaaaaacgcagcagaggggatccaacgtcagagcttttagaattacttttttaagcagctgtcttctggctgggtgcggtggctcatgcctgtgatcccagcactttgggaggcgggtggatcacctaaggtcaggagttcaagaccagcctggccaacatggtgcaaccccgtcttagtaaaaatacaaaaattggcctggcgtgagagcgggcacctgtagtcccagctactcgggaggctgaggcaggagaatcgcttgaacctgggaggcagaggttgcagtgagccgagatcgcgccaccgcactccagcccgggtgacagagcgagactctggctc

SEQ ID NO: 14511 - protein, 232 aa, Homo sapiens [sequence omitted]

SEQ ID NO: 14512 - DNA, 2304 bp, Homo sapiens
aaaaagcctgtttggtggtctcttcacacggacgcgcatgaaatttggtgccatgactcggatcgggggacctcccttgggagatcaatcccctgtcttcctgttctttgctccgtgagaaagatccacctacaacctcaggtcctcagaccgaccagcccaaggaacatctcaccaattttaaatcagctccaggagaatgggtgacttgaactggcaaggagcaacctgctctctccacgggcctctggaaccccggcaagagaagatcccttgatcaccatggacactcaagttggcaagaagagctccttagagaagtcgtgggagggcaagcaagctgatgtggagccaggacgatttgatgtgggagcacctgcagtggagcacagccagggagagccatctccccaggcctgacttgctcccataggagactttagccctaggggaactgtccatcctgatctctgcagggtggtcttgtccatcagacagggctgattcgacctgagcaccccttggtctgctggcctttctggggtcccagcctggccagacctgcttgcagggcagtcttgggtgccctggaggccacgccatagcttctgtgctggcagatagtatctgactggtggagagctccagcaaggctgcccctaggccacacaccagcccatccaccccctccccacactgcagcttccctaggcccaggaaactcctcacgtgtctttgctggcacaagtctgcacaggtaggttttgccttccttgccctgccagtgcatgggagtgtagtctgcccccctgccccgtctggctgtcattgaagacagagccttggtgggcacagagcaagccagctcccccgcaacgcccacctcaacacctggcccttgtgctaacactgtgcagagaacagtggaccctgctcgcaccctgagtgatcactcctgcttgtggggcacagagaaggtgtccagacctgctcacgccagtgccctgcccccaagccaacaccacatccaacaggagcctgcacccagtcttcagcatagaggtgaaagatctctacgaggagaactatgaaacactgctcaaaataatcaaatatgatacaagcaaatggaagagcatgcaatgctcatggataggaagaatcaatatcataaaaatggccatactgcccaaagcaatttatagattcaatgctattcctattaaactaccattgatattcttcacaaaactagagaaaactattttaaagttcatatggaaccaaaaaagagcctgaatagccaaggaaatcctaagcaaaaagaacaaagctggaagcatcatgctacccaacttcaaactatactacaggactacagtaaccaaaacagcgtggtactggtacaaaaacagacacatagaccaatgaaacagaatagagaacccagaaatggttctctatttcacacacctacaactatctgatcttcgacaaacctgataaaaacaagcaatagggaaatgattctgtattcattaaatgatgctggaataactggctagccatatgctgaagattaaaactggaccccttccttatactgtacacaaaaatcaactcaagatggatgaaagacttaaatgtaaaacccaaaactataacaacaatagaagacaacctaggcaataccatcttggatataggaacaggcaaacatttcatgacaaagacaccaaaagcaattgaaacaaaagcaaaaattgaaaagtgggttctaaataaaactaaagagctcctgcacagcaaagaaaatacaaacagagtgaacagacaactacagaatgacagtatctgcaaactatacatccaacaaagatctaatattcagcatctataagaaacttaaacaaatttccaaaaacaaccccattaaaaagtgggcaaagcatatgaacagacacttttcaaaagaagacatacatgcagccaacaaacatgaaaaaggctcaacaccaccaatcattagagaaatgcaaatcaaaaccacaatgagataccatctcacactagtcagaatggctgatggctgttattaaaaagtcaaaaaataacagatgctggcaaggttgtggagaaaaggcaatgcttatgcactgttggtgggagtataaattagttcaatcattgtggttgacagtgtggtgattcctcaaagatctgaaaacagaaatataattctacctagcaatgctactactgggtatatacccaaagaaaaataaattgttcaattataaagac

SEQ ID NO: 14513 - DNA, 2720 bp, Homo sapiens
  CDS (3)..(1916)
tcatggaatacgcgagtgggggtgaagtatttgattacttagttgcccatggaagaatgaaagagaaagaggcccgtgcaaaatttaggcagattgtatctgctgtacagtattgtcatcaaaagtacattgttcaccgtgatcttaaggctgaaaaccttctccttgatggtgatatgaatattaaaattgctgactttggttttagtaatgaatttacagttgggaacaaattggacacattttgtggaagcccaccctatgctgctcccgagcttttccaaggaaagaagtatgatggtcctgaagtggatgtgtggagtctgggcgtcattctctatacattagtcagtggctccttgcctttcgatggccagaatttaaaggaactgcgagagcgagttttacgagggaagtaccgtattcccttctatatgtccacagactgtgaaaatcttctgaagaaattattagtcctgaatccaataaagagaggcagcttggaacaaataatgaaagatcgatggatgaatgttggtcatgaagaggaagaactaaagccatatactgagcctgatccggatttcaatgacacaaaaagaatagacattatggtcaccatgggctttgcacgagatgaaataaatgatgccttaataaatcagaagtatgatgaagttatggctacttatattcttctaggtagaaaaccacctgaatttgaaggtggtgaatcgttatccagtggaaacttgtgtcagaggtcccggcccagtagtgacttaaacaacagcactcttcagtcccctgctcacctgaaggtccagagaagtatctcagcaaatcagaagcagcggcgtttcagtgatcatgctggtccatccattcctcctgctgtatcatataccaaaagacctcaggctaacagtgtggaaagtgaacagaaagaggagtgggacaaagatgtggctcgaaaacttggcagcacaacagttggatcaaaaagcgagatgactgcaagccctcttgtagggccagagaggaaaaaatcttcaactattccaagtaacaatgtgtattctggaggtagcatggcaagaaggaatacatatgtctgtgaaaggaccacagatcgatacgtagcattgcagaatggaaaaaacagcagccttacggagatgtctgtgagtagcatatcttctgcaggctcttctgtggcctctgctgccccctcagcacgaccccgccaccagaagtccatgtccacttctggtcatcctattaaagtcacactgccaaccattaaagacggctctgaagcttaccggcctggtacaacccagagagtgcctgctgcttccccatctgctcacagtattagtactgcgactccagaccggacccgttttccccgagggagctcaagccgaagcactttccatggtgaacagctccgggagcgacgcagcgttgcttataatgggccacctgcttcaccatcccatgaaacgggtgcatttgcacatgccagaaggggaacgtcaactggtataataagcaaaatcacatccaaatttgttcgcagaagtacatcaggggaaccaaaagaaagagacaaggaagagggtaaagattctaagccgcgttctttgcggttcacatggagtatgaagaccactagttcaatggaccctaatgacatgatgagagaaatccgaaaagtgttagatgcaaataactgtgattatgagcaaaaagagagatttttgcttttctgtgtccatggagacgctagacaggatagcctcgtgcagtgggagatggaagtctgcaagttgcacgactgtcacttaatggggttcgcttcaagcgaatatctgggacatctattgcctttaagaacattgcatcaaaaatagcaaatgagcttaagctgtaaagaagtccaaatttacaggttcagggaagatacatacatatatgaggtacagtttttgaatgtactggtaatgcctaatgtggtctgcctgtgaatctccccatgtagaatttgcccttaatgcaataaggttatacatagttatgaactgtaaaattaaagtcagtatgaactataataaatatctgtagcttaaaaagtaggttcacatgtacaggtaagtatattgtgtatttctgttcattttctgttcatagagttgtataataaaacatgattgcttaaaaacttgtatagttgtctagatttctgcacctgaatgtatgtttgatgctttgatttgaaaatgttcttccctgttatttacattccggtgggtttttaaaattcttacctccatcatgcaattttgaaaattgtgtccagaattaaaagtgcatagaaatagcctttacaattgtagcatggacctttaaaaattgttttaaaatcttatttaaatttaaaccagaagctgaaaaatagatcagctttattatacacaaaattattactgcttatctttgctcttttccttgttatcccgcaaggtttagttgagaagatacaaaatgtttacagtgttggcacttagagtttttaaattcaagtacatgaaattcagtaatagcattgccttgagctaactaggaagtaccgggaaaaaagttaaatctacatcaagtttcttttgaactttgaagtgttttctgacccactgctaactgtagcaacaaaattt

SEQ ID NO: 14514 - protein, 638 aa, Homo sapiens [sequence omitted]

SEQ ID NO: 14515 - DNA, 1952 bp, Homo sapiens
  CDS (75)..(1430)
ggtccacggaggtctatgagactcaggctggtgccttaataaatgtggagctagctctgaggagaggcctacaaatgaaatgtgtcttctgtcacaagacgggtgccactagtggatgccacagatttcgatgcaccaacatttatcacttcacttgcgccattaaagcacaatgcatgttttttaaggacaaaactatgctttgccccatgcacaaaccaaagggaattcatgagcaagaattaagttactttgcagtcttcaggagggtctatgttcagcgtgatgaggtgcgacagattgctagcatcgtgcaacgaggagaacgggaccatacctttcgcgtgggtagcctcatcttccacacaattggtcagctgcttccacagcagatgcaagcattccattctcctaaagcactcttccctgtgggctatgaagccagccggctgtactggagcactcgctatgccaataggcgctgccgctacctgtgctccattgaggagaaggatgggcgcccagtgtttgtcgtcaggattgtggaacaaggccatgaagacctggttctaagtgacatctcacctaaaggtgtctgggataagattttggagcctgtggcatgtgtgagaaaaaagtctgaaatgctccagcttttcccagcgtatttaaaaggagaggatctgtttggcctgaccgtctctgcagtggcacgcatagcggaatcacttcctggggttgaggcatgtgaaaattataccttccgatacggccgaaatcctctcatggaacttcctcttgccgttaaccccacaggttgtgcccgttctgaacctaaaatgagtgcccatgtcaagaggtttgtgttaaggcctcacaccttaaacagcaccagcacctcaaagtcatttcagagcacagtcactggagaactgaacgcaccttatagtaaacagtttgttcactccaagtcatcgcagtaccggaagatgaaaactgaatggaaatccaatgtgtatctggcacggtctcggattcaggggctgggcctgtatgctgctcgagacattgagaaacacaccatggtcattgagtacatcgggactatcattcgaaacgaagtagccaacaggaaagagaagctttatgagtctcagaaccgtggtgtgtacatgttccgcatggataacgaccatgtgattgacgcgacgctcacaggagggcccgcaaggtatatcaaccattcgtgtgcacctaattgtgtggctgaagtggtgacttttgagagaggacccaaaattatcatcagctccagtcggagaatccagaaaggagaagagctctgctatgactataagtttgactttgaagatgaccagcacaagattccgtgtcactgtggagctgtgaactgccggaagtggatgaactgaaatgcattccttgctagctcagcgggcggcttgtccctaggaagaggcgattcaacacaccattggaattttgcagacagaaagagatttttgttttctgttttatgactttttgaaaaagcttctgggagttctgatttcctcagtcctttaggttaaagcagcgccaggaggaagctgacagaagcagcgttcctgaagtggccgaggttaaacggaatcacagaatggtccagtacttttgcttttttttcttttccttttcctttttttttgtttgttttttgttttgtttttcccttgtgggtgggtttcattgttttggttttctagtctcactaaggagaaacttttactggggcaaagagccgatggctgccctgccccgggcaggggccttcctatgaatgtaagactgaaatcaccagcgagggggacagagagtgctggccacggccttattaaaaaggggcaggccctctaacttcaaaatgtttttaaataaagtagacaccactg

SEQ ID NO: 14516 - protein, 452 aa, Homo sapiens
MKCVFCHKTGATSGCHRFRCTNIYHFTCAIKAQCMFFKDKTMLCPMHKPKGIHEQELSYFAVFRRVYVQRDEVRQIASIVQRGERDHTFRVGSLIFHTIGQLLPQQMQAFHSPKALFPVGYEASRLYWSTRYANRRCRYLCSIEEKDGRPVFVVRIVEQGHEDLVLSDISPKGVWDKILEPVACVRKKSEMLQLFPAYLKGEDLFGLTVSAVARIAESLPGVEACENYTFRYGRNPLMELPLAVNPTGCARSEPKMSAHVKRFVLRPHTLNSTSTSKSFQSTVTGELNAPYSKQFVHSKSSQYRKMKTEWKSNVYLARSRIQGLGLYAARDIEKHTMVIEYIGTIIRNEVANRKEKLYESQNRGVYMFRMDNDHVIDATLTGGPARYINHSCAPNCVAEVVTFERGPKIIISSSRRIQKGEELCYDYKFDFEDDQHKIPCHCGAVNCRKWMN

SEQ ID NO: 14517 - DNA, 2376 bp, Homo sapiens
  CDS (414)..(2366)
aacagcctcaccctgcagcccccagcacctcagcccgtctttctttctcacggggttccacttcatcagtctgtgaatcctcctgtgttgcccttgagtcagccagtcggacctgtcaataagtctgttggaactagtgtcctccccataaatcagactgttcgccctggggttttacccctcacccagcctgtgggacccataaacagacctgttgggcctggtgttcttcctgtgagcccctctgtcacccctggggtcctgcaggctgtctcgccaggggtgctttctgtgagtcgggcggtcccgtctggagtccttcctgcaggccagatgactcctgcaggccagatgactcctgcaggggttatcctgggcaaacagcaacttctggggttcttcctactggccagatggtccagtcaggagttctccctgtgggccagacagctccgtcacgggttcttcccccaggccagacagccccattgagggttatctctgcaggccaggtggtcccatctgggcttctttctcccaaccagacagtctcctcctcagctgttgtgcctgtaaaccagggtgtgaattctggtgttctgcagcttagtcagcctgttgtgtcgggagttcttcctgtgggccagccagtgaggcctggggtcttgcaactcaaccagactgtgggcaccaacattctgcctgtgaatcagccagtgagacctggtgcttcgcagaacaccaccttcctgacatcaggctctattctcagacagctcatccctacagggaaacaagtgaatgggattccaacctacacgctggcccccgtgtctgtcactctgccggttccccctggaggccttgcgactgtcgctccgccccagatgcccatccagctcctgccgtcaggtgcagctgcaccaatggccggttccatgcccggcatgccctctcctccagtgctggtgaatgctgctcagagcgtgtttgttcaggcctcctcctctgcagcagacacaaaccaggtgctcaaacaggccaagcagtggaagacctgccctgtctgcaacgagctctttccgtccaacgtctaccaggtccacatggaggtagcgcataagcacagcgagtccaagtctggtgagaaacttgagcctgaaaaactggcagcgtgtgcaccatttctaaagtggatgagagagaaaacggtgcgatgtctgtcttgtaagtgcttggtccctgaggaagagcttatacaccacttgctgatgcatggcttggggtgcttgttctgtccatgcaccttccatgatatcaaaggtctttcagagcacagcaggaataggcacctggggaagaagaagttgcctatggattatagcaacagaggttttcaattagatgtcgatgccaatggcaacctgctctttccccaccttgatttcatcaccatattgccaaaggagaagcttggggagcgggaagtctacttggcaatcctggctgggatacactccaagtcactggtgcctgtgtatgtgaaggtgaggcctcaggctgagggcacccccgggagcaccggcaagcgagtgtccacctgccccttttgctttggcccctttgtgacaactgaggcctatgagctgcatttgaaggagaggcaccacatcatgcccacagtccacacggtcctgaagtctcccgccttcaagtgcatccactgctgtggggtctacacgggaaatatgaccctggctgccatcgccgtccatttggtgcgctgcagaagtgctcccaaggacagcagctcagacctgcaggcccagccgggttttattcacaacagtgaactgcttttagtcagtggtgaagtgatgcatgattccagtttttctgttaagagaaagctgcctgatggccacttaggggccgaagaccagcggcatggggaggagcagcctcccatcctaaatgccgatgcagccccgggtccagaaaaggtgacgagtgttgtgccttttaaaagacaaaggaatgaaagcagaacagagggacctattgtcaaggacgaggctcttcagattttagcattagatcctaaaaaatatgaaggccgttcttatgaagaaaagaagcaatttcttaaagattatttccataagaaaccatatcctagtaaaaaggaaatagaactgttgtcctcactcttttgggtgtggaaaattgatgtggcttcattttttggaaaaagaaggtatatttgcatgaaagcaataaaaaatcacaagccttctgtacttttaggctttgatatgtctgaacttaaaaatgtgaaacatagattgaactttgaatatgaaccataaaacttgc

SEQ ID NO: 14518 - protein, 651 aa, Homo sapiens [sequence omitted]

SEQ ID NO: 14519 - DNA, 2416 bp, Homo sapiens
  CDS (388)..(1083)
ctgtggtgtttttcccccgctcctctggctgccttcctgatggatctctgtggtcccaggcaggaatggcctgcttggggacccagcgagctcccaaggcctttcctgctgcttcctctatccctgtgttttgcttggctctctaaattgactcagctccaggacatcaggaccccaggttctctggtcttgggactctgagacttgcaccaggaatcctgcccaggctctcaggcctttggactcagactgagctacttcactggctttcctggttctccagcttgaagatggcagatcgtgggacttctcagcctccataattgagtgagccaattccctggccaaaaggtgtgttttgctgacttcaagcatccctgctacaaaatggcctacttccatgaactgtccagccgagtgagctttcaggaggcacgcctggcttgtgagagtgagggaggagtcctcctcagccttgagaatgaagcagaacagaagttaatagagagcatgttgcaaaacctgacaaaacccgggacagggatttctgatggtgatttctggatagggctttggaggaatggagatgggcaaacatctggtgcctgcccagatctctaccagtggtctgatggaagcaattcccagtaccgaaactggtacacagatgaaccttcctgcggaagtgaaaagtgtgttgtgatgtatcaccaaccaactgccaatcctggccttgggggtccctacctttaccagtggaatgatgacaggtgtaacatgaagcacaattatatttgcaagtatgaaccagagattaatccaacagcccctgtagaaaagccttatcttacaaatcaaccaggagacacccatcagaatgtggttgttactgaagcaggtataattcccaatctaatttatgttgttataccaacaatacccctgctcttactgatactggttgcttttggaacctgttgtttccagatgctgcataaaagtaaaggaagaacaaaaactagtccaaaccagtctacactgtggatttcaaagagtaccagaaaagaaagtggcatggaagtataataactcattgacttggttccagaattttgtaattctggatctgtataaggaatggcatcagaacaatagcttggaatggcttgaaatcacaaaggatctgcaagatgaactgtaagctcccccttgaggcaaatattaaagtaatttttatatgtctattatttcatttaaagaatatgctgtgctaataatggagtgagacatgcttattttgctaaaggatgcacccaaacttcaaacttcaagcaaatgaaatggacaatgcagataaagttgttatcaacacgtcgggagtatgtgtgttagaagcaattccttttatttctttcacttttcataagttgttatctagtcaatgtaatgtatattgtattgaaatttacagtgtgcaaaagtattttacctttgcataagtgtttgataaaaatgaactgttctaatatttatttttatggcatctcatttttcaatacatgctcttttgattaaagaaacttattactgttgtcaactgaattcacacacacacaaatatagtaccatagaaaaagtttgttttctcgaaataattcatctttcagcttctctgcttttggtcaatgtctaggaaatctcttcagaaataagaagctatttcattaagtgtgatataaacctcctcaaacattttacttagaggcaaggattgtctaatttcaattgtgcaagacatgtgccttataattatttttagcttaaaattaaacagattttgtaataatgtaactttgttaataggtgcataaacactaatgcagtcaatttgaacaaaagaagtgacatacacaatataaatcatatgtcttcacacgttgcctatataatgagaagcagctctctgagggttctgaaatcaatgtggtccctctcttgcccactaaacaaagatggttgttcggggtttgggattgacactggaggcagatagttgcaaagttagtctaaggtttccctagctgtatttagcctctgactatattagtatacaaagaggtcatgtggttgagaccaggtgaatagtcactatcagtgtggagacaagcacagcacacagacattttaggaaggaaaggaactacgaaatcgtgtgaaaatgggttggaacccatcagtgatcgcatattcattgatgagggtttgcttgagatagaaaatggtggctcctttctgtcttatctcctagtttcttcaatgcttacgccttgttcttctcaagagaaagttgtaactctctggtcttcatatgtccctgtgctccttttaaccaaataaagagttcttgtttctgaag

SEQ ID NO: 14520 - protein, 232 aa, Homo sapiens
MAYFHELSSRVSFQEARLACESEGGVLLSLENEAEQKLIESMLQNLTKPGTGISDGDFWIGLWRNGDGQTSGACPDLYQWSDGSNSQYRNWYTDEPSCGSEKCVVMYHQPTANPGLGGPYLYQWNDDRCNMKHNYICKYEPEINPTAPVEKPYLTNQPGDTHQNVVVTEAGIIPNLIYVVIPTIPLLLLILVAFGTCCFQMLHKSKGRTKTSPNQSTLWISKSTRKESGMEV

SEQ ID NO: 14521 - DNA, 1891 bp, Homo sapiens
  CDS (248)..(1525)
atttctaacgagctcccaggtggcgcgggctgcccgggagcggaccgcaagtccgcgggactcctggggtcttggctccaggccaatcagccgtcaggactcttgataaatcgccctgctcggctaatgagcagaattgccgggacatgcgcgttccggccgaaggggggtaatttccgaactccgggaattcgttgtgtgaagtaggccactcctagggacgcgcggggagcccggtcctcgcgccatgtcgcggcgcaagcaggccaagccccagcacctcaactccgaggagccgcggcctgcgcgccgggagtgtgcggaggtggccccgcaggtggcgggggagccggcttcagaacttgatgatgatgttccaaaagcaaactgcctctccactgaaagcactgacactccgaaggcccctgtcatcactcttccctcagaggcaagggaacaaatggccacccttggagagaggacgttcaactgttgctacccaggttgccacttcaaaactgtccatggcatgaaagacttggaccgccatctcagaatccacacgggagacaaaccgcacaagtgtgagttctgtgacaagtgcttcagccggaaggacaacctgaccatgcacatgcggtgccacaccagtgtgaagccacacaagtgtcacctgtgtgactacgctgccgtggacagcagtagcctcaagaagcacctgcggatccactctgatgagcggccgtacaaatgccagctctgcccctatgccagccgcaactccagccagctcaccgtccacctgcgatctcacacgggggatacccccttccagtgctggctctgtagcgccaagttcaaaatcagctcggacttgaaaaggcacatgatcgtgcactcgggggagaagcctttcaagtgcgagttctgcgacgtccgctgcaccatgaaggcgaatctcaaatcgcacatccgcatcaagcacaccttcaaatgtctgcactgtgccttccagggccgggaccgggctgacctcctggagcacagccggctgcaccaggccgaccacccggagaagtgtccagagtgcagctactcttgctccagcgcggccgccctgcgcgtgcacagcagagtccactgtaaggaccgtcccttcaagtgtgacttctgcagcttcgacacgaagcggcccagcagcctggccaagcacgtcgacaaggtgcacagggacgaggccaagacggagaaccgggcccctctgggcaaggaagggctcagagagggcagctcccagcacgtggccaagatcgtgacgcagagggccttccgctgtgagacctgcggcgcctccttcgtcagggatgactctctgagatgccacaagaagcagcacagtgatcagagtgagaacaagaactcagacttggtcaccttcccaccggaaagcggtgcctcgggacagctcagcaccctggtctccgtggggcagctcgaggctcccctagagcccagccaagacctctagctcagccgaagagggtggtcagctgtcggaacttctgaccagtgctgttgcccagccctccagaggtgaggccactgagagacaggctttgggcaccacttctggggctggccgctccaacttcacaggccttcagaggcgatggctgggcgacagtgacgaaagcaaagcaaagcagggctgtggagacactcctcgcatttgtctcttccctccaaggattatctgagcaagtcgacttgttcattcaaaggcggggtctgccaagccctgctctatccaatggggatagcttctacgtaacggattccaattttaaaactgatccatctctgatggaattattaaacttagacgatatag

SEQ ID NO: 14522 - protein, 426 aa, Homo sapiens
MSRRKQAKPQHLNSEEPRPARRECAEVAPQVAGEPASELDDDVPKANCLSTESTDTPKAPVITLPSEAREQMATLGERTFNCCYPGCHFKTVHGMKDLDRHLRIHTGDKPHKCEFCDKCFSRKDNLTMHMRCHTSVKPHKCHLCDYAAVDSSSLKKHLRIHSDERPYKCQLCPYASRNSSQLTVHLRSHTGDTPFQCWLCSAKFKISSDLKRHMIVHSGEKPFKCEFCDVRCTMKANLKSHIRIKHTFKCLHCAFQGRDRADLLEHSRLHQADHPEKCPECSYSCSSAAALRVHSRVHCKDRPFKCDFCSFDTKRPSSLAKHVDKVHRDEAKTENRAPLGKEGLREGSSQHVAKIVTQRAFRCETCGASFVRDDSLRCHKKQHSDQSENKNSDLVTFPPESGASGQLSTLVSVGQLEAPLEPSQDL

SEQ ID NO: 14523 - DNA, 1882 bp, Homo sapiens
  CDS (110)..(1495)
tactctaaatgaagaaagtctttatcagaaaattcgtattttggagaaaccttttgaatatattgaatgccagaaagccttccaaaaggacactgtttttgttaatcacatggaagaaaagccctataagtggaatggatctgaaatagcctttctccagatgtcggacctcactgtacatcagacatctcatatggaaatgaagccctatgaatgcagtgaatgtgggaaatccttctgtaaaaagtcaaaatttattatacatcagaggactcacacaggagagaaaccttacgaatgtaatcagtgtgggaaatccttctgccagaagggaacccttactgtgcatcagagaacacacacaggggagaagccctatgaatgtaatgaatgtgggaagaacttttaccagaagttacacctcattcagcatcagagaactcactcaggagagaagccctatgaatgtagttattgtggaaaatccttttgccagaagacacacctcacacaacatcagagaacacattcaggagagagaccttatgtttgtcatgactgtgggaaaaccttctcgcagaagtcagcacttaatgaccatcagaaaattcacacaggtgtgaaactctacaagtgtagtgaatgtgggaaatgcttctgccgcaagtctactctcacgacccacctgaggacccacacaggagagaaaccgtatgaatgtaatgagtgtggaaaattcttctctcggttgtcatatctcactgtacattatagaactcattcaggagagaaaccctatgaatgtaatgaatgtggaaaaaccttctacctgaattcagccctcatgagacatcagagagtgcacacaggagagaaaccttacgaatgtaatgaatgtggaaagttattctcccagttgtcatacctcactatccatcatagaactcattcaggagtaaaaccctatgaatgtagtggatgtgggaaaaccttctaccagaactcagccctttgtagacatcggagaatacacaaaggagagaagccctatgaatgctatatatgtggaaaattcttctctcagatgtcatacctcactatacatcatagaattcattcaggagagaagccctatgaatgtagtgaatgtgggaaaaccttctgccagaattcagcccttaatcgacatcagagaacacacacaggagagaaagcctacgaatgttatgaatgtgggaagtgcttctctcagatgtcctatctcactatacatcatcgaattcattcaggagagaaaccctttgaatgtaatgagtgtggaaaagccttctctcggatgtcatacctcactgtacattatagaactcattcaggagagaaaccctatgagtgtactgaatgtggaaaaaaattctaccacaaatcagcattcaacagccatcagagaattcataggagaggcaatatgaatgtaatagatgtgggaaggcttctctgaagtcagacctcattttatatcagagaaccctttcagtatagtgaatcagaaactcctgcctgaagtcaaacaccttgtacatcagagagttcacacaggttagtgtggacatccccttgtgtgttggactcataatctgaagactcacagaatggaaaccatgattataacaagaccacatggtataacaatactagactatagacaagtaaaaatttataaatattaagaatgtatatacatgtcaccatggattggaactgttttgcatatcagggaaatcatagccaaggggaaatctatcagtataaggaatgtggaagacataatcctttggaaactgttaatactaaaagatatgtttctgatacaatagcaaacttg

SEQ ID NO: 14524 - protein, 462 aa, Homo sapiens
MEEKPYKWNGSEIAFLQMSDLTVHQTSHMEMKPYECSECGKSFCKKSKFIIHQRTHTGEKPYECNQCGKSFCQKGTLTVHQRTHTGEKPYECNECGKNFYQKLHLIQHQRTHSGEKPYECSYCGKSFCQKTHLTQHQRTHSGERPYVCHDCGKTFSQKSALNDHQKIHTGVKLYKCSECGKCFCRKSTLTTHLRTHTGEKPYECNECGKFFSRLSYLTVHYRTHSGEKPYECNECGKTFYLNSALMRHQRVHTGEKPYECNECGKLFSQLSYLTIHHRTHSGVKPYECSGCGKTFYQNSALCRHRRIHKGEKPYECYICGKFFSQMSYLTIHHRIHSGEKPYECSECGKTFCQNSALNRHQRTHTGEKAYECYECGKCFSQMSYLTIHHRIHSGEKPFECNECGKAFSRMSYLTVHYRTHSGEKPYECTECGKKFYHKSAFNSHQRIHRRGNMNVIDVGRLL

SEQ ID NO: 14525 - DNA, 2094 bp, Homo sapiens
  CDS (305)..(1384)
gtcggttgactccaccaggtagttgtggattctatgatggcctccttatccttctgttgcagctcctcactgagcaggggaaggctagcctaatcagggatatgtccagttcagaaatgtggaccgttttgtggcaccgcttctccatggtcctgaggctccccgaggaggcatctgcacaggaaggggagctttcgctatccagtccaccaagccctgagccagactggacactgatttctccccagggcatggcagccctgctgagcctggccatggccacctttacccaggagccccagttatgcctgagctgcctgtcccagcatggaagtatcctcatgtccatcctgaagcatctgctttgccccagcttcctgaatcaactgcgccaggcctcctttgcttcccctttgcgctggacatggatgctgacctccttatagatgtcttggccgacctcagggactcagaagttgcagcccatctgctgcaggtctgctgctaccatcttccgttgatgcaagtggagctgcccatcagccttctcacacgcctggccctcatggatcccacctctctcaaccagtttgtgaacacagtgtctgcctcccctagaaccatcgtctcgtttctctcagttgccctcctgagtgaccagccactgttgacctccgaccttctctctctgctggcccatactgccagggtcctgtctcccagccacttgtcctttatccaagagcttctggctggctctgatgaatcctatcggcccctgcgcagcctcctgggccacccagagaattctgtgcgggcacacacttataggctcctgggacacttgctccaacacagcatggccctgcgtggggcactgcagagccagtctggactgctcagccttctgctgcttgggcttggagacaaggatcctgttgtgcggtgcagtgccagctttgctgtgggcaatgcagcctaccaggctggtcctctgggacctgccctggcagctgcagtgcccagtatgacccagctgcttggagatcctcaggctggtatccggcgcaatgttgcatcagctctgggcaacttgggacctgaaggtttgggagaggagctgttacagtgcgaagtaccccagcggctcctagaaatggcatgtggagacccccagccaaatgtgaaggaggctgccctcattgccctccggagcctgcaacaggagcctggcatccatcaggtactggtgtccctgggtgccagtgagaaactatccttgctctctctggggaatcagtcactgccacacagcagtcctaggcctgcctctgccaaacactgcaggaaactcattcacctcctgaggccagcccatagcatgtgattccagattcctgcggtccagcctccaactttggttgccagctctttcttattctactacacaagccgccaactcaactgagagctaaagagactagaaaagagataagctgccaactcaactgagaacaagaaactagaagagatttatatataaagcttcttccttctcccagatgcaggatgttttcaaccagtaaattttattgctgttggtgccagagaagagtcctttcttctctacatccaggggccttttctccaataatgtgcctttaactctagggacctgcctcacggaccttagggaaaaacctcaacctgaaagatctcttcctttctggagctcctttaatcttcccagcaggtttttgccttagacgtgctggccccaggacagtgatgaagacagagcctgtctcggctctaggctgtggggatcaatgccatcggtccctgttattgagggattatcccttagccaacattcctatctgtgggtgggcgtggagagtgtatctttttttggggtgtgtgtgtatatgtgtgtgtgtatgtgtgtgtgtgtttaatagttctgtttgtaaactcttttaataaaagttgtgcctcaccatacttgaagctcccaggacaagggttgagaggctcaacccctctttcagcttctatgtggtgttggaggtgctggtatcgtgttcacacaag

SEQ ID NO: 14526 - protein, 360 aa, Homo sapiens [sequence omitted]

SEQ ID NO: 14527 - DNA, 2393 bp, Homo sapiens
gttcaagagaaaagggatgtattaccaaagattctgcctgctgaagacagggcgctcagggaaagggggcccccccagccactgccagctgtgcagcccagtggcccgattaacatggaggagaccaggcccgaaggaagctatttcagcaagtactcggaggcagctgagctgagaagcacagcctccctcctggccactcaagaatctgacgtgatggttgggcctttcaagctgaggcccaggaaacagcggactttgtccatgattgaggaagagatccgagcagctcaggaaagggaagaggagctgaagaggcagagataagtcttgcagagtacgcagagccccaggacaaagaatgccccatcactgccctccagaacatgctacaaaactgctccagggaaaatagagaaagtcaaacctcctccatcccccaccactgaaggccccagcttgcagcctgacttagcccctgaagaggctgccggaacccagcggcccaagaatctgatgcagaccctcatggaagactatgagacacacaaatctaaaaggcgcgagagaatggatgatagtagtgtcctcgaggccacacgggttaatcgaagaaagagcgcactggctttgcgctgggaagcagggatctatgccaaccaggaggaagaagacaacgaataaacttccttcaacccaggaagcgtctttggtgcttgggagaccaagaaaccaagaaattaacaactgaaagcattttaatggactatttattaaagtgcaaacaaactcagcaatccttatgtagaccagaagctgcaatatacaatgatgaaaatgaaacgaaaaggaagtccccccatcagactctggacacccaggaatcaaaagagaaaggacttttttggtgactcaatcccagtgtctggtttggggccaatctacaatggatccaaaaggacaaaacatgttacaagcaaatcaacatagttgctgcaggcggaactgagaccagcctctctgggcgatgaaggacaatggtggtagggccacttagagagcagtagggcccaggctggtgcagcctacatggcacaggatatttccctgcaccagtttcccacctgtcacttgcagcatcagagggtgttgcattaactccattttctccagcagccataaaatgaatggcgtttctctccatatttgcccagaagaggcagttatgattccacttctcctacatttaattatttttaattgagaacaactcatgatcacaattcataaaatccatattttaagacaatagttcttcatgtcacaaacacaatctattctacatgaggaggctgagaaaggggaagagaaaaacaaaccaaatggatgatgttagctttaggatcgtgtctgcttataatattcactgatctgcagtttatgagaacacattttcacagttatgtttcttcataggaaaactatatttagtgggcaacaactatttttatgatgggatgggggagtatatacacgtatagaatctgtacgcgttgaacaacttggttcaagatggtgggggcatttttagagcggcaataattgaaaaaaaaggcgaactctgccttggagaggtagatgataagaaataaaaaggtgtttataactattttgtattataaagtgggccttagagataggaagaagaatgatggattccttttggatcaatcagaaaggaaacacgaaagaaaagtcaggaaggtagagagagaaaaagggagggaaggagaaagaatgggaataaaataaggaggtaagagatactatttttgctgagcaaccagtgtgtttcaggatgatacaaagaaaaatatagaatagaaataagtgcaggcttggaatcagctacaaatcctaaagatggggtgtgtgtggatgtgtgtgtgtgtgtgtgtacaccattgtgtgtttgtaaaatgtgtatgttcatgagtaagggtgtgtgtgtgtgtgtattaaaattccagagtgaccgtggcacttgggtgtacaggtaattcctccagagctgtttgctggcttcaggagtggagtgagaatttcttttttatgaaaagggatataaaggcaccgagctgatgcagtatttgtaatattaagttgacctaacaaggtatttgcatgagtcacaattacaaagttttgagcggttttgtaatttgacatttaggaaagtctcctatttattctcatactttacattcatgcttagtatactatagaggatgccagctttaatctttctgtcatttaaagcaatatgataagggtattcaataattgggtgccctaaatttctggatgagaaaattttcaattctggccatgag

SEQ ID NO: 14528 - DNA, 1750 bp, Homo sapiens
tcagagatgtaactgtctttcataatataagtgatgtttgccaggaatattatcctaaatttgttagacatatttctgacatatctgtgatgatagtttgaaaattagtatgtattatttgttgccttttatgccattgtgtccttttcttgatgttttcaaagctggctgaatcctacacaatatgttacactcctaatctgcattttttaaatgcataggccgtttaacttagcacagactattggcctctgcttgaagaatagtatacctataaactggaagcattatcatcacttactcattataacccatcctgtctgttctgtacagtatagttggacccagatttttaccctatgaatttggttagcacaaatgggggaaagtatgaaatgccaaggaaaattgaaattcatgtaggagatgagtagaggaatgttcaggagttcaagcagaacaagaggaacccaactataccgtttctgatctaaatggtatggtggggaaaaaccatcagatcaacagaaaggacataatttttaaataaaagtaacttccttatattgagcaaatttaattttatgaaaaatgcattacaaagtctttgtttcactcatttctctgtgcgactattgaagtgtttgttaaactggatcacgtccaagaagttaatgttaggccaggcagggtggctcacgcttatgttcccagcactttggaaggccaaggcgggtggatcacgaggtcaggagttcgagaccatcctggccaatatggtaaaaccctgtctctactaaaaaatacaaaaattagctgagtatggtggcacgtgcctgtaatcccagctattcgggaggctgaagcaggaaaatcgcttgaacccgggaggcagaggttgcagtgagccaggatcgcgccactgcactcgagcctgggtgacagagtgagactccatctcaaaaaaaaagttaatgtttttggggaaccacacttcatgtcagatcatttatgattaccgttggttagttttgaagatggtttgctcctttaaatggagtattaagtgctttgtgcttttttttttccccctgaaacagtcttactctgtcaccccagctagaatgcagtggtgcaatcttggctcactgcagtctccacctcctgggttcaagtgattcccctgctcctcctcctaagtaactgggattgcaggtgcctgccaccacgctcagctaattttttatatttttaatagaggcggaggtttcaccatgttggccaagctggtctcgagctcctgacctcaagtgatctccccgccttggcctcccaaagtgctgggattacaggtgtgagccaccgtgcctggcagtgtttttatgaaaacactgtataaaacattctgtataaaacactgtattaaacactgtataaaacatttatctctgtataaaacattcagagatattttaaggaccttgttttaactttgtttcaactgttttaaggaaattccttaatttttgtgccaaatttgatattcaatttgatttctgaagttgctttttaaagatgttcatttaagatgtaaagattatttaaattgcctttaaaattaatgaattaacttttaaagtgcagttcatttttttgagtgttctagagagcactcaaataatgatggttaaaaggagtatgttatttttggattatgctgaattatttattttccagtgttcctaaaccc

SEQ ID NO: 14529 - DNA, 2308 bp, Homo sapiens
  CDS (74)..(1606)
agagctcttttattacgcacagaaagctgttcttcatcctacagggcccctgtactgcccagaggagaaggagatgaaaccagcttgtataaaagcccttactcgtatatttaaaatatctgatcaagataatgatggtactctcaatgatgctgaactcaacttctttcagaggatttgtttcaacactccattagctcctcaagctctggaggatgtcaagaatgtggtcagaaaacatataagtgatggtgtggctgacagtgggttgaccctgaaaggttttctctttttacacacactttttatccagagagggagacacgaaactacttggactgtgcttcgacgatttggttatgatgatgacctggatttgacacctgaatatttgttccccctgctgaaaatacctcctgattgcactactgaattaaatcatcatgcatatttatttctccaaagcacctttgacaagcatgatttggatagagactgtgctttgtcacctgatgagcttaaagatttatttaaagttttcccttacataccttgggggccagatgtgaataacacagtttgtaccaatgaaagaggctggataacctaccagggattcctttcccagtggacgctcacgacttatttagatgtacagcggtgcctggaatatttgggctatctaggctattcaatattgactgagcaagagtctcaagcttcagctgttacagtgacaagagataaaaagatagacctgcagaaaaaacaaactcaaagaaatgtgttcagatgtaatgtaattggagtgaaaaactgtgggaaaagtggagttcttcaggctcttcttggaagaaacttaatgaggcagaagaaaattcgtgaagatcataaatcctactatgcgattaacactgtttatgtatatggacaagagaaatacttgttgttgcatgatatctcagaatcggaatttctaactgaagctgaaatcatttgtgatgttgtatgcctggtatatgatgtcagcaatcccaaatcctttgaatactgtgccaggatttttaagcaacactttatggacagcagaataccttgcttaatcgtagctgcaaagtcagacctgcatgaagttaaacaagaatacagtatttcacctactgatttctgcaggaaacacaaaatgcctccaccacaagccttcacttgcaatactgctgatgcccccagtaaggatatctttgttaaattgacaacaatggccatgtatccagaggatcattacagagacagactctcccgagacatgggccacactgatagaatagagaatttgagaaaaatctgggtctttctaaaaactgctttccatgcccggttacgctgtatgtgcacctgcaacaggtgtacattttgcatctgtcagaacttcctcaactcagacttgctgcaatctgtaaagaacaaaatcttcactgcagttcttaacaggcacgtgacacaagctgacctcaagagctccacgttttggcttcgagcaagttttggtgctactgtttttgcagttttgggctttgctatgtacaaagcattattgaaacagcgatgatataaaaagaaatactgtccctaccaaaaacaaatacttttatgtacattctgaatgctttaagttctgctagaattattgagatatttatacatgcagagttactttattaatatttgtaattcatgcataagagtattttaatgatagttataactgcagtattggctagcatatggaaagaaaacagctaacagccaaactaaaatggctaaattccagaggccaaaagggaatattttgtaaatatatgtacatattcaggcaagatatggtctcccaagctgagttctagaaatgatgtttctagacatttctaagtggtattgttagtgctcacttggctcactcttctaggtttaagttagcccagagattgtatttactcatggatcactttatttatttcacatttactcagaatgatcctttgggttctataaggacataaggtacaatttgccattgtctctccatttttaaaaacatacaagtcagtgtcagcttaccaacatgacattttttcagtcagttgtggtaggccagccttgaagccatcgcacagtctagaaacttgtgtagctgagtgtgcagctcacctttaagggtgaagttaggtaaaagcaattagcagaggcgttatctatgtgattatgttgcttccttgtcagtatgttgaattttatagccctttcaatg

SEQ ID NO: 14530 - protein, 511 aa, Homo sapiens
MKPACIKALTRIFKISDQDNDGTLNDAELNFFQRICFNTPLAPQALEDVKNVVRKHISDGVADSGLTLKGFLFLHTLFIQRGRHETTWTVLRRFGYDDDLDLTPEYLFPLLKIPPDCTTELNHHAYLFLQSTFDKHDLDRDCALSPDELKDLFKVFPYIPWGPDVNNTVCTNERGWITYQGFLSQWTLTTYLDVQRCLEYLGYLGYSILTEQESQASAVTVTRDKKIDLQKKQTQRNVFRCNVIGVKNCGKSGVLQALLGRNLMRQKKIREDHKSYYAINTVYVYGQEKYLLLHDISESEFLTEAEIICDVVCLVYDVSNPKSFEYCARIFKQHFMDSRIPCLIVAAKSDLHEVKQEYSISPTDFCRKHKMPPPQAFTCNTADAPSKDIFVKLTTMAMYPEDHYRDRLSRDMGHTDRIENLRKIWVFLKTAFHARLRCMCTCNRCTFCICQNFLNSDLLQSVKNKIFTAVLNRHVTQADLKSSTFWLRASFGATVFAVLGFAMYKALLKQR

SEQ ID NO: 14531 - DNA, 2857 bp, Homo sapiens
  CDS (44)..(2857)
caacaatacactggaccaagaagggcatatcatcttgcactctatgcatcgttacctgccgaggcttcatttggtgcctgcagaaaaggctgtggaggtgatacaattaaatggccctggtgtccacacttttaccttcccacagactgaattctttgcagtaacagcttatcagaacattcagattactcagctgaaaatagattacaatccatttgccaaaggctttcgggatgatgggctgaataataatccccagagagatggaaaacaaaagaacagctctgaccaagaagggaataatatttccagttcttctggtcatcgggtccgtcttacagaaggtcaggggtcagagatacaaccaggtgatttggatcctttgtcaaggggtcatgaaacatcaggcaagggtttggagaagacttcccttaatataaaacgagactttcttggtttcatggatactgattcagcacttagtgaagttcctcaattgaagcaagagatttctgaatgtcttattgccagcagttttgaagatgactcccgtgtagcctcaccgttagaccagaacggaagcttcaatgttgttattaaagaggaacctctagatgattatgactacgaacttggtgagtgcccagaaggggtcactgtgaaacaggaagagacagatgaagagacggatgtatactcaaatagtgatgatgatcctatactagagaaacagctaaagaggcacaataaagttgacaacccagaagctgaccatctatcttctaaatggcttccaagcagcccatcaggtgttgctaaagctaaaatgttcaaattagacactggaaagatgccagtagtctatctggagccctgtgctgtcaccagaagcacagttaagatttctgaactccccgataacatgctttccacatctcgaaaggataaatcttctatgttggcagaattggaatatttgcctacatacattgaaaattccaatgagactgccttctgcttaggcaaggaatcagaaaatggtcttagaaaacattcaccagatctcagagtggtacaaaaatatcccttactgaaagagcctcagtggaaatatcctgatatatctgacagcattagcacagaaagaatactcgacgattcaaaggattcagttggagactcactttcaggaaaagaggacttgggcagaaagagaacaactatgcttaagattgcaacagccgcaaaggtagtgaatgctaatcagaatgcctctccaaatgtccctggaaaaagaggaaggccacgaaaattgaaactctgtaaggcaggacgaccacctaagaacacaggaaagtctttaatttctacaaagaatacacctgtaagccctgggagtacctttccagatgttaagcctgatctggaagatgtggatggtgttctctttgtctcctttgaatcaaaggaagctctagacattcatgcagttgatgggacaacagaagaatcttctagtctccaggcatcaaccacaaatgactcaggttacagagcaagaatttcccagttggaaaaggaattgatagaagatttgaagtctttgcggcacaagcaggtgatacatcctggtcttcaagaagtgggcttaaaattgaattcagtggatccaacaatgagaattgatcttaaatacttgggagtacagttacctttggctccagctactagctttcctttttggaaccttacaggaaccaaccctgcctctcctgatgcgggatttccctttgtttctaggacagggaaaaccaatgatttcactaagatcaagggatggaggggaaaatttcatagtgcttctgcatctaggaatgaaggtggaaattcagaaagttcactgaaaaatcgttctgctttctgtagtgataagctagatgaatacttggaaaatgaaggcaagctgatggaaacaagcatgggtttttcttctaatgctcccacatctcctgtggtgtaccagcttcccactaagagtaccagttatgtacgaacacttgatagtgtactaaagaagcaatctactatttccccttctacctcttattctttgaaacctcattctgtaccccctgtctctcgaaaggcaaagtctcaaaacagacaggcaactttcagtggccgaactaaatcatcttataaatccattttaccataccctgtttcaccaaagcagaaatactctcatgtgattctaggagataaggttaccaagaattcttcaggcatcatctcagaaaatcaggcgaataactttgttgtgccaactttggatgaaaatatatttccaaagcagattagtttgcggcaggcacagcagcagcagcaacagcaacagggaagtcgccctccaggcttgtctaaatctcaggtgaagctaatggacctggaagactgtgcactttgggaaggaaaaccaaggacatacatcacagaagagcgagcagatgtatccttaacaactctacttacagctcaagcatccctcaaaactaaacctatccacacaatcataaggaaacgagcccctccctgcaacaatgacttctgtcgactgggttgtgtatgttccagtctagctttggagaagcgccaacctgctcactgccgccgaccagactgcatgtttggttgtacttgtttgaaaagaaaagttgtacttgttaaaggaggatccaaaactaagcattttcagaggaaggctgctcatcgagatccagtattttatgatactctgggagaggaggcaagggaggaggaagaaggaatcagggaggaggaggaacaattgaaagag

SEQ ID NO: 14532 - protein, 938 aa, Homo sapiens
MHRYLPRLHLVPAEKAVEVIQLNGPGVHTFTFPQTEFFAVTAYQNIQITQLKIDYNPFAKGFRDDGLNNNPQRDGKQKNSSDQEGNNISSSSGHRVRLTEGQGSEIQPGDLDPLSRGHETSGKGLEKTSLNIKRDFLGFMDTDSALSEVPQLKQEISECLIASSFEDDSRVASPLDQNGSFNVVIKEEPLDDYDYELGECPEGVTVKQEETDEETDVYSNSDDDPILEKQLKRHNKVDNPEADHLSSKWLPSSPSGVAKAKMFKLDTGKMPVVYLEPCAVTRSTVKISELPDNMLSTSRKDKSSMLAELEYLPTYIENSNETAFCLGKESENGLRKHSPDLRVVQKYPLLKEPQWKYPDISDSISTERILDDSKDSVGDSLSGKEDLGRKRTTMLKIATAAKVVNANQNASPNVPGKRGRPRKLKLCKAGRPPKNTGKSLISTKNTPVSPGSTFPDVKPDLEDVDGVLFVSFESKEALDIHAVDGTTEESSSLQASTTNDSGYRARISQLEKELIEDLKSLRHKQVIHPGLQEVGLKLNSVDPTMRIDLKYLGVQLPLAPATSFPFWNLTGTNPASPDAGFPFVSRTGKTNDFTKIKGWRGKFHSASASRNEGGNSESSLKNRSAFCSDKLDEYLENEGKLMETSMGFSSNAPTSPVVYQLPTKSTSYVRTLDSVLKKQSTISPSTSYSLKPHSVPPVSRKAKSQNRQATFSGRTKSSYKSILPYPVSPKQKYSHVILGDKVTKNSSGIISENQANNFVVPTLDENIFPKQISLRQAQQQQQQQQGSRPPGLSKSQVKLMDLEDCALWEGKPRTYITEERADVSLTTLLTAQASLKTKPIHTIIRKRAPPCNNDFCRLGCVCSSLALEKRQPAHCRRPDCMFGCTCLKRKVVLVKGGSKTKHFQRKAAHRDPVFYDTLGEEAREEEEGIREEEEQLKE

SEQ ID NO: 14533 - DNA, 1934 bp, Homo sapiens
  CDS (213)..(737)
acaatgaaaaacaaccagaacacttgggtctggatcaatatataataaaacgctttgatggaaagaaaatttcccaggaacgagaaaaatttgctgatgaaggcagtatattttacacccttggagaatgtgggctcatatccttttcagactacattttcctcacaactgttctttccactcctcagagaaattttgaaattgccttcaagatgtttgatttgaatggagatggagaagtagatatggaagaatttgaacaggttcagagcatcattcgctcccaaaccagtatgggtatgcgccacagagatcgtccaactactggcaacaccctcaagtctggcttgtgttcagccctcacaacctacttttttggagctgatctgaagggaaagctgacaatcaaaaacttcctcgaatttcagcgtaaactgcagcatgatgttctgaagcttgagtttgaacgccatgaccctgtggatgggagaattactgagaggcagtttggtggcatgctacttgcctacagtggggtgcagtccaagaagctgaccgccatgcagaggcagctcaagaagcacttcaaagaaggaaagggtctgacatttcaggaggtggagaacttctttactttcctaaagaacattaatgatgtggacactgcattgagtttttaccatatggctggagcatctcttgataaaggaaagggcaccatcttcatggggagaagatgagtacttgaaatatcaagacaattgcagaaggctgtgccctgagagaatggaagaactgggaaagagaaaaggaagtcagaagcttaagtgaccatgcagcaggtggccaggacagtggctaaagtggagctctcagaccacgtgtgtgatgtggtgtttgcactctttgactgtgatggcaatggcgaactgagcaataaggaatttgtttccatcatgaagcaacggctgatgagaggcctggaaaagcccaaagacatgggtttcactcgcctcatgcaggccatgtggaaatgtgcacaggaaactgcctgggacttcgctttacccaaacagtaaccccacactgcaagaggggacccctccacccccagtaccctggaccccctccgcagagtctcggcagagccctttgtgctgctgcttctggaagtagtctcccttcctcccgggatgacctcaggactctgtcggtttcccctctttacccttccccgtccccgtgttctgctgggctctgattctgcccaatgagtatccccataggttctcaaaaacatgaacaagtctgtaaagctcagacatttgtcagcctcaacagcaccacccattcaagcatcctgtggataaagaattcagggaaccatccacacacctgccaaccctgggaagcatccagttctcaaatcgtttttgctatggatttatactaacaagaacattccttgacttccctcctgctggtgttttaaagccacaagtagggaagatatctggcaggcagaaagaagtctgtgatgataaacaatgatgaggatgacctaggcaccctacgctagtgtgagaagcctgcgccccaggaaggatctgtgttagtccctgggatggctccaaggcctgctctaggaaggcagcatgctcagtgggaacacagcaagattcagaatttaaagtagttgcttcatggctctgtgcactctcttttcttcctcgcagcctccctaagatgactccagtgtgaccctgtgcttagtgagcaatagtgattgagctcatgttccctgcaagtgccatttcctctccaggatgggcctctaaagctgaggcctggctcagagcctgtttgccctctgtcttaaacaattgtaaatatcacttaaattataaccatttgcaataaacatccccaaagtt

SEQ ID NO: 14534 - protein, 175 aa, Homo sapiens
MFDLNGDGEVDMEEFEQVQSIIRSQTSMGMRHRDRPTTGNTLKSGLCSALTTYFFGADLKGKLTIKNFLEFQRKLQHDVLKLEFERHDPVDGRITERQFGGMLLAYSGVQSKKLTAMQRQLKKHFKEGKGLTFQEVENFFTFLKNINDVDTALSFYHMAGASLDKGKGTIFMGRR

SEQ ID NO: 14535 - DNA, 2357 bp, Homo sapiens
  CDS (199)..(1620)
aaggtgatcaagttcatcctcatcatctgctacaccgtctactacgtgcacaacatcaagttcgacgtggactgcaccgtggacattgagagcctgacgggctaccgcacctaccgctgtgcccaccccctggccacactcttcaagatcctggcgtccttctacatcagcctagtcatcttctacggcctcatctgcatgtatacactgtggtggatgctacggcgctccctcaagaagtactcgtttgagtcgatccgtgaggagagcagctacagcgacatccccgacgtcaagaacgacttcgccttcatgctgcacctcattgaccaatacgacccgctctactccaagcgcttcgccgtcttcctgtcggaggtgagtgagaacaagctgcggcagctgaacctcaacaacgagtggacgctggacaagctccggcagcggctcaccaagaacgcgcaggacaagctggagctgcacctgttcatgctcagtggcatccctgacactgtgtttgacctggtggagctggaggtcctcaagctggagctgatccccgacgtgaccatcccgcccagcattgcccagctcacgggcctcaaggagctgtggctctaccacacagcggccaagattgaagcgcccgcgctggccttcctgcgcgagaacctgcgggcgctgcacatcaagttcaccgacatcaaggagatcccgctgtggatctatagcctgaagacactggaggagctgcacctgacgggcaacctgagcgcggagaacaaccgctacatcgtcatcgacgggctgcgggagctcaaacgcctcaaggtgctgcggctcaagagcaacctaagcaagctgccacaggtggtcacagatgtgggcgtgcacctgcagaagctgtccatcaacaatgagggcaccaagctcatcgtcctcaacagcctcaagaagatggcgaacctgactgagctggagctgatccgctgtgacctggagcgcatcccccactccatcttcagcctccacaacctgcaggagattgacctcaaggacaacaacctcaagaccatcgaggagatcatcagcttccagcacctgcaccgcctcacctgccttaagctgtggtacaaccacatcgcctacatccccatccagatcggcaacctcaccaacctggagcgcctctacctgaaccgcaacaagatcgagaagatccccacccagctcttctactgccgcaagctgcgctatctagacctcagccacaacaacctgaccttcctccctgccgacatcggcctcttgcagaacctccagaacctagccatcacggccaaccggatcgagacgctccctccggagctcttccagtgccggaagctgcgggccctgcacctgggcaacaacgtgctgcagtcactgccctccagggtgggcgagctgaccaacctgacgcagatcgagctgcggggcaaccggctggagtgcctgcctgtggagctgggcgagtgcccactgctcaagcgcagcggcttggtggtggaggaggacctgttcaacacactgccacccgaggtgaaggagcggctgtggagggctgacaaggagcaggcctgagcgaggccggcccagcacagcaagcagcaggaccgctgcccagtcctcaggcccggaggggcaggcctagcttctcccagaactcccggacagccaggacagcctcgtggctgggcaggagcctggggccgcttgtgagtcaggccagagcgagaggacagtatctgtggggctggccccttttctccctctgagactcacgtcccccagggcaagtgcttgtggaggagagcaagtctcaagagcgcagtatttggataatcagggtctcctccctggaggccagctctgccccaggggctgagctgccaccagaggtcctgggaccctcactttagttcttggtatttatttttctccatctcccacctccttcatccagataacttatacattcccaagaaagttcagcccagatggaaggtgttcagggaaaggtgggctgccttttccccttgtccttatttagcgatgccgccgggcatttaacacccacctggacttcagcagagtggtccggggcgaaccagccatgggacggtcacccagcagtgccgggctgggctctgcggtgcggtccacgggagagcgggcctccagctggaaaggccaggcctggagcttgcctcttcagtatttgtggcagttttagttttttgtttttttttttttaatcaaaaaacaatttttttaaaaaaaaagctttgaaaatggatggtttgggtattaaaaag

SEQ ID NO: 14536 - protein, 474 aa, Homo sapiens
MYTLWWMLRRSLKKYSFESIREESSYSDIPDVKNDFAFMLHLIDQYDPLYSKRFAVFLSEVSENKLRQLNLNNEWTLDKLRQRLTKNAQDKLELHLFMLSGIPDTVFDLVELEVLKLELIPDVTIPPSIAQLTGLKELWLYHTAAKIEAPALAFLRENLRALHIKFTDIKEIPLWIYSLKTLEELHLTGNLSAENNRYIVIDGLRELKRLKVLRLKSNLSKLPQVVTDVGVHLQKLSINNEGTKLIVLNSLKKMANLTELELIRCDLERIPHSIFSLHNLQEIDLKDNNLKTIEEIISFQHLHRLTCLKLWYNHIAYIPIQIGNLTNLERLYLNRNKIEKIPTQLFYCRKLRYLDLSHNNLTFLPADIGLLQNLQNLAITANRIETLPPELFQCRKLRALHLGNNVLQSLPSRVGELTNLTQIELRGNRLECLPVELGECPLLKRSGLVVEEDLFNTLPPEVKERLWRADKEQA

SEQ ID NO: 14537 - DNA, 2669 bp, Homo sapiens
  CDS (19)..(2355)
ctgtaccatcgatacctgatgaatgaagagcaagctgtcagcaaagtggacggcatcctgtctaactgtggcatagaaaaggagtcagacctgtgtgtgctgaacctcatacgatacacagccaccactaagtgctctccgagtgtggatcccgagagggtgctgtggagtctgagggaccaccccctcctccccgaggctgaggcgtgtgtgcggcaacacctccccgacctctacgctgccgggggtgtcaacatctgggccctggtggcggctgtggtgctcctctccagcagtgtgaatgacatccagcgactgctcttctgcctccggagacccagctccacggtgaccatgccagatgtcaccgagaccctgtactgcatagccgtgcttctctacgccatgagggagaaggggattaacatcagcaataggattcactacaacattttctattgcctatatcttcaggagaattcctgcactcaggccacaaaagttaaagaggagccatctgtctggccaggcaagaaaaccatccaacttacacatgaacaacagctgattctgaatcacaagatggaacctctccaggtggtgaaaattatggcctttgccggcactgggaagacctcaacgctggtcaagtatgcagagaagtggtctcagagcaggtttctgtatgtgacattcaacaagagcatcgcaaagcaggccgaacgcgtcttccccagcaacgtcatctgcaaaaccttccactccatggcctacgggcacatagggcggaagtaccagtcaaagaagaagttgaatctcttcaagttaacacccttcatggtcaactccgtccttgctgaagggaagggtggattcataagagccaagcttgtgtgtaagactctagaaaacttctttgcctcggctgacgaagagctgaccattgatcacgtgcctatttggtgtaagaacagccaaggacagagagtcatggttgagcagagtgaaaaactgaatggtgtccttgaagcgagccgcctctgggataacatgcggaagctgggggagtgcacagaagaggcgcaccagatgactcatgacggctacttgaaactctggcagctgagcaagccttcgctggcctcttttgacgccatctttgtggatgaggcccaggactgcacaccagctatcatgaacatagttctgtctcagccatgtgggaaaatctttgtaggggacccgcaccagcagatctataccttccggggtgcggtcaacgccctgttcacagtgccccacacccacgtcttctatctcacgcagagttttcggtttggtgtggaaatagcttatgtgggagctactatcttggatgtttgcaagagagtcaggaaaaagactttggttggaggaaaccatcagagtggcattagaggtgacgcaaaggggcaagtggccttgttgtcccggaccaacgccaacgtgtttgatgaggccgtacgggtgacggaaggggaattcccttcaaggatacatttgattggggggattaaatcatttggattggacagaatcattgatatttggatccttcttcagccagaggaagaacggaggaaacaaaacctcgtcattaaagacaaatttatcagaagatgggtgcacaaagaaggctttagtggcttcaagaggtatgtgaccgctgccgaggacaaggagcttgaagccaagatcgcagttgttgaaaagtataacatcaggattccagagctggtgcaaaggatagaaaaatgccatatagaagatttggactttgcagagtacattctgggcactgtgcacaaagccaaaggcctggagtttgacactgtgcatgttttggatgattttgtgaaagtgccttgtgcccggcataacctgccccagcttccgcacttcagagttgagtcattttctgaggatgaatggaatttactgtatgttgcagtaactcgagccaagaagcgtctcatcatgaccaaatcattggaaaacattttgactttggctggggagtacttcttgcaagcagagctgacaagcaacgtcttaaaaacaggcgtggtgcgctgctgcgtgggacagtgcaacaatgccatccctgttgacaccgtccttaccatgaagaagctgctcatcacctatagcaacaggaaggaaaacaaggggggctacctctgccactcctgtgcggagcagcgcatcgggcccctggcgttcctgacagcctccccggagcaggtgcgcgccatggagcgcactgtggagaacatcgtactgccccggcatgaggccctgctcttcctcgtcttctgaggacaaggcgcacgttctccgcagtgcagagcagcttgccgaggaccccgcgtgaagaaagccagcgaggggggcttctgctccctgagactctgggttcacccacagcactttctgaggaagaggacaccagcccaagctggacctgccatttctccactccctacagacagccagtctccacttgcctcccctctggatgtatctggtcagggaagtgggggatgttcttttgataaaaaaaaaaaaaaattttatgtatttaaacttttattacaagatttcaattaaacaggcaccatagcactggc

SEQ ID NO: 14538 - protein, 779 aa, Homo sapiens
MNEEQAVSKVDGILSNCGIEKESDLCVLNLIRYTATTKCSPSVDPERVLWSLRDHPLLPEAEACVRQHLPDLYAAGGVNIWALVAAVVLLSSSVNDIQRLLFCLRRPSSTVTMPDVTETLYCIAVLLYAMREKGINISNRIHYNIFYCLYLQENSCTQATKVKEEPSVWPGKKTIQLTHEQQLILNHKMEPLQVVKIMAFAGTGKTSTLVKYAEKWSQSRFLYVTFNKSIAKQAERVFPSNVICKTFHSMAYGHIGRKYQSKKKLNLFKLTPFMVNSVLAEGKGGFIRAKLVCKTLENFFASADEELTIDHVPIWCKNSQGQRVMVEQSEKLNGVLEASRLWDNMRKLGECTEEAHQMTHDGYLKLWQLSKPSLASFDAIFVDEAQDCTPAIMNIVLSQPCGKIFVGDPHQQIYTFRGAVNALFTVPHTHVFYLTQSFRFGVEIAYVGATILDVCKRVRKKTLVGGNHQSGIRGDAKGQVALLSRTNANVFDEAVRVTEGEFPSRIHLIGGIKSFGLDRIIDIWILLQPEEERRKQNLVIKDKFIRRWVHKEGFSGFKRYVTAAEDKELEAKIAVVEKYNIRIPELVQRIEKCHIEDLDFAEYILGTVHKAKGLEFDTVHVLDDFVKVPCARHNLPQLPHFRVESFSEDEWNLLYVAVTRAKKRLIMTKSLENILTLAGEYFLQAELTSNVLKTGVVRCCVGQCNNAIPVDTVLTMKKLLITYSNRKENKGGYLCHSCAEQRIGPLAFLTASPEQVRAMERTVENIVLPRHEALLFLVF

SEQ ID NO: 14539 - DNA, 2165 bp, Homo sapiens
caaatgagaaagattcaaattgtttgttattttctgtattttcagtcaaaaaatcagttatatagtgattttaaagcagattaatggaaaaaaattcatgtaacaattacctgaaaatttataacctattcctaatcaaacccaattatatcagaatacctttctgaatttgagatttttgctctacattttataatgaataaggctattttttgaaggtatttcattttgaattctgtcattaacctcaaaagctttctactgctttgcggtgaaggcaaaatattcgataactcaacttaggccccactgttccccaacttcatggaggccagaagactttactttgttccataatgaaatataaacacagaacaaagttgtaaaagtagcatggatatgttgaaactttggacaagcttcttgtcctttggaatatgggatttatattcatctcctcaatatcccatgtatgcacagaaacttcagttctatttctatagacacaggaacctagtgactattgaacgtaattgtaataaaatgctgctcattgagccaaagagaagaaatgatttattaacatggggacaccaagaaaaacaaagtatgcttttattccctttgtcaagctcagttttagggttttttcttttttttatagtgacaatccatagatatagacattcctaaaagaaaaataaataattcagtagatatatgtcactgttacctgaatatggaatgaatttgatgttttttattttgttgagacagggtcttgctctgtcacccagactggagtgcagtggcatgatcacacctcactgcagccttggcctctcaggctcgtgatcctcctgcctcaacctcgcaagtagcttgggactacaggcgtgtgccaccagtcctggctaattttttgtagatataaggtctcatgatattgcccaggctgaatttgatgttatttcaagttgattttcatgtgtttgggagcttgtcttgttctcaactactacgcaggtagacagtcttcccccagagactcattagattgcaatatagaggcactttctcatttccctattgttcctaatacagaattgtagagctggagagtaccttcagttttctaaatctattctcaaacaggatatcactaacctctttagaatcattcctcagtatacatcaatttattgagaactgcctaatactcaagaaattaaatcctgagttcagtaggctgtgttccaagcaggaattattttcacttaccaaaatatctcctattacctcaaggtatccttgttgaggaatgctgaaaactaaattttaagtatcaagtctagaccatagagtgctttggtgggagtattttgattacctcctacccatcagaagcaggcagctaatattgtgaactgagtatttttgtcaaaagtcacagggaagagactacagaagaatgagaagggtcaaaaggacctagtgtggcttactacatggatcttgtctcttggaggtctgtcgtagaagaagaaacaaatagaggtgatgaagacacagaacaggctcagtcagcatcctcacccagagatggcaacatctattaagaccaatgcaataccttttcatcttcagcaaatgttgtttcatctgtttttgatccttggcattgtcaaaaacttaactgcaggtccagtgtatatttttccttatttttcccttttagctatctgctaaagtgagtaaatgccacagctgtacttttccaaagaaaaagaactattgacaacttatagcctgtcatgcaggtcatgtttcaaatcaaggctgaaattttcaacagctgtgggaaaaactaaaacacagaaatactgtacagtattagtgtttttttaaagaaattgttagtgcattattgagtatactaaatatctgtgattaaataaattagttctaacttttgattttgggagcccaaaataaagggagtgttgttttcatggttatgccttgtttgtggagtcaagtgttgatatacttgaggcatgttatgtgtcttctaattaatatttttatcaccttgaatttgtgtctcttccgagcattaaagatactatggatcttaaattccttattaaaaaaatgcaagtgtg

SEQ ID NO: 14540 - DNA, 1945 bp, Homo sapiens
  CDS (244)..(1764)
gtcaggcgcgaatcccagcggccggcgggcggcggggatacttctacatagacataatcaagttttgactatttggaaaccaagcatcattaaaattctctcaaactcctaattgcgaagaatcgataacatttcaagaagtgataacatttctctgaacaagaaaagaagtgattgaccacgttttaaaagtactctggcactggtgctgtgttttcttcccctccctaaatttgaagaactatggagaaatggtacttgatgacagtagtggttttaataggactaacagtacgatggacagtgtctcttaattcttattcaggtgctggtaaaccgcctatgtttggtgattatgaagctcagagacactggcaagaaataacttttaatttaccggtcaaacaatggtattttaacagcagtgataacaatttacagtattggggattggattacccacctcttacagcttatcatagtctcctatgtgcatatgtggcaaagtttataaatccagactggattgctctccatacatcacgtggatatgagagtcaggcacataagctcttcatgcgtacaacagttttaattgctgatctgctgatttacatacctgcagtggttttgtactgttgttgcttaaaagaaatctcaactaagaaaaagattgctaatgcattatgcatcttgctgtatccaggccttattcttatagactatggacattttcaatataattctgtgagtcttggctttgctttgtggggtgttcttggaatatcttgtgactgcgacctcctagggtcactggcattttgcttagctataaattataaacagatggaactttaccacgccttgccatttttttgctttttacttggcaagtgttttaaaaaaggcctcaaaggaaaggggtttgtgttgctagttaagctagcttgtattgttgtggcttccttcgttctctgctggctgccattctttacagaaagggaacaaaccctgcaggttctaagaagactcttcccggttgatcgtggattatttgaggataaagtagccaatatttggtgcagcttcaatgtctttctgaagattaaggatattttgccacgtcacatccaattaataatgagcttttgttttacgtttttgagcctgcttcctgcatgcataaaattaatacttcagccctcttccaaaggattcaaatttacactggttagctgtgcgctatcattctttttattttctttccaagtacatgaaaaatccattctcttggtgtcactaccagtctgcttagttttaagtgaaattccttttatgtctacttggtttttacttgtgtcaacatttagtatgctacctcttctattgaaggatgaactcctaatgccctctgttgtgacaacaatggcattttttatagcttgtgtaacttccttttcaatatttgaaaagacttctgaagaagaactgcagttgaaatccttttccatttctgtgaggaaatatcttccatgttttacatttctttccagaattatacaatatttgtttcttatctcagtcatcactatggtgcttctgacgttgatgactgtcacactggatcctcctcagaaactaccggacttgttttctgtattggtgtgttttgtatcttgcttgaacttcctgttcttcttggtatactttaacattattattatgtgggattccaaaagtggaagaaatcagaagaaaatcagctagctgtattcctaaacaaattgtttcctaaacaaatgtgaaaatgtgaacagtgctgaaaggttttgtgaactttttgctatgtataaatgaaattaccattttgagaaccatggaaccacaggaaaggaaatggtgaaaagtcattgttgtctacacaaaataaatgtatatggagacc

SEQ ID NO: 14541 - protein, 507 aa, Homo sapiens
MEKWYLMTVVVLIGLTVRWTVSLNSYSGAGKPPMFGDYEAQRHWQEITFNLPVKQWYFNSSDNNLQYWGLDYPPLTAYHSLLCAYVAKFINPDWIALHTSRGYESQAHKLFMRTTVLIADLLIYIPAVVLYCCCLKEISTKKKIANALCILLYPGLILIDYGHFQYNSVSLGFALWGVLGISCDCDLLGSLAFCLAINYKQMELYHALPFFCFLLGKCFKKGLKGKGFVLLVKLACIVVASFVLCWLPFFTEREQTLQVLRRLFPVDRGLFEDKVANIWCSFNVFLKIKDILPRHIQLIMSFCFTFLSLLPACIKLILQPSSKGFKFTLVSCALSFFLFSFQVHEKSILLVSLPVCLVLSEIPFMSTWFLLVSTFSMLPLLLKDELLMPSVVTTMAFFIACVTSFSIFEKTSEEELQLKSFSISVRKYLPCFTFLSRIIQYLFLISVITMVLLTLMTVTLDPPQKLPDLFSVLVCFVSCLNFLFFLVYFNIIIMWDSKSGRNQKKIS

SEQ ID NO: 14542 - DNA, 2087 bp, Homo sapiens
  CDS (50)..(1492)
aaggagctaccagcagaatagtgcccacactaaccattgcattgtgaagatgctgcaccggctggcccatgacctcaaaatggaagccctactttttcagctgtcagtcttctgcctcttcaatcgtctgcttagtgaccctgctgctggagcctacaaagagctagtgacttttgccaaatacatcctgggcaaattttttgcactggctgcagtcaaccaaaaagcctttgtggagctgttgttctggaagaacacagctgtggttcgagagatgactgagggctatggctccctggatgacaggtcttccagtcgcagagcacctacatggagccccgaagaagaggctcatcttcgggagctgtacctcgccaataaggacgtggaagggcaggatgtggtggaagccatcttggcccacctgaatactgttcctcgaacacgcaagcagatcatccaccatctggtacagatgggactggctgacagtgtcaaggacttccaaaggaaaggaacccatattgtactgtggacgggggatcaggagttggagctgcagcggctttttgaggaattccgggactcagatgatgtcctgggtcatatcatgaagaatatcacagccaaacgctcacgggcccgaatagtggataaactcttggctctggggctggtggctgagcggcgggagctgtacaagaaacggcagaaaaagttggcatcctccatcttgccaaatggagcggagtccctgaaagatttttgccaggaagatctggaagaagaggaaaacctgcctgaggaagacagcgaagaggaagaagaagggggctcagaagcagaacaagtccagggtagcttagtcctttcaaatgaaaaccttggtcaaagcctgcatcaggaaggcttttctatcctgctcctatggctccagaactgcctgatccgagcagctgatgatcgggaagaggatggctgctcccaggccgttccattggtgccactcacagaggaaaatgaggaagccatggaaaacgaacagtttcagcagctgttgcgcaagctaggggttcggccccctgcctctgggcaggaaaccttctggcgaattccagccaagctgagtcctacccagctccggagggcagcagcttctttgagtcaaccagaggaggaacagaagctgcagccagagctgcagcctaaagtccctggagagcaaggctctgatgaggagcactgtaaagagcaccgagcacaagccctgagggccctcttgctagcccacaagaagaaagcgggcctggcatccccagaggaggaagacgctgttggtaaagagccgctgaaggcagcacccaagaaacgacaattgctggacagcgacgaggaacaggaagaagatgagggcaggaacagagcaccagagttgggagctccaggaatccaaaagaagaaacgataccagattgaggatgatgaggatgactgaagagctaagaagcctaggggtagagatagacacgtttttagatggtgcattcaagtcagagttggaagggtcatacaggacccagaagctcctcttactggacagagcagtagaatcccaggctctttcacggatttaggctgagaaactttagcagcagtattggacttctctgctgtcagtctttgtttctcccagtttttatcggtatgccccagcagctctctggagatttagttctcttcttctaggaaccatttcttttggttattggagctccttagcaaataagaggagtgagtgaaatagagaaagcaccccggaccccttttattggtctgttcctttggctttctcttggaggtgggtcgcagcaccagatggggagctttatgacatgacaggcgggagttttgtaccacttttagaagataccagatgcctctgtcctcattttgtttcctatgatcatcctctagataccagatagaggcccattcctgcatttgagatagggttggaatatagtactctagatgatgaatgtgtttgctttgtgtttggtattaaacatgtaagattagaagttctc

SEQ ID NO: 14543 - protein, 481 aa, Homo sapiens [sequence omitted]

SEQ ID NO: 14544 - DNA, 2053 bp, Homo sapiens
cttgctacagccaaatggcatctcactttttaaagacgtttgcaattattagttgattcacagtacagaacaaggtataaaggaaaaaaccctgctaggtagtgttacacctgctaattggatgactttgccaagtcacctaaactctggatctcagtcaccttttgtcctacattcctctacccttctacttgaaaatttgaaatatgctgtctattcacttcatagtcattaaggaaatgttcttaattgtttttttgtttttgtttttttttgagatggagtcttgctctgtcgccagactggagtgcagtggcgcaatctcggctcactgcaacctccacctcctggattcaagcgattctcctgcctcagcctcccaagtagctgggattacaggcgcatgccaccatgcccagctaatttttttgtatttttagtagagatggggtttcaccgtgctggccaggatggtctcgatctcctgacctcgtgatccgcccacctcggcctcccaaggtgctgggactacaggcatgagccaccgtgcccggcctcttagttgttttttaaaaattatgtacattttaagtattttgcaatgaagaaattcatgcaaacaagaaacacatttcttataccatcaaatttgtgtagcatgtaataaaaataactatttgtattaaaattaggtaaacttcagcacaacccatttataactttgttaattttgtttactatttcagttttctgtatttccatatgtaagtcaccatttcttttaataatatgcatgaaaatgtaatatagggccaaatgtggtggctcgtgcctgtggtcccagcactttgggaggccgaggtgggaggatcacttgagcccaggagtttgcgaccagcctgggcagaatagcaagacccagtctctaacatatacatatacatatagatatatatgtaatatagaagggttattgtgtgttatattactttccagggacattcaaatgttttacattactttaagaatctttacttgatataagaacaaagtataagggtttaaaagttgtttttattaaacatactatataaatgggttaatggtctatttttcagtttttaccaaaatcatgtgtctcactttttgtcttcgctttttaaagaactggttcatgaaattagtgttagttcataaattgtttaagaagttccttttccattgaattagattgctgtaaaagggagaaaaagggaagcttcccataagaatagtttgaaaacaaattgacttgttcatttccatattatctgcttgatgatatggagccagtgtcaatttttctgttagtgaatgttttggactagatgttcccgtccccaaaatttatatgatgaagcccttattaatgtgatggtatctggagatggggctcctccaaccatcccatcctggaacatataagccagaaagaaagtagtctccagaaacagaccatgctgacaccttgagtttgaacttctaatcaccagaactgtgaggaaataaatttctggtgtttaaaccacccagtcctatggtattttgttagggcagtctgagctacgacagtgatataagatagatagctagtaaggtaaacttttcaaaggcaagagaggaagatatacaagaaattgaaagaataattaagtcagtaagaggtaatattcagttttggcaaactcctctgacttgagttgaaaatacttttttttttaagagtaaaaaccaaataactaattctaattggcaaaaaaaggtaaataaataaacatcctaagtagctgctgaaatttccgttgtgtcttatagtttctttaggtctgtgttcctaagatgcttaaaatttttatcatgaaaaatcctattttctctatacccttcctgtactgttctattttggaaccagagaatcaataactggcttggtaatgagctcattgtccttaacttttgctttattgattcacaatacacttactgaaatgtaataaactattcataaacttgc

SEQ ID NO: 14545 - DNA, 2663 bp, Homo sapiens
  CDS (379)..(1278)
aaaaaaaaaagaaaaaaaaaaaactcttgtgtagcctgaggcggcggtagcatggagggggagagtacgtcggcggtgctctcgggctttgtgctcggcgcactcgctttccagcacctcaacacggactcggacacggaaggttttcttcttggggaagtaaaaggtgaagccaagaacagcattactgattcccaaatggatgatgttgaagttgtttatacaattgacattcagaaatatattccatgctatcagctttttagcttttataattcttcaggcgaagtaaatgagcaagcactgaagaaaatattatcaaatgtcaaaaagaatgtggtaggttgatacaaattccgtcgtcattcagatcagatcatgacgtttagagagaggctgcttcacaaaaacttgcaggagcatttttcaaaccaagaccttgtttttctgctattaacaccaagtataataacagaaagctgctctactcatcgactggaacattccttatataaacctcaaaaaggactttttcacagggtacctttagtggttgccaatctgggcatgtctgaacaactgggttataaaactgtatcaggttcctgtatgtccactggttttagccgagcagtacaaacacacagctctaaattttttgaagaagatggatccttaaaggaggtacataagataaatgaaatgtatgcttcattacaagaggaattaaagagtatatgcaaaaaagtggaagacagtgaacaagcagtagataaactagtaaaggatgtaaacagattaaaacgagaaattgagaaaaggagaggagcacagattcaggcagcaagagagaagaacatccaaaaagaccctcaggagaacatttttctttgtcaggcattacggaccttttttccaaattctgaatttcttcattcatgtgttatgtctttaaaaaatagacatgtttctaaaagtagctgtaactacaaccaccatctcgatgtagtagacaatctgaccttaatggtagaacacactgacattcctgaagctagtccagctagtacaccacaaatcattaagcataaaaccttagacttagatgacagatggcaattcaagagatctcggttgttagatacacaagacaaacgatctaaagcagatactggtagtagtaaccaagataaagcatccaaaatgagcagcccagaaacagatgaagaaattgaaaagatgaagggttttggtgaatattcacggtctcctacattttgatccttttaaccttacaaggagatttttttatttggctgatgggtaaagccaaacatttctattgtttttactatgttgagctacttgcagtaagttcatttgtttttactatgttcacctgtttgcagtaatacacagataactcttagtgcatttacttcacaaagtactttttcaaacatcagatgcttttatttccaaacctttttttcacctttcactaagttgttgaggggaaggcttacacaacacattctttagaattggaaaagtgagaccaggcacagtggctcacacctgtaatcccagcacttagggaagacaagtcaggaggattgattgaagctaggagttagagaccagcctgggcaacgtattgagaccatgtctattaaaaaataaaatggaaaagcaagaatagccttattttcaaaatatggaaagaaatttatatgaaaatttatctgagtcattaaaattctccttaagtgatacttttttagaagtacattatggctagagttgccagataaaatgctggatatcatgcaataaatttgcaaaacatcatctgaaatttaaatttgtcctacatttgtacttgctaaatctggcagccttaattattacacaactataacacaacacaaacagtaatctctcccctagtttagagtcctttgcatgaaatttagcaaatctatcattttgaatacagtacaatcctggtaatccagtgtatttgggataggccagtggaactcagaactgatacatatatacatgtatgtctatcatattcaatgtctattaggtgtaaatcatctcttcatgtaaaagacactactggtttgaggatagactcgtctaggaatattttgtccttctgtgacagcaccactatccatcccaatgtaacatttctacaaagggaagatatcttaaccaggcatacttatatttgctagttggaaaatcattctgaacagttttaattccattctattgaatggattattgtatgagctatttggggatcagatataaatgacaatcacacagaaccacatttattcaacatagataaaatgtgatgagtgttaacattttaaataagcaatctgcttaatggacattggtatgaaggggaagtgtcattctttacctcactcctcaaacacttttctatccaaaggttggtttgagtcagtattggcatcatacaaccacttactgtaaaataagtttattagtggtaacgtgatagaatttattcccgatatctgatgttacaaactttagggtccttgagatatgcaggatccttgtatgtaactggcataaaccctgtaaagagataattaaagttcttgacaaaacat

SEQ ID NO: 14546 - protein, 300 aa, Homo sapiens [sequence omitted]

SEQ ID NO: 14547 - DNA, 2252 bp, Homo sapiens
  CDS (257)..(2251)
agaggactatgaggcgggcgccaactgcttgggccgcagggcgggaggcagcgcgggagtggggcgttgaggggccggcctagcttggggctctggccttgcgtcttccgaccgaatcaccgctcctgagcccggtgcggggctgccgctatcgcctggccgtgggtgccggagcggccgggttgcgactcagcgttcttgggtgggcgcgggcggcgtctccgcggcgggcatcccccgaggccgccctcgggccatgatcgactccgtgaagctgcgccgcgacagcgcggcggacttcttctcccactacgagtacctgtgcgcgctgcagaactccgtgccgctgcccgccgtgcgcgcctgtctccgggagggcgtgctggatttcaacgccgaccgcctccgcggggtggactgggcgcctctgctgagcaccctcaagatcaataaagacctgcccttggtctccatcaagagcttcttccagccctggctgggggacacaggttctgacatgaataaattttgcagaagtcgtgttcctgcgataagatacaaagatgtgaccttccagttgtgtaaagctcttaaaggctgtttaagtatatcaagtgtgctaaagaacctggagctaaatggactaattctgagagagagggatttaactattctagcaaagggattgaataaatcggcttctttggtgcacctgtctcttgcaaattgtccaattggagatggaggtttagaaattatttgtcaaggtataaagagctctatcactcttaagacagtcaacttcacaggatgtaatctgacatggcagggagcagatcacatggccaagatcttaaagtatcagaccatgagaaggcatgaagaaacctgggctgagagtcttcgctataggagacctgatcttgactgtatggctggcttaagacgtatcacactgaatggctacacacttattggtgacctaggtgcatgtgcttttgcagactctctcagtgaggatttatggctgagagctcttgacctgcaacagtgcggcctcaccaatgaaggagcaaaggctttgctagaggcccttgaaaccaatacaactctggtcgttctggatataagaaaaaatccactcattgatcattctatgatgaaagcagttatcaaaaaagtcctccagaatggaaggagtgccaaatcagagtaccagtggataacttctccatcagtgaaggaaccatccaaaactgctaaacagaaaaggagaactataattctaggaagtggtcacaaaggaaaagctactattagaattggattggctacaaagaaacctgtaagtagtggcagaaaacactcccttggtaaagaatattatgcgcccgcgcctcttccacctggtgtgtctggtttcttgccgtggcgtactgcagaacgtgcaaaaagacacaggggtttcccattaatcaaaacacgtgatatatgtaatcagttgcagcaaccaggttttcctgtgactgtgacagtagagagtccttcatcctctgaagttgaagaggttgatgattcttcagagagtgttcatgaagtgcctgagagaactagtatagaacaagaagcattacaggaaaaactggaggagtgcctaaagcagttaaaggaagaaagagtgataaggcttaaggttgataaacgagtcagtgagctggaacatgaaaatgcccagttaagaaatataaatttctctttgtctgaagcccttcatgcacagtcattgacaaatatgatcctggatgatgaaggtgttttgggcagcattgagaattcttttcagaagtttcatgctttcttggatctccttaaagatgctgggcttgggcagcttgccacaatggctgggatagatcagtcagattttcaattactaggtcatccccagatgacttctactgttagtaatccacctaaagaagaaaagaaggcgcttgaagatgaaaaaccagaaccgaagcagaatgccctagggcaaatgcaaaatatccagtttcagaaaattacaggtgatgctagaattcctttgcctctcgactcctttcctgtcccagtttctactccagagggcttaggaacttccagcaacaacctaggagtcccagctactgagcagcggcaggagtcttttgaaggattcattgctagaatgtgttctccttcaccagatgcgacttctggaactggaagtc

SEQ ID NO: 14548 - protein, 665 aa, Homo sapiens
MIDSVKLRRDSAADFFSHYEYLCALQNSVPLPAVRACLREGVLDFNADRLRGVDWAPLLSTLKINKDLPLVSIKSFFQPWLGDTGSDMNKFCRSRVPAIRYKDVTFQLCKALKGCLSISSVLKNLELNGLILRERDLTILAKGLNKSASLVHLSLANCPIGDGGLEIICQGIKSSITLKTVNFTGCNLTWQGADHMAKILKYQTMRRHEETWAESLRYRRPDLDCMAGLRRITLNGYTLIGDLGACAFADSLSEDLWLRALDLQQCGLTNEGAKALLEALETNTTLVVLDIRKNPLIDHSMMKAVIKKVLQNGRSAKSEYQWITSPSVKEPSKTAKQKRRTIILGSGHKGKATIRIGLATKKPVSSGRKHSLGKEYYAPAPLPPGVSGFLPWRTAERAKRHRGFPLIKTRDICNQLQQPGFPVTVTVESPSSSEVEEVDDSSESVHEVPERTSIEQEALQEKLEECLKQLKEERVIRLKVDKRVSELEHENAQLRNINFSLSEALHAQSLTNMILDDEGVLGSIENSFQKFHAFLDLLKDAGLGQLATMAGIDQSDFQLLGHPQMTSTVSNPPKEEKKALEDEKPEPKQNALGQMQNIQFQKITGDARIPLPLDSFPVPVSTPEGLGTSSNNLGVPATEQRQESFEGFIARMCSPSPDATSGTGS

SEQ ID NO: 14549 - DNA, 2234 bp, Homo sapiens
  CDS (325)..(1839)
aaaaaaaaaaaaaaaaaaaaaaaaaaaaaaaaaagaattgactcgcgccctcgtccgccgccataggccagtgccggggtttaagggccaggaaaggaagcattcagggaatttaggtgtagccagaagaaaatcaggtcctggctccccagaagcaagagagttcaaatgaaggaaggaggaggttcctggatgtggatgtcatcatttctgggaacactcttaaatggagactcagatttcttagccaaaatttagggaggatccagaagaaaccaaagacgaagcatcccagttcttgggtatttcctgaaacagaagaaaatgacaaaggcccaggaatcagtgaccctggaggatgtggctgtggacttcacctgggaggagtggcagttcctgagccctgctcagaaggacctgtaccgggatgtgatgttggagaactacagcaaccttgtgtcagtggggtatcaagccggcaaacctgatgccctcaccaagttggaacaaggagaaccactatggacactagaagatgaaatccacagtccagcccacccagaaattgagaaagctgatgatcatctgcagcagcccttgcaaaaccaaaaaatactgaagaggacgggacaacgctatgaacacggaagaactttgaaatcatatttaggtttaaccaaccagagcagaagatacaacagaaaggagcctgctgagtttaatggagatggagcttttctccatgataatcatgaacaaatgcctacggaaattgaattccctgaaagtagaaaacccatcagcaccaagtcacaattccttaaacatcagcaaacacacaacatagagaaagcccatgaatgcactgactgtgggaaagctttcctcaagaagtctcagctcactgagcataagagaattcatacaggaaagaaaccccacgtgtgtagcttgtgtgggaaagccttctacaagaagtacaggctcactgaacacgagagagctcacagaggagagaaaccccacgggtgtagcttgtgtgggaaagccttctacaagaggtacaggctcactgaacacgagagagctcacaaaggagagaaaccatacgggtgcagtgaatgtgggaaagccttccccaggaaatctgagcttactgaacatcaaaggattcacacgggaattaagccccatcaatgcagcgaatgtgggagagctttctccagaaaatcactactcgttgtacatcagcgaactcatacagaagagaagcctcatacatgcagtgaatgtggaaaaggcttcattcagaagggcaatctcaacatacatcaacgaactcacactggagagaaaccttatggatgcattgactgtggcaaggccttcagccagaagtcttgccttgtagcacatcagagatatcatacaggaaagactccctttgtatgtcctgaatgtgggcaaccctgttcacagaagtcaggactcattagacatcagaaaattcactcaggagagaaaccctataaatgcagtgactgtgggaaagccttccttacaaagacaatgctcattgtacatcacagaactcacacgggagagagaccctatggctgtgatgagtgtgagaaagcttacttctatatgtcttgccttgttaaacataagagaatacactcaagggagaaacggggggattcagtgaaggtggaaaatccttccacagcaagtcacagcttaagtcctagtgaacatgtgcaggggaaaagccctgttaatatggtaactgtggcaatggtggcagggcagtgtgagtttgcccacatcctgcattcatgataaacagtttgctgtttgatcatatagcctccagcggaatgctgagtttgtcatgtcccatgggcctttggctccctgcactaatatgtatagtagggtttacaagatatgaaatatattttacttttttatatcttataaacctcactacccctcccacaatattgtttttcatttactatcttgatcatagagtttggctggggaggggggcagttttagaggcttccacttggtgttcctcagaatgatatctcttactccgggggccaaggtaggggttagcttttgttctctttgtagtttagattgtatctcttgccttgttcaagttcacaaatctttttgtgtatacacatatgtacatgaaaatgatgttcatgctttttatt

SEQ ID NO: 14550 - protein, 505 aa, Homo sapiens
MTKAQESVTLEDVAVDFTWEEWQFLSPAQKDLYRDVMLENYSNLVSVGYQAGKPDALTKLEQGEPLWTLEDEIHSPAHPEIEKADDHLQQPLQNQKILKRTGQRYEHGRTLKSYLGLTNQSRRYNRKEPAEFNGDGAFLHDNHEQMPTEIEFPESRKPISTKSQFLKHQQTHNIEKAHECTDCGKAFLKKSQLTEHKRIHTGKKPHVCSLCGKAFYKKYRLTEHERAHRGEKPHGCSLCGKAFYKRYRLTEHERAHKGEKPYGCSECGKAFPRKSELTEHQRIHTGIKPHQCSECGRAFSRKSLLVVHQRTHTEEKPHTCSECGKGFIQKGNLNIHQRTHTGEKPYGCIDCGKAFSQKSCLVAHQRYHTGKTPFVCPECGQPCSQKSGLIRHQKIHSGEKPYKCSDCGKAFLTKTMLIVHHRTHTGERPYGCDECEKAYFYMSCLVKHKRIHSREKRGDSVKVENPSTASHSLSPSEHVQGKSPVNMVTVAMVAGQCEFAHILHS

SEQ ID NO: 14551 - DNA, 2043 bp, Homo sapiens
ttggagtcttttaactgtgtctctcaattccaggcatgtgcacaggtccgtggcatgaattatttcagccaaattgaagtctggagatgtgcctgaaaattagattaggacagatgttatgcttattccatatactttctacattatagcctttcttttgtttactaaaaaggcatagtcactcgcaaatctagtattgaatacattcaaaatccattgaagataaccaaataagcttttaaattgtaggacattcttactatatcccacttactatactaaaactagttttagaactccttcacttttacaattaaattgagattccatgtaccactagtcatatatgactgtgtacatttgtatgtatacacatgtaaagtcactaaacatgcacacacacacacacaaatgcacacactcatacatacttaataggaacactaagaaaaagcctgcagatgtcttttctttaaaaacaaagatgtctttagaaactacatgtatttatagctccaaaaaattaaaagttcattcctagtgaaagcaaaacatgaaaggtagtttattaaagactcaaagctaatttttagttatttacattttagttactacctcatttgtctcctggaagtctttcttttctaaatgctacattctgcagacatattcagcccatgcttttctagctcagttattcctacgcaaaaagttaatttaatatcctacaacatggatgaaaatatcaaaaacatgcttgaaagatgccagtcataaaagatcacctattttatgattccacatatacaaagtatccagaataggacaacctgcagggacagaaagtaatttagtagttgcctatggccaggggtatgggggggggtacagtgggaagggtgctaaaggctacaaagtatctttttgagatgatgaaaatattctaaagattgtggtgatggttgcacaattctgtgaatattctaaatattcacagttatttaaatagtacatttaacttaactaaaaaaggaaaacatcagttttgcctatatttgaatagccacatcagatcttgactgactgataaaaggacttcattctgtcataccattggtctccattaaaaacacaaacatacacaatagatgtatttgtatctcacacagatgatctcattaatctcgtgagaatgtcactcactgcttaataactgttgaccatgaacatgtttatataacctcttgaagcctcaagtatcttcagctataaaatggggttgctcatacaaggacagttctcataggattattgagaaaattaagggaatctatgtaaagttcttagtgtagtagctgactcacattatatgctcacaaaagttaataattgttattcatcatcttgtatctctaatccattttagttttagctaaatagtggttgtcagatgacaagtaaaagaaggaaagctgaggatatttgtttttattaaccatcatctattgagtttcaataaaatcctctgaagtcaggtatgtactgctcacctgctggcaaagataatattagtagttagtggttccattttttctgcattccaatcaggtgtaaaaagccattatggatccagtgtttgtcttgctttcccaaactgggccattcacttgctaaagtattcgaagcagagttacatgtttcctggtgtttgtcttgctatagtgcacttgagtcttgagcactgaaggaacttcagtgactagtgtattcttcactttcctactataaggacttaataaaatagagcatatgtgtttaaacccagtgctcaatacatagcaagctctgaattcatgctagctgctattattaacctttcgactttgtaaaacgtagttatctttgtgactaagaatataagaatacaaatggccaatactaaaagttatgtatttaatgagtcatattttcacagtaagaaggaaaagtcctacaacttttttgttatacaaaatatgaaaactgcattactggtctaacaat

SEQ ID NO: 14552 - DNA, 2656 bp, Homo sapiens
  CDS (13)..(1725)
acttgccgaagcatgaacgaagccatccctagtggcaaggagacttccatcgagctggatgtgcaccaccctcctacagtgaccctgtccattgagccacagacggtgcaggagggtgagcgtgttgtctttacctgccaggccacagccaaccccgagatcttgggctacaggtgggccaaagggggtttcttgattgaagacgcccacgagagtcgctatgagacaaatgtggattattcctttttcacggagcctgtgtcttgtgaggttcacaacaaagtgggaagcaccaatgtcagcactttagtaaatgtccactttgctccccggattgtagttgaccccaaacccacaaccacagacattggctctgatgtgacccttacctgtgtctgggttgggaatccccccctcactctcacctggaccaaaaaggactcaaatatggggcccaggcctcctggctccccacccgaggctgctctctctgcccaggtcctgagtaacagcaaccagctgctgctgaagtcggtgactcaggcagacgctggcacctacacctgccgggccatcgtgcctcgaatcggagtggctgagcgggaggtgccgctctatgtgaacgggccccccatcatctccagtgaggcagtgcagtatgctgtgaggggtgacggtggcaaggtggagtgtttcattgggagcacaccacccccagaccgcatagcatgggcctggaaggagaacttcttggaggtggggaccctggaacgctatacagtggagaggaccaactcaggcagtggggtgctatccacgctcaccatcaacaatgtcatggaggccgactttcagactcactacaactgcaccgcctggaacagcttcgggccaggcacagccatcatccagctggaagagcgagaggtgttacctgtgggcatcatagctggggccaccatcggcgcgagcatcctgctcatcttcttcttcatcgccttggtattcttcctctaccggcgccgcaaaggcagtcgcaaagacgtgaccctgaggaagctggatatcaaggtggagacagtgaaccgagagccacttacgatgcattctgaccgggaggatgacaccgccagcgtctccacagcaacccgggtcatgaaggccatctactcgtcgtttaaggatgatgtggatctgaagcaggacctgcgctgcgacaccatcgacacccgggaggagtatgagatgaaggaccccaccaatggctactacaacgtgcgtgcccatgaagaccgcccgtcttccagggcagtgctctatgctgactaccgtgcccctggccctgcccgcttcgacggccgcccctcatcccgtctctcccactccagcggctatgcccagctcaacacctatagccggggccctgcctctgactatggccctgagcccacaccccctggccctgctgccccagctggcactgacacaaccagccagctgtcctacgagaactatgagaagttcaactcccatcccttccctggggcagctgggtaccccacctaccgactgggctacccccaggccccaccctctggcctggagcggaccccatatgaggcgtatgaccccattggcaagtacgccacagccactcgattctcctacacctcccagcactcggactacggccagcgattccagcagcgcatgcagactcacgtgtaggggccagagcctggctggggcatctctgcggggcagaggagaaggctttcacagctgttccctgatattcaggggcattgctcattgctcccttctcggaccagccttcttcctcccaccatggcaggtggggagcaggtctcccagaaacaccccgtcccgaggatggtgctctgtgcatgccccagcctcctgggcctgcccttccctcttcttcgggaggatgtgtctcttctgacctgcactcttgcctgaccctagaatggggacagggaaagtgaaggttagggaaagcagaggggggcactttttagcattccctttctatcccacccctctgatctcccataagtggaaatgggggtacccagggatgggcaggctttggcctagggacatgaagtatgggagtgggtggctgtggcacagacaggtggaaaacgggatagcctggccagtccctctgttgtctgcattcgtgccctgggtgcctctctccttcctcagggtactgcagaagggagcgaacagggtactgttcgctcttgtctacagaacagccctggcactgcattcaaatccagtcttcattcagctgggatcaaaatgccagtcaccttggctacccactgtggacagctgtctgtcagcatgcagagggatccaggaatccccccggcagcacggcccgctttccttctcctccatgctgggccagccagataagtcagggtcctggtggagaaagaaaggctaggaccatgtcctcattgacccagatactgctgtgtgctgcacagcagtgaaccaacactagagggagccacacaagcctcctctccccagtctgccccacttcctggctttaactcttgagctggtttggggagtggtgaggtaggggtgggggtgctgtaggctctttttc

SEQ ID NO: 14553 - protein, 571 aa, Homo sapiens
MNEAIPSGKETSIELDVHHPPTVTLSIEPQTVQEGERVVFTCQATANPEILGYRWAKGGFLIEDAHESRYETNVDYSFFTEPVSCEVHNKVGSTNVSTLVNVHFAPRIVVDPKPTTTDIGSDVTLTCVWVGNPPLTLTWTKKDSNMGPRPPGSPPEAALSAQVLSNSNQLLLKSVTQADAGTYTCRAIVPRIGVAEREVPLYVNGPPIISSEAVQYAVRGDGGKVECFIGSTPPPDRIAWAWKENFLEVGTLERYTVERTNSGSGVLSTLTINNVMEADFQTHYNCTAWNSFGPGTAIIQLEEREVLPVGIIAGATIGASILLIFFFIALVFFLYRRRKGSRKDVTLRKLDIKVETVNREPLTMHSDREDDTASVSTATRVMKAIYSSFKDDVDLKQDLRCDTIDTREEYEMKDPTNGYYNVRAHEDRPSSRAVLYADYRAPGPARFDGRPSSRLSHSSGYAQLNTYSRGPASDYGPEPTPPGPAAPAGTDTTSQLSYENYEKFNSHPFPGAAGYPTYRLGYPQAPPSGLERTPYEAYDPIGKYATATRFSYTSQHSDYGQRFQQRMQTHV

SEQ ID NO: 14554 - DNA, 2474 bp, Homo sapiens
  CDS (65)..(2464)
gaaaccatggtcaggtggtctcttacctgttaaaatcaggagctgacaaagaaaagttggcgacatggtggcacccgtgctggagacttctcacgtgttttgctgcccaaaccgggtgcggggagtcctgaactggagctctgggcccagaggacttctggcctttggcacgtcctgctccgtggtgctctatgaccccctgaaaagggttgttgttaccaacttgaatggtcacaccgcccgagtcaattgcatacagtggatttgtaaacaggatggctccccttctactgaattagtttctggaggatctgataatcaagtgattcactgggaaatagaggataatcagcttttaaaagcagtgcatcttcaaggccatgaaggacctgtttatgcggtgcatgctgtttaccagaggaggacatcagatcctgcattatgtacactgatcgtttctgcagctgcagattctgctgttcgactctggtctaaaaagggtccagaagtaccaatattagcatgtggcaatgatgattgcagaattcacatatttgctcaacaaaatgatcagtttcagaaagtgctttctctctgtggacatgaggattggattagaggagtggaatgggcagcctttggtagagatcttttcctagcaagctgttcacaagattgcctgataagaatatggaagctgtatataaagtcaacatctttagaaactcaggatgacgataacataagactgaaagaaaatacttttaccatagaaaatgaaagtgttaaaatagcatttgctgttactctggagacagtgctagccggtcatgaaaactgggtaaatgcagttcactggcaacctgtgttttacaaagatggtgtcctacagcagccagtgagattattatctgcttccatggataaaaccatgattctctgggctccagatgaagagtcaggagtttggctagaacaggttcgagtaggtgaagtaggtgggaatactttgggattttatgattgccagttcaatgaagatggctccatgatcattgctcatgctttccacggagcgttgcacctttggaaacagaatacagttaacccaggagagtggactccagagattgtcatttcaggacactttgatggtgtccaagacctagtctgggatccagaaggagaatttattatcactgttggtactgatcagacaactagactttttgctccatggaagagaaaagaccaatcacaggtgacttggcatgaaattgcaaggcctcagatacatgggtatgacctgaaatgtttggcaatgattaatcggtttcagtttgtatctggagcagatgaaaaagttcttcgggttttttctgcacctcggaattttgtggaaaatttttgtgccattacaggacaatcactgaatcatgtgctctgtaatcaagatagtgatcttccagaaggagccactgtccctgcattgggattatcaaataaagctgtctttcagggagatatagcttctcagccttctgatgaagaggagctgttaactagtactggttttgagtatcagcaggtggcctttcagccctccatacttactgagcctcccactgaggatcatcttctgcagaatactttgtggcctgaagttcaaaaactatatgggcacggttatgaaatattttgtgttacttgtaacagttcaaagactctgcttgcctcagcttgtaaggcagctaagaaagagcatgcagctatcattctttggaacactacatcttggaaacaggtgcagaatttagttttccacagtttgacagtcacgcagatggccttctcacctaatgagaagttcttactagctgtttccagagatcgaacctggtcattgtggaaaaagcaggatacaatctcacctgagttcgagccagtttttagtctttttgccttcaccaacaaaattacttctgtgcacagtagaattatttggtcttgtgattggagtcctgacagcaagtatttcttcactgggagtcgagacaaaaaggtggttgtctggggtgtgtgcgactccactgatgactgtattgagcacaacattggcccctgctcctcagtcctggacgtgggtggggctgtgacagctgtcagcgtctgcccagtgctccacccttctcaacgatacgtggttgcagtaggattggagtgtggaaagatttgcttatatacctggaaaaagactgatcaagttccagaaataaatgactggacccactgtgtagaaacaagtcaaagccaaagtcatacactggctatcagaaaattatgctggaagaattgcagtggaaaaactgaacagaaggaagcagaaggtgctgagtggttacactttgcaagctgtggtgaagatcacactgtgaagatacacagagtcaataaatgtgcactgtaatggactt

SEQ ID NO: 14555 - protein, 800 aa, Homo sapiens [sequence omitted]

SEQ ID NO: 14556 - DNA, 1890 bp, Homo sapiens
  CDS (62)..(1003)
gtgaagtcgcgcggcttccacccacgcagtgttctaagtgaaggccagaaactcgctcgccatgtcggctgcagaggcggggggtgttttccacagagccaggggcaggaccctggccgcgtttcccgcagaaaaggaaagcgaatggaaaggcccattctacttcatcctgggcgcagacccacagtttgggctgatcaaggcctggtccactggggactgtgacaatggcggtgacgaatgggaacaggagatccgtctaactgagcaagccgtccaggccatcaacaagctgaaccccaaacccaaattcttcgttctgtgcggcgacctcatccacgccatgccagggaagccgtggcggacggagcagacggaggacctgaagcgagtgcttagggcagtggacagggccatcccactggtccttgtcagcggcaaccatgacattggcaacacccccacggccgagaccgtcgaggagttctgccggacttggggatatgactacttcagcttctgggtcgggggcgtcctgttcctggtcctcaactcccagttctacgagaacccctccaaatgccccagcctgaagcaggctcaggaccagtggctggacgagcagctgagcatcgcgaggcagcggcactgccagcatgccatcgtcttccagcacatcccgctgttcctggagagcatcgacgaggacgacgactactacttcaacctcagcaagtccactcggaagaagttggcagacaagttcatccacgcaggtgtcagagtcgtgttctcaggccactaccacaggaatgccgggggtacctaccagaacctcgacatggtggtgtcatctgccattggatgccagctgggcagagacccccacgggctccgagtcgtggtggtcaccgccgagaaaattgttcaccgatactacagtctagatgagctgagtgagaaaggaatagaagacgatctcatggatttgatcaagaaaaaatgacgctccttcccgttcccgttcacttttcacttgcactatttttttattttgccagaaacagcagctgcacacaacctcttgctgaaatataaaaatagcccaggcaggtttgtgaatttatgtccttttgcataaatcagagagctggggccctgtcctgaattatattcaaaatagaactgcatttcctttaaaatggagcgaatgatcctggaaatcagtttttaaaatattagactatctctgcatggatgtttgaataaattctcctaatgctgtgtttctcgactccacttttgaattggattgtattctggttagcatatggtcaaagtctgcctatcgacctcaattccaatctgacagccaagtatgatctttgataattccttaaacaaactacacctgattgtattaaattgtggtcacgattcccaaaacgctaggcaaaacaaagttcatctcctttcctttccagcggaacgaacagctgtctgccttgttgtgagagccatgcagacttattttgacaaggagccaagtaggcaccatttactgttcaattctgagacttctgatgataggaacagaatgcagttgatacagctcggagcttaaatttgccttcctgggtgcctagaaaagtcacctttgcacataaattggccatttctgaaaatctcctccaagagactgaaaccaaagctctaaaacgccgcttcttcagtctctggggagcacgttgagttggttcacatccacattctggctgtgtagccactccacagatgggtggtctcttgggatcagaatgcccctccactcatgagactcttcattttgtccactttgacaggaaaagtgggaatgtatgcagagctctc

SEQ ID NO: 14557 - protein, 314 aa, Homo sapiens [sequence omitted]

SEQ ID NO: 14558 - DNA, 2272 bp, Homo sapiens
  CDS (114)..(1703)
aggatgagtgtactaagcttctggttggcaatattgttatcacctgatataacaatcgtacctatcgtattgatgatgtggattggaataagactccaaaggatagcttcacgatgtctgatgggaaagagatcacattcttggaatactacagcaaaaattatgggatcacagttaaggaagaggaccagccattgctgattcacaggcccagtgagagacaggataatcatgggatgctgctaaaaggggaaatcctgctgctgcctgagctttcttttatgaccggaatcccagagaagatgaagaaggacttcagagccatgaaggatttggctcagcaaatcaatctgagccccaagcaacaccatagtgctttggaatgcttgctgcaaagaattgcaaagaacgaggcagccaccaatgaactgatgcgttgggggctccgtctgcaaaaggatgtacataagattgaaggacgtgttctgccaatggaaagaattaacttaaaaaatacttcgtttatcacatctcaggaactaaactgggttaaggaagtaaccagagacccttccatcttgactatccccatgcatttctgggcacttttttacccaaagagagcaatggaccaggctcgagaactggtcaacatgttggagaagatagccggccccattggcatgcgtatgagcccaccggcctgggttgaactaaaggatgaccgaatagagacttatgtcagaaccattcaatccacgttaggagctgaggggaagatacagatggttgtttgcatcatcatgggcccacgtgatgatctctatggggccatcaagaagctgtgctgtgtgcagtccccagtgccctcccaggttgtcaatgttcgaaccattggtcagcccaccaggcttcggagtgtggcccagaagattttacttcagattaactgtaaattgggtggtgagctctggggagtggatattcctctgaaacagttaatggtgatcgggatggatgtttaccatgaccccagtagaggcatgcgctccgtggttggcttcgtggcaagcatcaatctcaccctcacaaaatggtattcccgggtggtgttccagatgccgcatcaggagattgtggacagcctgaagctatgcctcgtgggctccttaaaaaagttttatgaggtgaaccactgtctaccagagaagattgtggtgtaccgtgatggagtgtctgatggccaactgaagacagttgccaactatgagattcctcaactacagaagtgttttgaagcttttgagaattatcagcccaagatggtggtgtttgtagttcagaagaaaatcagtactaatctatatctggctgctcctcagaactttgtaactcccactcctggaactgtggtagatcatacaataacaagctgtgagtgggtggatttctatcttcttgcccatcatgtacggcagggctgtggcattcctacgcattatgtctgtgttctcaacaccgcaaacctgagccctgatcatatgcagaggctgactttcaaactgtgccacatgtactggaattggcctggcaccatcagagttccagctccttgcaagtatgcccacaagctagctttcctgtcaggacacatcttgcatcatggaccagccatccagctgtgcgagaacctgttcttcctgtgactgcacagcttggagatgggctggtgagaagaaaggcggcctcagaactcagctgtgactcttgcagaatcaacagagactgaagtgggcttttgtgttataattttccctttctccaaccctgtagaataagatttctttcttgtcttttaaacctaatatcaccaagaagcaagtttctgagtaacagctgaaaatggccttgttgcctgtgtagagcaagttacggtggtactgccactctgcaggtggagcgggtgactctgggggaccattaagacctccagaccgggtgcggtggttcacacctgtaatccaagcactttgggaggccgaggcgggtggatcatgaggtcaggagatcaagaccatcctggccaacatggtgaaaccccgtctctactaaaatacaaaaaaattagccgggtgtggcggtgcacgcctgtagtcccagctactcaggaggctaaggcaggagaatcgcttgaacccgggaggtggaggttgcagtgagccgagatcacgccactgcactccagcctgttgacaaagcaagactctgtctc

SEQ ID NO: 14559 - protein, 530 aa, Homo sapiens [sequence omitted]

SEQ ID NO: 14560 - DNA, 2241 bp, Homo sapiens
  CDS (3)..(530)
ttatgttacaaaatttacaagaacggttagaaaggaaaaagagaatagaagaaattatgaagcggacaagaaagacagatgtgaatgcctcaaaggtcacagaaacatccagccatgacatatatgaagaggctgaggctgacaacgaagaaagcgacaaggactcattgaatgaaatgtttccatcagccattctaaatggcacaggctcacctaccaaatttaaaatgccgttcaacaatgccaagaaaatgacacacaagctggtatttctagaagatggtaccagccaggtccgtaaagagccaaaaacatattttaatggcgatttgaaaaacttcagacaaaaaagcatgaaagacacttcaatacaggaagtagtttcaagaccatcttccaaaagaatgaccagtcacacaacgaaaaccagaaaggcggatgaaaccaacaccaccagcagatcctctgcacaaacaaaatctgaaggattccatgacatcttgccaaagtcctcagacacctttagacaataagagaagaagcaaacctgtttctcctcatttggatatgtaaaccttactcagcctgggagatgaatacatcttccactctggataactcaactcctgggcccatcagtcctcaaatttttctgcttctgacttgaacctggtaaaggaagtgacaccgaaaaattgaaagaaactgtcaaaaggccactttgatgtatatctcagatgttaaagtcatcttattctcttgtgtctaagcaagagttctaagtaaagagtggtttttgttttctttggaaaatcatcattgtctctcattcttgtgttgtcccaccaatgtgtttgctggagtgagtgcatcaaggatgctttcctgaaactgtaactgtggagtttctagaagaatctgattgcagaactaattctctttcagtatatatttgaaatcttaaagtaatgctttttctttttctttttcttttttttttttttgagacggagtcttgccctgtcgcccaggctgcagtgcagtggcacaatctcggctcactgcaacctccgcctcctcatctcaagcaattctcctgtctcagtctccccagtagctgggattacaggcatgtgccaccacacctggctaatttttttgtattttagtagagatagggttttaccatgttcaccaggctagtctcgaaatcctggcctcaagagatccacccgtcttggcctcccaaagtgttgggattacaggtgtgagccactgcacccagccaagtaatgctttttctgtgtaccagtgacaattttgacagctaaaaactcacagttgatcttgtagagaacataatagattatgcaagggccgcaggatcgctcacaagagctgtcagattgtttctaatataaaaataccaaaggttgcaaaatccagcaaattgtattttactgtgatatatgtatatttttaactctacccatctgtgccagtgagtacacaggcactaataacctgaaatgctgggagtcctgtaaagccccatcttggaacagtcagcacctttcatgctcttgtcagtgtttccttttgaagggcatattggtgtttatctacagaaacatatattatttttattgtgtacataaaggagtatatggctgttgtcccgtggggtatgtttaattcctctaaatgtttaaagtacttttctgcctgtactctccagttctgtcgttgagtatacactcaggcttgagatacaaccaaaatttgcttgcctttctctagccactggctgccagtgagttcgtgtgatgggcacacagaaatgcacacagatgtacatacacgtatgtatgcacacacagtatatgattccataaaattcaaatgcagattaattctcctaatgagttttcagtgttgaatcgtaaatagtctgaagcaggccagtgttccttttggctgccagtcttggattagtaaaaggaggtaattctttcagattccctggttctttgccactcagagtattgtacttttgatatagaatagagaaggttacctttggtttaaaaactatttttatatactagctctttcatgtataaaacagagacaatcatcctaacaaaagagttcctgttatttttctgcacaaatgtcttgtgttgaaacactgttacagttccatataaatgtgtgctatataaaataaactttggagat

SEQ ID NO: 14561 - protein, 176 aa, Homo sapiens
MLQNLQERLERKKRIEEIMKRTRKTDVNASKVTETSSHDIYEEAEADNEESDKDSLNEMFPSAILNGTGSPTKFKMPFNNAKKMTHKLVFLEDGTSQVRKEPKTYFNGDLKNFRQKSMKDTSIQEVVSRPSSKRMTSHTTKTRKADETNTTSRSSAQTKSEGFHDILPKSSDTFRQ

SEQ ID NO: 14562 - DNA, 2493 bp, Homo sapiens
  CDS (45)..(533)
tgggctaccagtgggctcccatcctagccaacttcctgcacatcatggcagtcatcctgggcatctttggcaccgtgcagtaccgctcccggtacctcatcctgtatgcagcctggctggtgctctgggttggctggaatgcatttatcatctgcttctacttggaggttggacagctgtcccaggaccgggacttcatcatgaccttcaacacatccctgcaccgctcctggtggatggagaatgggccaggctgcctggtgacacctgttctgaactcccgcctggctctggaggaccaccatgtcatctctgtcactggctgcctgcttgactacccctacattgaagccctcagcagcgccctgcagatcttcctggcactgttcggcttcgtgttcgcctgctacgtgagcaaagtgttcctggaggaggaggacagctttgacttcatcggcggctttgactcctacggataccaggcgccccagaagacgtcgcatttacagctgcagcctctgtacacgtcggggtagcctctgccccgcgcccaccccggcgcctcgccctgggctgaccgcagctgccgcgagctcgggccaaggcgcaggcgtgtccccctggtggcccgcgctctcactgcagcctgtgcccaaccccgcgtctgcatctggagatgcggacttggacgtggacttggacttggacttggatttgagcttggctcttcgcagcccggacttcggaggagtggggcggggcgggggaggggcaccacgggttttttgttttttgtttgtttgtttttaatctcagccttggcgtgagctggggccttcctctcttctccagcctctccctttcactcttcgcccagcatcctgcccccctgtccaaaaacagcaggacatcaggcccatcccatcccaccacactcactcaccagctctggggaaagctactgtgaactaggagcaggattcctgggttctaatcgcaggtccatcactgactgtgacgtctagcaaagcccttgccctctctgagcctcggtttccgcacctcaagtaattaatcccttagcaaatggactcttttagacttctcatttaactcaattccctgagctagactgggattaaaattctcattttgcagtacattaaaactgatgcccagagatgtgatttgcttgaggccacacagctagatttttggtggaagtgggccttgaacacagtgtactttctgcagtttctgactgtaaaacccagtgtctgctctctgagttccatttccaagcccccctccatcttggacctatgtggtctccaccatattcacacaccaccaccaccacttgccaatgcctctcttaaagcaatatacccattcgttctcttattgggaactggatggatgaagccccaaattcagccccacccacagagaagccttcctacactcagcctctgtccacccttggcaaatctttcaagctctctcctccaggaaagtggggccccaactcagtcactccacccccttccaggtccctgaggctggttctactgtatccccatcacctccacaactccactcacccctgacggctccatccacctcaccagttggaaggcttgtggtttcagagaggagcaatgctggtcagcgctgcccagactccagtgtttacagatcaccagcatttacaaccaatccaatggccagaagcctcctctaacaagcccagaaggagttctgaaggggcagatgggggtgtgagtagtcggggagtcgggattgccagcaccctcacccttccttgggggcaagtagaggtgagaacactttccccacctccctccacagacactcctgaggacgctgcatcccacgcactgcctggtgcgtccatagagagaggatcaggtctcagcatttcatctgtgaaagaggcatggccctgggttagaaaggagggcaggagacatggaggaactggggggcacccagatggtgcagatggtttgcacacctgagcctgtctgtggtgaccattccgctcctctcccactaccctccaatctatcattccctactctctaaggccaaaatatcctgagcaaggctggcaaccccaccccaccatcccaaatgcaagcagccaggcccaggagttcctctggcccccacaggcatggagctcccagctggtgggtacagcttgagaggggggcagctccctcaggctaagctactgcccttcactgggccagccctgcctccagccctcacctctctcaccccaactctcccccaagcccctttctactcaacgggtgtagccactggtgctttgaagccttttgtttttataagatggtttttgcaaggggaccaggttctcttttcactgggaccttgcaaggaggggagtgctctcctggtttctgtgcaggcgggttgattaaagatggtgttttcttctct

SEQ ID NO: 14563 - protein, 163 aa, Homo sapiens
MAVILGIFGTVQYRSRYLILYAAWLVLWVGWNAFIICFYLEVGQLSQDRDFIMTFNTSLHRSWWMENGPGCLVTPVLNSRLALEDHHVISVTGCLLDYPYIEALSSALQIFLALFGFVFACYVSKVFLEEEDSFDFIGGFDSYGYQAPQKTSHLQLQPLYTSG

SEQ ID NO: 14564 - DNA, 1901 bp, Homo sapiens
  CDS (51)..(1220)
ttgcttgcctttgcctttgaggctctgtggctgtggggctgagtggcatcatggcggctcagaaagatctctgggacgccattgtgattggggcggggatccagggctgcttcactgcataccacctggccaaacacaggaagaggatcctcctgctggagcagttctttctaccacactcccgaggaagctcccatggacaaagccggataatccgaaaggcgtacctggaagacttttacacccggatgatgcatgagtgctatcagatatgggcccagctggagcacgaggctggaacccaattgcacaggcagactggattactgctgctgggaatgaaagagaatcaagaattaaagacaatccaggccaatctgtcgaggcagagggtagaacaccagtgtctttcatctgaggaactgaagcaacgtttcccaaatattcggttgcccaggggagaagtggggctcttggacaattccggaggagttatctatgcatataaggccctcagagccctgcaggatgcaattcgacagctaggaggcatagtgcgtgacggagagaaggtggtggagataaacccagggctactggtcacggtgaaaaccacctccaggagctaccaagctaagagcttggtcatcacagcaggtccttggaccaaccagctcctccgtcccctgggcattgagatgcctctccagaccctgcggatcaacgtgtgttactggcgagagatggttcctgggagctatggtgtgtcccaggcctttccgtgcttcctgtggctgggcttgtgtccccaccacatctacggactgcccacaggagagtacccagggctgatgaaggtcagctatcaccacggcaaccacgcagaccctgaggagcgggactgccccacagcacgcacagacatcggagacgtccagatcctgagcagctttgtcagagatcacttacctgatctgaagcccgagcctgctgtcattgagagctgcatgtacacgaatacccctgatgagcagttcattctcgatcgccacccaaagtatgacaacattgtcattggtgctggattctctgggcacgggttcaagctggcccctgtggtggggaagatcctgtatgaattaagcatgaaattaacaccatcttatgacttggcaccttttcgaatcagccgtttcccaagcctgggcaaagcccacctttgacctctggccagaagcctcccttctgtgcacaggagccagtttcacagatggagaagatgtctcagatgaagggagtgtccctgagatatcatccttttcttctgcctcgcctgaatcccccataaacaccagatgattgagtctaccttctttccttggcccgctccctttttcttctgcctcacttgaatcccccgtaaacaccagacgattgagtctaccttcttttcttggccacctccccattcacaactactttctcgctcccagaaggttgatcagatattctacaatcacagagtagcaaggacgtttgagatgggtatatcagtaagaagagggcacaagaactggctctggagaccaaagcagttgttaaaaattctctttgctgggggccgggtgtggtggctcacacctgtaatctcggcactttggggggctgagacagtcggatcacctgaggccaggaattcaagaccagcctggccaacatggtgaaaccctatctccactaaaaatacaaaattagctgggtgtggtggcgcatgcctgtaatcccagctacttgggagactgaggcaagagaatcacttgaacccgggaggtggaggtggcagtgagccgagattgcgccattgcactccagcctgggcaaaaagagtgagactctgtctc

SEQ ID NO: 14565 - protein, 390 aa, Homo sapiens
MAAQKDLWDAIVIGAGIQGCFTAYHLAKHRKRILLLEQFFLPHSRGSSHGQSRIIRKAYLEDFYTRMMHECYQIWAQLEHEAGTQLHRQTGLLLLGMKENQELKTIQANLSRQRVEHQCLSSEELKQRFPNIRLPRGEVGLLDNSGGVIYAYKALRALQDAIRQLGGIVRDGEKVVEINPGLLVTVKTTSRSYQAKSLVITAGPWTNQLLRPLGIEMPLQTLRINVCYWREMVPGSYGVSQAFPCFLWLGLCPHHIYGLPTGEYPGLMKVSYHHGNHADPEERDCPTARTDIGDVQILSSFVRDHLPDLKPEPAVIESCMYTNTPDEQFILDRHPKYDNIVIGAGFSGHGFKLAPVVGKILYELSMKLTPSYDLAPFRISRFPSLGKAHL

SEQ ID NO: 14566 - DNA, 2868 bp, Homo sapiens
  CDS (90)..(2867)
acaatgtgctagaacaaatcacaagctttgcgtcaggaacatcctatcatctccctttggctcaccacattcagctcatctttgatctcatggagccagcactgaacatcaacggactaattgacttcgcaatacagttactaaatgaactgagtgttgtggaagctgaactgctcctaaaatcctccagcctggcaggaagttatacaacaggactgtgtgtctgcatcgtggctgttctcaggcgctatcacagttgtctaatcttgaatcctgatcagacagcccaggtgtttgaagggttgtgtggtgtggtcaagcatgtcgtaaacccctcagaatgttcttcccctgaaagatgcattttagcctacctctatgatctctatgtgtcatgtagccacctcagaagtaaatttggagacctcttcagtgcctgttcaaaagtaaagcaaaccatatataataacgtgatgcctgcaaattcgaacttgcgatgggatccagacttcatgatggattttattgagaatccctcagcccgcagcatcaactactcaatgctgggcaagatcctcagtgacaatgcggccaatcgctacagctttgtctgcaatacactcatgaatgtatgtatgggccatcaggatgctggcaggattaacgacatagccaatttctcctctgagcttacggcttgctgcactgttcttagttcagaatggctgggggttctgaaggctctttgttgttcttcaaatcacgtgtgggggtttaatgatgtactttgcactgtagatgtgagtgacctttcattccatgattcattagctactttcactgctattctgatagcacgacagtgtttttccctggaggacgtcgtgcagcatgtcgcacttccctctcttctagcagcagcttgtggggatgcggacgccgagcctggggcgagaatgacatgccgactcttgcttcatctcttccgagctccccaggcctgcttcttacctcaagcaacgggcaaacctttccctggaataagatcatcttgtgatagacacctcttagccgctgctcacaacagcattgaagtgggagccgtgtttgctgtcttaaaagcaattatgatgcttggagatgccaaaattggcaataacagtgtcagctctttaaagaatgatgacttcaccatgagaggtttgcgatgtgatgggaatgctgatgatatctggactgcctcacaaaatccaaaatcctgtgggaaaagcatttccatagaaactgccaatttaagagaatacgctagatatgtactgaggactatctgtcaacaggaatgggtaggagagcattgcttaaaagaacctgaaagattatgtacagacaaagaacttatattggaccctgtgctttcaaatatgcaagcacagaaattactgcagcttatctgttatcctcatggcattaaagaatgtaccgagggggacaatctgcaaagacagcacattaagcgtattcttcagaatcttgagcagtggacactgaggcaatcctggttagaactccagctaatgatcaaacagtgcttgaaggaccctggctctggttctgtggccgaaatgaacaacttactggacaatattgcaaaggcaacaatagaggtattccagcagtctgcagacctaaataattcttctaattctggcatgagcctcttcaacccaaacagtattggaagtgctgatacaagtagcacgagacagaatggaataaagacattcctaagttcctccgaacgcaggggtgtatggttggtggcccccctcatcgccaggttgccaacttctgtgcaaggaagagtgctgaaagccgctggggaagagctggagaagggacagcacttgggttcttcttccaaaaaggaaagggacagacagaaacagaaaagtatgtctcttttgagtcaacaacccttcctctcactggtacttacctgccttaagggacaagatgaacaaagggaaggcctcctaacatctctccagaatcaagttaaccagattttaagtaactggagagaagaacgataccaagatgacataaaagcgcggcagatgatgcacgaagcattgcaactccgcctaaatttggtaggaggaatgtttgacacggtgcagaggagcacccagtggactacagactgggccctgctactccttcagatcattacttcaggaactgttgacatgcacactaacaatgaattattcacaacagttcttgacatgctgggtgttttaatcaatggaacgttagcctctgacctatcaaatgcatcccctgggggatctgaagagaacaagcgtgcatacatgaatttagtaaagaaactgaaaaaagagctaggagacaagcgatcagaaagtattgacaaagttcgacagttactacctttgccgaaacagacatgtgatgtcatcacttgtgaacctatgggttccttgattgacacaaaaggaaacaaaattgctggatttgactctatagataaaaaacagggtctccaggtctctacgaagcagaaggtgtccccgtgggacttgtttgagggtcagaagaacccagctcctttgtcctgggcctggtttgggacagtccgagtggaccgaagagtgatcaagtacgaggagcagcatcacctcctgctgtatcacacacaccccatgcccaagccccgcagttactacctccagccactgcccctgcctcctgaggaggaagaggaagagcccacatctccagtttctcaggaaccagaaaggaagtccgctgagctgtcagatcagggaaaaaccacaacagatg

SEQ ID NO: 14567 - protein, 926 aa, Homo sapiens
MEPALNINGLIDFAIQLLNELSVVEAELLLKSSSLAGSYTTGLCVCIVAVLRRYHSCLILNPDQTAQVFEGLCGVVKHVVNPSECSSPERCILAYLYDLYVSCSHLRSKFGDLFSACSKVKQTIYNNVMPANSNLRWDPDFMMDFIENPSARSINYSMLGKILSDNAANRYSFVCNTLMNVCMGHQDAGRINDIANFSSELTACCTVLSSEWLGVLKALCCSSNHVWGFNDVLCTVDVSDLSFHDSLATFTAILIARQCFSLEDVVQHVALPSLLAAACGDADAEPGARMTCRLLLHLFRAPQACFLPQATGKPFPGIRSSCDRHLLAAAHNSIEVGAVFAVLKAIMMLGDAKIGNNSVSSLKNDDFTMRGLRCDGNADDIWTASQNPKSCGKSISIETANLREYARYVLRTICQQEWVGEHCLKEPERLCTDKELILDPVLSNMQAQKLLQLICYPHGIKECTEGDNLQRQHIKRILQNLEQWTLRQSWLELQLMIKQCLKDPGSGSVAEMNNLLDNIAKATIEVFQQSADLNNSSNSGMSLFNPNSIGSADTSSTRQNGIKTFLSSSERRGVWLVAPLIARLPTSVQGRVLKAAGEELEKGQHLGSSSKKERDRQKQKSMSLLSQQPFLSLVLTCLKGQDEQREGLLTSLQNQVNQILSNWREERYQDDIKARQMMHEALQLRLNLVGGMFDTVQRSTQWTTDWALLLLQIITSGTVDMHTNNELFTTVLDMLGVLINGTLASDLSNASPGGSEENKRAYMNLVKKLKKELGDKRSESIDKVRQLLPLPKQTCDVITCEPMGSLIDTKGNKIAGFDSIDKKQGLQVSTKQKVSPWDLFEGQKNPAPLSWAWFGTVRVDRRVIKYEEQHHLLLYHTHPMPKPRSYYLQPLPLPPEEEEEEPTSPVSQEPERKSAELSDQGKTTTD

SEQ ID NO: 14568 - DNA, 2821 bp, Homo sapiens
  CDS (53)..(1759)
tgacaatatagaagattctacagcaagattagatacacaacactctgaagacatgaatgccaccagatctgaagagcagttccatgttataaaccacgcagagcaaactcttcgtaaaatggagaactacttgaaagagaaacaactatgtgatgtgctactgattgcaggacacctccgcatcccagcccataggttggttctcagcgcagtgtctgattattttgctgcaatgtttactaatgatgtgcttgaagccaaacaagaagaggtcaggatggaaggagtagatccaaatgcactaaattccttggtgcagtatgcttacacaggagtcctgcaattgaaagaagataccattgaaagtttgctggctgcagcttgtcttctgcagctgactcaggtcattgatgtttgctccaattttctcataaagcagctccatccttcaaactgcttagggattcgatcatttggagatgcccaaggctgtacagaacttctgaacgtggcacacaaatacactatggaacacttcattgaggtaataaaaaaccaagaattcctcctgcttccagctaatgaaatttcaaaacttctgtgcagtgatgacattaatgtgcctgatgaagagaccatttttcatgctctaatgcagtgggtggggcatgatgtgcagaataggcaaggagaactggggatgctgctttcttacatcagactgccattactcccaccacagttactggcagatcttgaaaccagttccatgtttactggtgatcttgagtgtcagaagctcctgatggaagctatgaagtatcatcttttgcctgagagaagatccatgatgcaaagccctcggacaaagcctagaaaatcaactgtgggggcactttatgctgtaggaggcatggatgctatgaaaggtactactactattgaaaaatatgacctcaggactaacagttggctacatattggcaccatgaatggccgtaggcttcaatttggagtcgcagttattgataataagctctatgtcgtgggaggaagagacggtttaaaaactttgaatacagtggaatgttttaatccagttggcaaaatctggactgtgatgcctcccatgtcaacacatcggcacggcttaggtgtagccactcttgaaggaccaatgtatgctgtaggtggtcatgatggatggagctatctaaatactgtagaaagatgggaccctgagggacgacagtggaattacgtagccagtatgtcaactcctagaagcacagttggtgttgttgcattaaacaacaaattatatgctattggtggacgtgatggaagttcctgcctcaaatcaatggaatactttgacccacacactaacaagtggagtttgtgtgctccaatgtccaaaagacgtggaggtgtgggagttgccacatacaatggattcttatatgttgtaggggggcatgatgcccctgcttccaaccattgctccaggctttctgactgtgtggaacggtatgatccaaaaggtgattcatggtcaactgtggcacctctgagtgttcctcgagatgctgttgctgtgtgccctcttggagacaaactctacgtggttggaggatatgacggacatacttatttgaacacagttgagtcatatgatgcacagagaaatgaatggaaagaggaagttcctgttaacattggaagagctggtgcatgtgttgtagtggtgaagctaccctaaagctatctatctttatcaaatggaatgaaactagataatttcaagaaactgagtaggacaaagggagaaagaaatacatgttctttttcctgcaattaataatcagactggaaaattgttgtatcattttaatttgtagttacaattgctttcattcgtgaagccgaaacgtttttaaacatgaattacatatgaattattaagcatatgtgctttcgcagctgataatataaaaggaaatcccacagtctagatatagccccattactacaaaatgctaaaatatttaatgaaaattgatggtggccacagtgtgcaggttataaaagcattaatacatttcaaggtaagagccttaaaagttaaaaacattttcagttttttttttaaaaaacgtactcttattatctggaacatagaaatataaaaggtaacatctaaagcttagaatagtgtgatttttagtaagccattattctcctattcaaataatatcccaaagagctaaacaattccttacatttaccaagaggaaagcttttactgtgttgaggctaaaaaaaataatggctctttgacaaaacttgttatgttgatcgcggtatgtcaaaatttttacaggtttgctcatctgccagagcacacatataaatttggtatttcttaacatattatcttgttagatttgttaccagtaaaatattactgtaatttcatatacacagtctatacaatgaaataatgaatatttatcatattgatacaaactgtgacctcagcttcagagtgtcagggcctcacttgtatagaatgtaatgttctcctcaaacatttatgttaactctataaacaaatatcgttaagttaaacaagttttcaaaaacaaaacaatttttaaagtaccttaaaattgaggatgttactcagtgttaacacatgggaacaccaaaatattcaataagcctggtcaattctatagttatcttttttgtaccaacacatgcttttctgttactgttatattatccagtagaaaatgttaggatatgtgtgctatat

SEQ ID NO: 14569 - protein, 569 aa, Homo sapiens
MNATRSEEQFHVINHAEQTLRKMENYLKEKQLCDVLLIAGHLRIPAHRLVLSAVSDYFAAMFTNDVLEAKQEEVRMEGVDPNALNSLVQYAYTGVLQLKEDTIESLLAAACLLQLTQVIDVCSNFLIKQLHPSNCLGIRSFGDAQGCTELLNVAHKYTMEHFIEVIKNQEFLLLPANEISKLLCSDDINVPDEETIFHALMQWVGHDVQNRQGELGMLLSYIRLPLLPPQLLADLETSSMFTGDLECQKLLMEAMKYHLLPERRSMMQSPRTKPRKSTVGALYAVGGMDAMKGTTTIEKYDLRTNSWLHIGTMNGRRLQFGVAVIDNKLYVVGGRDGLKTLNTVECFNPVGKIWTVMPPMSTHRHGLGVATLEGPMYAVGGHDGWSYLNTVERWDPEGRQWNYVASMSTPRSTVGVVALNNKLYAIGGRDGSSCLKSMEYFDPHTNKWSLCAPMSKRRGGVGVATYNGFLYVVGGHDAPASNHCSRLSDCVERYDPKGDSWSTVAPLSVPRDAVAVCPLGDKLYVVGGYDGHTYLNTVESYDAQRNEWKEEVPVNIGRAGACVVVVKLP

SEQ ID NO: 14570 - DNA, 2980 bp, Homo sapiens
  CDS (3)..(2006)
agatggttctgaactttgataccaaggatcccctcatcctgtcctgcgtccttactaatgtctctgcactctttccatttgtcacctacagaccagagttcctgccccaggtcttctctaagctattttcatctgtcacttttgaaactgttgaagaaagtaaggcccccagaacccgggcagtgaggaatgtgaggaggcatgcttgttcctccatcatcaagatgtgtcgtgactacccccagcttgtgctgcccaattttgacatgctttataaccatgtgaagcaactcctctccaatgagctactcctgacacaaatggagaagtgtgccctcatggaagccctggttctcattagcaaccaatttaagaactacgagcgtcagaaggtgttcctagaggagctgatggcaccagtggccagcatctggctttctcaagacatgcacagagtgctgtcagatgttgatgctttcattgcgtatgtgggtacagatcagaagagctgtgacccaggcctggaggatccgtgtggcttaaaccgtgcacgaatgagcttttgtgtatacagcattctgggtgtggtgaaacgaacttgctggcccactgacctagaagaggccaaagctgggggatttgtggtgggttatacatccagtggaaatccaatcttccgtaacccctgcacagagcagattctgaaacttcttgacaatttgcttgcgcttataagaacccacaatacattatatgcaccagaaatgctagccaaaatggcagagcctttcaccaaggctctggatatgcttgacgcggaaaaatctgctatattaggattacctcaacctctcttggaactcaatgactctcctgtcttcaaaaccgtcttggaaagaatgcagcgtttcttctctaccctctatgaaaactgttttcatatcctagggaaggcaggcccttccatgcagcaagacttctatactgtggaggaccttgctacccagcttctcagctcagcctttgtcaacttgaacaatattcctgactaccgactcagacccatgcttcgggtctttgtaaagcctctggtgctcttctgtcccccagagcactatgaagccctggtatcccccatcctcggacctcttttcacctacctccatatgaggctttctcagaaatggcaagttatcaaccaaaggagcctgctgtgtggagaagatgaggctgcagatgaaaacccagagtctcaagagatgctggaggagcaactggtgaggatgttaacccgagaagtcatggacctaatcacggtttgctgtgtttcaaagaagggtgctgaccacagtagtactcccccagcagatggagacgatgaagaaatgatggccacagaggtcaccccctcagctatggcagagcttacagacctgggcaaatgtctgatgaagcatgaggatgtttgtacagcgctattaattacagccttcaattccctggcctggaaagatactctgtcctgccagaggacaacctcacagctctgctggcctctcctcaaacaagtgctgtcagggacactgctcgcagatgcagttacgtggcttttcaccagtgtgctgaaaggcttacagatgcacgggcagcacgacgggtgcatggcttccctggtccatctggccttccagatatacgaggcactgcgccccaggtacctggagataagagctgtaatggagcaaatccctgaaatacagaaggactcactggaccagtttgactgcaagcttttaaacccctccctgcagaaagtggctgacaagcgccgaaaggaccaattcaaacgcctcattgctggttgcattgggaaacccttgggagagcagttccgaaaagaagttcacattaagaatcttccctcacttttcaaaaaaacaaagccaatgctggagacggaggtgctggacaatgatgggggtggcctggccaccatctttgaaccctgaatcaagcttttgggcatccttcctcggcctttcttgtcatctcttctttccctttgtagccgatctctaggcccttcttgcactgccacctcactttccaccactgtcagcctggaaagagatccaggtctggagctggagagaacaggccctgtgcaggaccagaagtaattatactaaagtatcaagaaagggagttagggcttaaactattctgtctagatgtcccagatagttcccattctacttggagatttggcttttccaagaaaagctagagcagagcagcccttctcccacaagccctcccacccccgtgcagccacatacctgtacagaatggtaactaagggtgctgtgcccaaccctgcgactagcaaggctcgcagcaagagcacagccctcaactacttgtgccagagtttctcttggaccactccaactcccactgagcccttttgctgctgggctggcaggaaactttccccactccctaaggggcatgtctgggttaggtgctaagtgctgaagagaacttggccagttctctcaactttgctttgggcaagaatctggtcacctgatgggatccatggtacaggctactgctaaacttggcacagtatcaagtatagtacctccaaggaccagggctgggcagtctttagtgctaacatcccctttagagttcacacatcttgcccttccatgaatgacccctcagtctggcctccccagcctcaaggtccactcaggcacaagagccacagtaccctagatagtgtcacatgacaccgttgtcatccaaggataatacagaccaactaggctacatctgtgatgagcagctagcaaagccgctggtcttctcctaggactaagtccaggtgccttccacaatctcatggtctttcaggtccctggttacttttctcaaaggccatttccaaaagaatacatgccttcacacc

SEQ ID NO: 14571 - protein, 668 aa, Homo sapiens [sequence omitted]

SEQ ID NO: 14572 - DNA, 2305 bp, Homo sapiens
  CDS (112)..(1638)
acatgccatggtggctatgtgtataccacagggcgtgatggagcctactaccagctgtttgtacgagacggccagctccagccagtcctaaggcagaagtcctgtcgaagcatgaactggctagctgggctccgtatagtgcccgatgggagcatggttatcctgggtttccatgccaatgagtttgtggtgtggaaccctcggtcacacgagaagctgcacatcgtcaactgtggtggagggcaccgttcgtgggcattctctgatactgaggcggccatggcctttgcttacctcaaggatggggatgtcatgctgtacagggctctgggtggctgcacccggccacacgtgattctccgggagggtctgcatggtcgtgagatcacttgtgtaaagcgtgtgggcaccattaccctggggcctgaatatggagtgcccagcttcatgcagcctgatgacctggagcctggcagtgaggggcccgacttgactgacattgtgatcacatgtagtgaggacactactgtctgtgtcctagcactccctacaaccacaggctcagcccacgcactcacagctgtttgtaaccatatctcctcggtacgtgctgtggctgtgtggggcattggcaccccaggtggccctcaggatcctcagccaggcctgactgcccatgtggtgtctgcgggggggcgggctgagatgcactgcttcagcatcatggttactccggaccccagcaccccaagccgcctcgcctgccatgtcatgcacctttcgtcccaccggctagatgagtattgggaccggcaacgcaatcggcatcggatggttaaggtagacccagagaccaggtacatgtcccttgctgtgtgcgaacttgaccagcccggccttggcccccttgtggctgcagcctgtagtgatggggccgtaaggctctttcttttgcaggattctgggcggattctgcagctccttgctgaaaccttccaccataagcgatgtgtcctcaaggtccactcctttacacacgaggcacccaaccagaggcggaggctcctcctgtgcagcgcagctactgatggcagcctggctttctgggatctcaccaccatgctagaccatgactccactgtcctggagcctccagtggatcctgggcttccctaccggcttggcaccccctccctgactctccaggcccacagctgtggtatcaacagcctgcacaccttgcccacccgtgagggccaccatctcgtggccagtggcagtgaagatggatccctccatgtcttcgtgcttgctgtggagatgctacagctagaagaggctgtgggagaggctgggctggtaccccagctgcgtgtgctagaggaatactctgtcccctgtgcacatgctgcccatgtgacaggcctcaagatcctaagcccaagcatcatggtctcagcctccattgatcaacggctgaccttctggcgtctggggcatggtgaacccaccttcatgaatagcactgtgttccatgtgcctgatgtggctgacatggactgctggcctgtgagccctgagtttggccaccgttgtgcccttgggggtcgggggcttgaggtttacaactggtatgactgaggtatcctgcggtggctggcgtgctgggcatggggcctgctcacagacagcatggagcagggatgggctgtctgtgcccatgctcagcatgccttgaggggaggaggtggtggccgtgggttcctgatgtcggtgcaggagctgaaggtgagtggagtgctgccaagaatatgcccgactccccatgacaagacagaactttgtaacaaacagtaccaatttattttggccgtgggtttttgctttttttccagttgatgactttgtgaacattcccaggtattggagcctctgtggccttaaatgtggctcagtggagggagacccagcatagccaggccagtatggagcacctcacgcacagctctcagaagctgcaggcggacgaacatctgaccaaagaggtgtggtcgaggctcctgaaagagaaagggcctgctggtctcatcctctgcttcctttgcctttaccctatacctctctgcacgtcccaccccattttgctgtgtgctcacccccaggatgtgtacccggttgtagtaggagctgaaatccatgctgagctgtaccaggaacttgcatatctagagacagagactgagtcactggcccatctctttgctcttgtgccccaggccagaataaagaatagagtgtagagtgt

SEQ ID NO: 14573 - protein, 509 aa, Homo sapiens [sequence omitted]

SEQ ID NO: 14574 - DNA, 2025 bp, Homo sapiens
  CDS (61)..(1005)
ctagtctatctccgcttcctcaacctctcctacaaccccatcagcaccattgagggctccatgttgcatgagctgctccggctgcaggagatccagctggtgggcgggcagctggccgtggtggagccctatgccttccgcggcctcaactacctgcgcgtgctcaatgtctctggcaaccagctgaccacactggaggaattagtcttccactcggtgggcaacctggagacactcatcctggactccaacccgctggcctgcgactgtcggctcctgtgggtgttccggcgccgctggcggctcaacttcaaccggcagcagcccacgtgcgccacgcccgagtttgtccagggcaaggagttcaaggacttccctgatgtgctactgcccaactacttcacctgccgccgcgcccgcatccgggaccgcaaggcccagcaggtgtttgtggacgagggccacacggtgcagtttgtgtgccgggccgatggcgacccgccgcccgccatcctctggctctcaccccgaaagcacctggtctcagccaagagcaatgggcggctcacagtcttccctgatggcacgctggaggtgcgctacgcccaggtacaggacaacggcacgtacctgtgcatcgcggccaacgcgggcggcaacgactccatgcccgcccacctgcatgtgcgcagctactcgcccgactggccccatcagcccaacaagaccttcgctttcatctccaaccagccgggcgagggagaggccaacagcacccgcgccactgtgcctttccccttcgacatcaagaccctcatcatcgccaccaccatgggcttcatctctttcctgggcgtcgtcctcttctgcctggtgctgctgtttctctggagccggggcaagggcaacacaaagcacaacatcgagatcgagtatgtgccccgaaagtcggacgcaggcatcagctccgccgacgcgccccgcaagttcaacatgaagatgatatgaggccggggcggggggcagggacccccgggcggccgggcaggggaaggggcctggccgccacctgctcactctccagtccttcccacctcctccctacccttctacacacgttctctttctccctcccgcctccgtcccctgctgccccccgccagccctcaccacctgccctccttctaccaggacctcagaagcccagacctggggaccccacctacacaggggcattgacagactggagttgaaagccgacgaaccgacacgcggcagagtcaataattcaataaaaaagttacgaactttctctgtaacttgggtttcaataattatggatttttatgaaaacttgaaataataaaaagagaaaaaaactatttcctatagctagtcggaatgcaaacttttgacgtcctgattgctccagggccctcttccaactcagtttcttgtttttctcttcctcctcctcctcttcttcctcctttctcttctcttccccagtggggagggatcactcaggaaaacaggaaaggaggttccagccccacccacctgcccaccccgccccaggcaccatcaggagcaggctagggggcaggcctgggcccagctccgggctggctttttgcagggcgcaggtggaggggacaggtctgccgatgggggtgggagcctgtctgctgggctgccaggcggcaccactgcaaggggtgggagcctggcttgggtgtggctgagactctggacagaggctggggtcctcctgggggacagcacagtcagtggagagagccaggggctggaggtggggcccaccccagcctctggtcccagctctgctgctcacttgctgtgtggcctcaagcaggtcactggcctctctgggcctcagtctccacatctgtacaaatgggaacattaccccctgccctgcctacctcacagggctgttgtgaggaattgatgagatgatgtatgtgaaacactttgtaacctgtaaagcgctgtgcacacgtg

SEQ ID NO: 14575 - protein, 315 aa, Homo sapiens
MLHELLRLQEIQLVGGQLAVVEPYAFRGLNYLRVLNVSGNQLTTLEELVFHSVGNLETLILDSNPLACDCRLLWVFRRRWRLNFNRQQPTCATPEFVQGKEFKDFPDVLLPNYFTCRRARIRDRKAQQVFVDEGHTVQFVCRADGDPPPAILWLSPRKHLVSAKSNGRLTVFPDGTLEVRYAQVQDNGTYLCIAANAGGNDSMPAHLHVRSYSPDWPHQPNKTFAFISNQPGEGEANSTRATVPFPFDIKTLIIATTMGFISFLGVVLFCLVLLFLWSRGKGNTKHNIEIEYVPRKSDAGISSADAPRKFNMKMI

SEQ ID NO: 14576 - DNA, 2728 bp, Homo sapiens
  CDS (313)..(615)
tgttcaaagacgtacattcaactcaagagtccagctctacagcagctatatttggaaatacacatattttatggccagtatataaatgatttttaataaaattctaccaaatatctggctgggtagctgccctcgtcaggtggaacatgtaaccatcaaactgaagcatgaattggggattacagctgtaatgaatttccagactgaatgggatattgtacagaattcctcaggctgtaaccgctacccagagcccatgactccagacactatgattaaactatataggaagaaggcttggcctacatctggatgccaacaccagatatgagcaccgaaggccgagtacagatgctgccccaggcggtgtgcctgctgcatgcgctgctggagaagggacacatcgtgtacgtgcactgcaacgctggggtgggccgctccaccgcggctgtctgcggctggctccagtatgtgatgggctggaatctgaggaaggtgcagtatttcctcatggccaagaggccggctgtctacattgacgaagaggccttggcccgggcacaagaagattttttccagaaatttgggaaggttcgttcttctgtgtgtagcctgtagctggtcagcctgcttctgccccctcctgatttccctaaggagcctgggatgatgttggtcaaatgacctagaaacaaggattctacctgaactgaaaggactgtgtgacctcccccaagccaaccactttcacctgggatgactttcgattatgctttgttttggggctgtatttttgaaatactctacaagaaagctgtggctcaacacatgagaagaagcacgaagcagttaggctgtacatcagacagaagggtaatgcgtgcagttcctgctgcctgcaggcagacgaggcctttgctttacggcactgtatgtgttgcacgatggatccgtgacagcactttcctgttgcactgaaactcttggccatgtagaggaaaagatatggagttatgtggatttcatcactagtatgtgtgcgtgagctggtcagttgccaaaggaggaaataaggttagaagcctgaaccgttacaaaagaagagctcactatggtcaaaaagtgatggctttcaggacttgttttttatcctgcctcacagttgttaaagtctgttccaaggcatcaccttccttctctacccaacaaccctgtgtaacaactaaagtagaattatctctcatttgttgttgtttttcctcaaaattaccaaacaaagcaaaaaatacccttgttttttatagttgagatgtcaagaagttaaattgaggcttaatgagcataggtagcttgtccaaggtctcatgaccagtcaagggcaagctggagttaataatctatatttatttgactcagcactgttttcatcacaacttgttttcccagcatcatgtagtgcatttagttttgtctttctcagggtatagtcaatatgcctgcaggagtttctatagcgagacatagaatagtattctgatcagttgccaaagaatctaggaaattagttgtattttgtgcaagctaatttaaaaacatgatgggctgttttaagaccagagtggaaattcatgagaggaactatactaccaaaagagcccaaatgaccaaatccatggataattgcttcacagccttggccatcctggctcagctctcaatttagtataatatgcagttcctgtgcctccagactatgcagctcatcaccctaggttctacaggaaatacagagatgaacaactttgccttcaaaaatgtgctgcctagaaacagacctgcattcaaccaactgtaatgcaggattggaccatgaatgatatgctagaatagaagaaagagaagtgtttttttaattgagagcctctatgtgcaaggtgatatataatcatatccagtttaatcttcacaatatccaatgaagaaggtctcattatctccatgataaagatggggaaactaaggtcagaagggttaactcaactgtctattgtcacatgatgaataaatagatgaagtgagatacaaagctaggtttgattcaaagcccttactttcctaattaaactatgatgcgtatttatttttctgcaccttcctttcttccacaaacacatattgatagatgcaagagactcttatttagaaggcgtgggggacaagaaggatacaaggtaagtttcagtggagctcagaggacggggagatagaactgtggcacttaggggagatgacatttgctttgggcagaggcagctagccaggacacatttccactataattttacaaagttaaatttataagctagcattaagtaaagtgaagtccagctcccttgctaaaaataactagaggtaataattggtattcaggtaactcatttacagtcataatgtgttgtgaaaatttaatcttaaaaattaaatttttaaactatgtgggtctgtgaatttctttaatgtctaagaaatccagcttcataatttccatgatacaaagatcttttttcaggtggatttttacctttgttccttttgctctgatagacaaaatcagtttaggactattaaagaatgttttggaataaactgtctttttcctcaatgaatgggatgtctaatgtatttcaaaatcacccaaaacttttggcaaataaaagcatttaaaaag

SEQ ID NO: 14577 - protein, 101 aa, Homo sapiens
MPTPDMSTEGRVQMLPQAVCLLHALLEKGHIVYVHCNAGVGRSTAAVCGWLQYVMGWNLRKVQYFLMAKRPAVYIDEEALARAQEDFFQKFGKVRSSVCSL

SEQ ID NO: 14578 - DNA, 2051 bp, Homo sapiens
  CDS (59)..(925)
tggggtgtcgctccgggctggtggcggggccactgccccgcttgggggaagccgagcgatggtttgtgggcgccagttgtctggcgccgggagtgagaccctaaaacaaagaagaacacaaatcatgtcccgaggacttccaaagcagaaaccgatagaaggtgttaaacaagttatagttgtggcttctggaaagggtggagtcggaaaatctactacagcagtgaatcttgcacttgcactagcagcgaacgattcgtccaaggccattggtttgctagatgtggatgtgtatggaccttcagttccaaagatgatgaatctgaaaggaaatccggaattatcacagagcaacctaatgaggcctctcttgaattatggtattgcttgtatgtctatgggctttctggttgaagaaagtgaaccagtagtttggagaggccttatggtaatgtcggccattgagaaattgttgaggcaggtagattggggtcaactggactacttagttgtagacatgccaccaggaactggagatgtgcagttatcagtctcacagaatattcctataacaggtgctgtgattgtctccacgccccaggacatcgcattgatggatgcacacaagggtgctgagatgtttcgcagagtccacgtgcccgtccttggccttgtccaaaacatgagtgttttccagtgtccaaaatgtaaacacaaaactcatatttttggtgctgatggtgcaaggaaactagcacagacccttggtcttgaagttctaggagacattcccttacaccttaatataagggaagcttcagatacaggccagccaattgtgttttcacagcctgaaagtgatgaggccaaagcttacttgaggattgctgtggaagtggtaagaagattgccatcaccttcagaatgattccccaagtgtcctggaaatttgcctggtactgacattaagaggacctttggaaatcagcaatgtggtgatggaacctacagaaataatagaaatcataactgttttatttctaaggaaagaatgtcttcatatttgacttgctaagctaaggttcacaaaactttgatgtatcaatgttaactgctatatttaggaattttttgaaagctggtgtgtaccacctgcaaagaactgcattttattttattgaattacccctttagaaatcatgagtttatgatgttacaagtccattttgggagagaactgtacactttttgcaggaccacagaattagtaatttaaatgatatactaaatttgtgtatgggcataagtattacgccttcccaccaggcaatttggactgtctttgaatcctgtctttggtactgtcttggacatgttcttaatatgaacctctgcttcttcatctggatcacactataccccagacttaatgaatttcagtctccaggagtggagcctgaacataatgtatttttagtaagaccatgatgatgttgatgatgattctggtaatcatggcagtaagaataatagctaacatttaacaagttaattataattgttcttccatttgtgtgagtgggtactattatctccattttacagataagtaatttgagatataatttgaaggcactcaaccttgagtgtcttgctgagggttactgtatctagcaggtgatggagcttggatttgaacttgagtaattcgatattagattcatctttttgtacaccaatgtgcttttgttaattaaaaaaagtcggtggtggctaggcgtggtggctcacgcctgtaatcccagcactttgggaggttgaggtgggtggatcatgaggtcaggagttcaagaccagcctgaccaacatggtgaaaccccgtctctactaaaaatacaaaaattagctgggtgtggtggcatacgcctgtaatcccagctactcgggaggctgaggcaggagaatcatttcaacccgggaggctgaggttgcagtgagtggagattgtaccactgcactccagcctggtcaatggagtgcgactccatctc

SEQ ID NO: 14579 - protein, 289 aa, Homo sapiens
MVCGRQLSGAGSETLKQRRTQIMSRGLPKQKPIEGVKQVIVVASGKGGVGKSTTAVNLALALAANDSSKAIGLLDVDVYGPSVPKMMNLKGNPELSQSNLMRPLLNYGIACMSMGFLVEESEPVVWRGLMVMSAIEKLLRQVDWGQLDYLVVDMPPGTGDVQLSVSQNIPITGAVIVSTPQDIALMDAHKGAEMFRRVHVPVLGLVQNMSVFQCPKCKHKTHIFGADGARKLAQTLGLEVLGDIPLHLNIREASDTGQPIVFSQPESDEAKAYLRIAVEVVRRLPSPSE

SEQ ID NO: 14580 - DNA, 2566 bp, Homo sapiens
  CDS (426)..(2342)
tgaaaaaagatggtgaagaatgtactaacgaaggcaaaggaatagctgcacgaattcttgggccatccaaaccacctccttcaacatataatccacataaacctgttccttatccgatacctccatgccgaccacatgcaactattgcaccaagtgcttataacaatgcaggtctggtaccattagcgaatgtcatagctccacctccacctccatatactcctaatcctgtaggaacagagaatgaagacctttcgaatccgtcaaaacctatacagaatcaaacattttccaccccagcaagtcaactcttttctcctcatggttctaatccttcaacacctgctgcaactcctgttcctactgcatccccagtcaaggcaattaatcatccatcagcatcagcagctgccaccgtttctggaatgaacctgctgaatactgtccttcctgtgttcccagggcaggtctcctcagccgttcacacacctcagccatcaataccaaacccaacagttatcagaaccccttcattgcccactgcacctgttacatccatccacagtacaaccaccactcctgttccttccattttttctggcctagtgtcactgccaggtccttctgccactcctaccgcagccactcctaccccaggacctacaccacggtccactcttggttccagtgaagcatttgcttctacttctgcacctttcactagcctccccttttccaccagctcttctgctgcttctaccagcaacccaaattctgcttcattgtcatcagtttttgcagggctccctttgcccttaccaccaacatcccaaggcctatccaacccgactcctgtaattgctggtggctctactcccagcgttgccggtccacttggtgtgaacagtcctcttttgtctgcgttaaaaggttttctgacatccaatgacaccaatttaatcaactcctctgctttatcctctgctgtcacaagtgggctggcttcactgtcttctcttactcttcagaactcggactcttctgcttcagcccctaacaagtgctatgccccatcagccatccctaccccacagaggacttccactccagggttggccctgttcccaggcccgccgtctcccgtggctaactcaacttccactcccctgacattgcctgtacagtctcctttagccactgctgcatcagcttccacgtcagcgccagttagctgtggctcctcagcctcccttttgcgtggcccccacccaggtacctcagatctgcatatttcatctacccctgctgcaacaactcttcctgttatgatcaaaactgagcccacaagtcctactccctcggccttcaaaggtccatctcattctgggaatccctctcatggcactttaggtttgtcagggacattgggccgtgcatatacttcaacatccgtgcccatcagtttatctgcttgccttaatcctgcattgtcaggtctctccagctcgagtactcctttaaatggttcaaatcctctttcctctatttcccttccaccacatggttcctccactcccattgcaccagtattcactgctcttccttcttttacttctttgaccaacaattttcctttaactggcaacccatctcttaatccgtcagtatctctcccagggtcattaatagccacctcatctaccgctgccacctccacatctctccctcatcccagctcaacggcagctgttctctcagggctttctgcttcagcaccagtctcagcagcacctttccccctcaacctgtccactgctgttccctcacttttctctgttactcaaggacctctgtcatcttcaaatctctcctatccaggcttttctgtctctaataccccaagcgttacccctgctcttccctcattcccggggctgcaggcgccctctacagtcgcagctgtcacaccactacctgtggctgccacagccccatccccagctccagtcctcccaggattcgcctcagcattcagttccaatttcaactccgctcttgttgcacaagccggtttatcatctggacttcaagctgcagggagttctgtttttccaggccttttgtccctcccgggtatccctgggtttcctcagaatccttcacaatcatccttgcaagaattacagcataatgcggctgcgcagtcagcattgttacagcaggtccattcagcttcggctctggaaagctatccagctcagcctgatgggtttcctagttatccttcagcgccaggaacaccattttctttgcaaccaagcctgtcccagagtgggtggcagtgaatacttttaacttttattctccttcagagcaacatcagaattgcctgagaactgcaatgaacaatctgacaaatgtgaagctggccaaaagtcggaaaatgagaatgagggtaatcctggagaaattgtgacaacaatttgaaaattgtggttgcattttaaagtgtgaacactcccctatgtaaatatgctgacaataaattgtatggagaatggtattt

SEQ ID NO: 14581 - protein, 639 aa, Homo sapiens
MNLLNTVLPVFPGQVSSAVHTPQPSIPNPTVIRTPSLPTAPVTSIHSTTTTPVPSIFSGLVSLPGPSATPTAATPTPGPTPRSTLGSSEAFASTSAPFTSLPFSTSSSAASTSNPNSASLSSVFAGLPLPLPPTSQGLSNPTPVIAGGSTPSVAGPLGVNSPLLSALKGFLTSNDTNLINSSALSSAVTSGLASLSSLTLQNSDSSASAPNKCYAPSAIPTPQRTSTPGLALFPGPPSPVANSTSTPLTLPVQSPLATAASASTSAPVSCGSSASLLRGPHPGTSDLHISSTPAATTLPVMIKTEPTSPTPSAFKGPSHSGNPSHGTLGLSGTLGRAYTSTSVPISLSACLNPALSGLSSSSTPLNGSNPLSSISLPPHGSSTPIAPVFTALPSFTSLTNNFPLTGNPSLNPSVSLPGSLIATSSTAATSTSLPHPSSTAAVLSGLSASAPVSAAPFPLNLSTAVPSLFSVTQGPLSSSNLSYPGFSVSNTPSVTPALPSFPGLQAPSTVAAVTPLPVAATAPSPAPVLPGFASAFSSNFNSALVAQAGLSSGLQAAGSSVFPGLLSLPGIPGFPQNPSQSSLQELQHNAAAQSALLQQVHSASALESYPAQPDGFPSYPSAPGTPFSLQPSLSQSGWQ

SEQ ID NO: 14582 - DNA, 2008 bp, Homo sapiens
  CDS (8)..(439)
tggtgagatgtttctggaagaaaaaatcccctcgatttctgatttaaagctagcaattcgaagagctactctgaaaagatcatttactcctgtatttttgggaagcgccttgaagaacaaaggagttcagcctcttttagatgctgttttagaatacctcccaaatccatctgaagtccagaactatgctattctcaataaagaggatgactcaaaagagaaaaccaaaatcctaatgaactccagtagagacaattcccacccatttgtaggcctggcttttaaactggagtttttgtctaggtcctttttccgtctcactagacagaaggaccacagaaggcccatccagaggaccacgttatatttgattgtcatgtctccttatgatctcctaggctgtaatagtttcttagactttccttgtttctcacgagattgatatttttgagaagtattggtcagctcttttgtagagtgtccctcaatttgggtttattatttgatgcttttcacatgattagattggagtcatgtgtttttaggaggactgccatcgaggtgaagtgttattcttgtcacatcatatccaaggtacagacttgcagcatgatttatcattgtttttgttttttttgtttttatttttatttttttgagatgagatttcgctcttgttgcccaggctggagtgcaatggcgcaatctcggctcactgcagcctccacctcccaggttcaagcgagtctcctgcctcagcctcccaagtagctgggattacaggcatgcgccaccacgcccagctaattttgtatttttagtagagacgtagtttctccctgttggtcaggccggtctcgaactcctgacctcaggtgatccgagtgtcttggcctcccaaagtgctgggattacaggcgtgagccaccgcacccggctgatttatcattgttaatgctaacctcaatcaccacacctggctgagatagtgtttgacaggtttctctgctgtaaagttactgtactctttttattccccttttcatagtgtactttttagaaggaagtcacttggctcagccaacacttaaggaggggggaattatgttccacccccttgaagggggcactatctacataagttatttggaattcttctgaaagggagatttgtctttcttccctgcttatttatctatttggacaatcacttatttaatatcagcgtggactcacgtatatgtattttgaactttgagttataactatgactttgagtatgtcatttgttgttcagattggctgggtttggcgattgggaactctcagttggctcctgtgttcctttaacatcttccaatgttttgcctttttgaatacttccttacttgctggcactacaagacgccccaggcttatcttgtatattccatgccctaaccctagaatcagccgttctccaaggagcactggttcctttttaagtaaaatggtattagaaaccaagatttggggactggatgggctttttgttgaaatgctgttgcttctgtacataatattttaagtggggaaaaatggtagataagttggaagtgttaagagtggttatttctgggatgggattatattttgggggctttttcttactttaaaaatattttacagtatatttattacctccaaaatgaggggaaaatttttttaattaaaaagtggaaataacattacagtaaaagtttttacacataaagcttttaaaaatacatatataagaatattttcttaggattcccagaatagtgattattgagttagaggcatagaatgttttcatagttaatggtttatattgccagattgcgttcatactctccaaattaatgtattggattatttcaatgaatatcatcattgagtattgtttaaaaatcattactgatttaacaaatgaagaattctattgtaatcttttatcttgatgaaataaattttgatttttaaaagc

SEQ ID NO: 14583 - protein, 144 aa, Homo sapiens
MFLEEKIPSISDLKLAIRRATLKRSFTPVFLGSALKNKGVQPLLDAVLEYLPNPSEVQNYAILNKEDDSKEKTKILMNSSRDNSHPFVGLAFKLEFLSRSFFRLTRQKDHRRPIQRTTLYLIVMSPYDLLGCNSFLDFPCFSRD

SEQ ID NO: 14584 - DNA, 2522 bp, Homo sapiens
  CDS (170)..(1327)
gtgtggagtttacggagccggtgggcggtaggcggtgctacgggtagctgggtgctgtccaaaggcgacagggcgtcgttaggggagcgagtcgtgaccggttgggccacactcaacgtgggacgaagcttcgcctactgtttgactacgtgcgtgcagcctcccctcgatgtcggccctcgaaaagagcatgcacctcggccgccttccctctcgcccacctctacccggcagcgggggcagtcagagcggagccaagatgcgaatgggccctggaagaaagcgggacttttcccctgttccttggagtcagtattttgagtccatggaagatgtagaagtagagaatgaaactggcaaggatacttttcgagtctacaagagtggttcagagggtccagtcctgctccttctgcatggaggaggtcattctgccctttcttgggctgtgttcacggcagcgattattagtagagttcagtgtaggattgtagctttggatctgcgaagtcatggtgaaacaaaggtcaagaatcctgaagatctgtctgcagaaacaatggcaaaagacgttggcaatgtggttgaagccatgtatggggaccttcctcctccaattatgctgattggacatagcatgggtggtgctattgcagtccacacagcatcatccaacctggtaccaagcctcttgggtctgtgcatgattgatgttgtagaaggtacagctatggatgcacttaatagcatgcagaatttcttacggggtcgtcctaaaaccttcaagtctctggagaatgctattgaatggagtgtgaagagtggccagattcgaaatctggagtctgcccgtgtctcaatggttggccaagtcaaacagtgtgaaggaattacaagtccagaaggctcaaaatctatagtggaaggaatcatagaggaagaagaagaagatgaggaaggaagtgagtctataagcaagaggaaaaaggaagatgacatggagaccaagaaagaccatccatacacctggagaattgaactggcaaaaacagaaaaatactgggacggctggttccgaggcttatccaatctctttcttagttgtcccattcctaaattgctgctcttggctggtgttgatagattggataaagatctgaccattggccagatgcaagggaagttccagatgcaggtcctaccccagtgtggccatgcagtccatgaggatgcccctgacaaggtagctgaagctgttgccactttcctgatccggcacaggtttgcagaacccatcggtggattccagtgtgtgtttcctggctgttagtgacctgctgtccacccctcctcaacatcgagctctgttgtaaatacgtcgcaccagaggccactgtgatgccactgtctcctctccatcccgcccagccatgtgacactggctcccggtagacgggcaccccgagatgtaccaaccttttcatgtattctgccaaaagcattgttttccagggcccttgaccaacatcggcttccccagtccagggctcccctgctcctttcccttccctgtactggggtagctcctgcctgctctccctgcgttgcctagggtaaagcctccagatttgccatactgagcccctcttcctagcatcaggcgatacatctgagttcaaatgtcttcccaggctcagggacctccattccttgagattgtcttggcatggcccagccctgcctcatgggatggacaatgcatggggtggtctttatttttccctttcaaataaaacactagtcaggtaccgttttatcccagtcgtactcttccaggtttggaagacccagagaggccaagatcccatccttagccatagcgagcggtggtggtggatagcatcacaagaaacgagcctgaaaatcaggtccagccggtccaagcacatggcctcccatctgggagagcccactgtcccactcccacatgtctgggcacctgccctgggctgaggccaggctgctccaggggcctcctgcgccctcacctgccacagagcaacccaggttaaatacagcccatgcacaaagccacaggccaaagcctatggaattgtttttaatcatcaaatttaaccattttcataactggttcctggaggtgtgcagtgcccccttgcctcttcaaacctacagcttctctttgccatttgtggatttcacatcactccacacagaaacattacagcctggcatccccagtctttgccttcttccagctgcctcgacacagcactgtggcctgtccctattgcccaggcacgccatttccaagggcaggaaggggcagtgtcctgaagcccatcttttctgtgactgtcttaggtgatgtgtagccccctccacctttccactcaacaacctcccacccctgtcctgctgcatggtccggagtctgggacctactttgttttttgttatttatgaccttgtttaaagaaaataaatatctcccaaccttt

SEQ ID NO: 14585 - protein, 386 aa, Homo sapiens
MSALEKSMHLGRLPSRPPLPGSGGSQSGAKMRMGPGRKRDFSPVPWSQYFESMEDVEVENETGKDTFRVYKSGSEGPVLLLLHGGGHSALSWAVFTAAIISRVQCRIVALDLRSHGETKVKNPEDLSAETMAKDVGNVVEAMYGDLPPPIMLIGHSMGGAIAVHTASSNLVPSLLGLCMIDVVEGTAMDALNSMQNFLRGRPKTFKSLENAIEWSVKSGQIRNLESARVSMVGQVKQCEGITSPEGSKSIVEGIIEEEEEDEEGSESISKRKKEDDMETKKDHPYTWRIELAKTEKYWDGWFRGLSNLFLSCPIPKLLLLAGVDRLDKDLTIGQMQGKFQMQVLPQCGHAVHEDAPDKVAEAVATFLIRHRFAEPIGGFQCVFPGC

SEQ ID NO: 14586 - DNA, 1866 bp, Homo sapiens
  CDS (23)..(787)
cagcttcgagacagagtgatagatggaactccttgtggccaggacacaaatgatatctgtgtccagggcctttgccggcaagctgaaattcctcagagtgaaaactgtacccctcctcagcaaagtggatgatatccatgctatctgtagccttctaaaagactttcttcgaaacctcaaagaacctcttctgacctttcgccttaacagagcctttatggaagcagcagaaatcacagatgaagacaacagcatagctgccatgtaccaagctgttggtgaactgccccaggccaacagggacacattagctttcctcatgattcacttgcagagagtggctcagagtccacatactaaaatggatgttgccaatctggctaaagtctttggccctacaatagtggcccatgctgtgcccaatccagacccagtgacaatgttacaggacatcaagcgtcaacccaaggtggttgagcgcctgctttccttgcctctggagtattggagtcagttcatgatggtggagcaagagaacattgaccccctacatgtcattgaaaactcaaatgccttttcaacaccacagacaccagatattaaagtgagtttactgggacctgtgaccactcctgaacatcagcttctcaagactccttcatctagttccctgtcacagagagtccgttccaccctcaccaagaacactcctagatttgggagcaaaagcaagtctgccactaacctaggacgacaaggcaacttttttgcttctccaatgctcaagtgaagtcacatctgcctgttacttcccagcattgactgactataagaaaggacacatctgtactctgctctgcagcctcctgtactcattactacttttagcattctccaggcttttactcaagtttaattgtgcatgagggttttattaaaactatatatatctccccttccttctcctcaagtcacataatatcagcactttgtgctggtcattgttgggagcttttagatgagacatctttccaggggtagaagggttagtatggaattggttgtgattctttttggggaagggggttattgttcctttggcttaaagccaaatgctgctcatagaatgatctttctctagtttcatttagaactgatttccgtgagacaatgacagaaaccctacctatctgataagattagcttgtctcagggtgggaagtgggagggcagggcaaagaaaggattagaccagaggatttaggatgcctccttctaagaaccagaagttctcattccccattatgaactgagctataatatggagctttcataaaaatgggatgcattgaggacagaactagtgatgggagtatgcgtagctttgatttggatgattaggtctttaatagtgttgagtggcacaaccttgtaaatgtgaaagtacaactcgtatttatctctgatgtgccgctggctgaactttgggttcatttggggtcaaagccagtttttcttttaaaattgaattcattctgatgcttggcccccatacccccaaccttgtccagtggagcccaacttctaaaggtcaatatatcatcctttggcatcccaactaacaataaagagtaggctataagggaagattgtcaatattttgtggtaagaaaagctacagtcattttttctttgcactttggatgctgaaatttttcccatggaacatagccacatctagatagatgtgagctttttcttctgttaaaattattcttaatgtctgtaaaaacgattttcttctgtagaatgtttgacttcgtattgacccttatctgtaaaacacctatttgggataatatttgg

SEQ ID NO: 14587 - protein, 255 aa, Homo sapiens
MELLVARTQMISVSRAFAGKLKFLRVKTVPLLSKVDDIHAICSLLKDFLRNLKEPLLTFRLNRAFMEAAEITDEDNSIAAMYQAVGELPQANRDTLAFLMIHLQRVAQSPHTKMDVANLAKVFGPTIVAHAVPNPDPVTMLQDIKRQPKVVERLLSLPLEYWSQFMMVEQENIDPLHVIENSNAFSTPQTPDIKVSLLGPVTTPEHQLLKTPSSSSLSQRVRSTLTKNTPRFGSKSKSATNLGRQGNFFASPMLK

SEQ ID NO: 14588 - DNA, 2078 bp, Homo sapiens
  CDS (6)..(1490)
tcaacatggtagcgcccggccgagtgctcatctgcactgtcaaggatgagggctccttccacctcaaggacacagccaaggctctgctgaggagcctgggcagccaggctggccctgccctgggctggagggacacatgggccttcgtgggacgaaaaggaggtcctgtcttcggggagaaacattctaaatcacctgccctctcttcctggggggacccagtcctgctgaagacagatgtgccattgagctcagcagaagaggcagagtgccactgggcagacacagagctgaaccgtcgccgccggcgcttctgcagcaaagttgagggctatggaagtgtatgcagctgcaaggaccccacacccatcgagttcagccctgacccactcccagacaacaaggtcctcaatgtgcctgtggctgtcattgcagggaaccgacccaattacctgtacaggatgctgcgctctctgctttcagcccagggggtgtctcctcagatgataacagttttcattgacggctactatgaggaacccatggatgtggtggcactgtttggtctgaggggcatccagcatactcccatcagcatcaagaatgcccgcgtgtctcagcactacaaggccagcctcactgccactttcaacctgtttccggaggccaagtttgctgtggttctggaagaggacctggacattgctgtggattttttcagtttcctgagccaatccatccacctactggaggaggatgacagcctgtactgcatctctgcctggaatgaccaggggtatgaacacacggctgaggacccagcactactgtaccgtgtggagaccatgcctgggctgggctgggtgctcaggaggtccttgtacaaggaggagcttgagcccaagtggcctacaccggaaaagctctgggattgggacatgtggatgcggatgcctgaacaacgccggggccgagagtgcatcatccctgacgtttcccgatcctaccactttggcatcgtcggcctcaacatgaatggctactttcacgaggcctacttcaagaagcacaagttcaacacggttccaggtgtccagctcaggaatgtggacagcctgaagaaagaagcttatgaagtggaagttcacaggctgctcagtgaggctgaggttctggaccacagcaagaacccttgtgaagactctttcctgccagacacagagggccacacctacgtggcctttattcgaatggagaaagatgatgacttcaccacctggacccagcttgccaagtgcctccatatctgggacctggatgtgcgtggcaaccatcggggcctgtggagattgtttcggaagaagaaccacttcctggtggtgggggtcccggcttccccctactcagtgaagaagccaccctcagtcaccccaattttcctggagccacccccaaaggaggagggagccccaggagccccagaacagacatgagacctcctccaggaccctgcggggctgggtactgtgtacccccaggctggctagcccttccctccatcctgtaggattttgtagatgctggtaggggctggggctaccttgtttttaacatgagacttaattactaactccaaggggagggttcccctgctccaacaccccgttcctgagttaaaagtctatttatttacttccttgttggagaagggcaggagagtacctgggaatcattacgatccctagcagctcatcctgccctttgaataccctcactttccaggcctggctcagaatctaacctatttattgactgtcctgagggccttgaaaacaggccgaacctggagggcctggatttctttttgggctggaatgctgccctgagggtggggctggctcttactcaggaaactgctgtgcccaacccatggacaggcccagctggggcccacatgctgacacagactcactcagagacccttagacactggaccaggcctcctctcagccttctctttgtccagatttccaaagctggataagttggtcattgattaaaaaaggagaagccctctg

SEQ ID NO: 14589 - protein, 495 aa, Homo sapiens
MVAPGRVLICTVKDEGSFHLKDTAKALLRSLGSQAGPALGWRDTWAFVGRKGGPVFGEKHSKSPALSSWGDPVLLKTDVPLSSAEEAECHWADTELNRRRRRFCSKVEGYGSVCSCKDPTPIEFSPDPLPDNKVLNVPVAVIAGNRPNYLYRMLRSLLSAQGVSPQMITVFIDGYYEEPMDVVALFGLRGIQHTPISIKNARVSQHYKASLTATFNLFPEAKFAVVLEEDLDIAVDFFSFLSQSIHLLEEDDSLYCISAWNDQGYEHTAEDPALLYRVETMPGLGWVLRRSLYKEELEPKWPTPEKLWDWDMWMRMPEQRRGRECIIPDVSRSYHFGIVGLNMNGYFHEAYFKKHKFNTVPGVQLRNVDSLKKEAYEVEVHRLLSEAEVLDHSKNPCEDSFLPDTEGHTYVAFIRMEKDDDFTTWTQLAKCLHIWDLDVRGNHRGLWRLFRKKNHFLVVGVPASPYSVKKPPSVTPIFLEPPPKEEGAPGAPEQT

SEQ ID NO: 14590 - DNA, 1968 bp, Homo sapiens
  CDS (137)..(712)
acagaaggcggggccagcgccgctgccgggtgctggaggcgccattggagccggcttggctggcgagcccggctgaggagcctcttgggtcgcacttaccgccgcgtccgctcccggtccctggcccctcagcggcatggcgtgcggggcgacgctgaagcggcccatggagttcgaggcggcgctgctgagccccggctccccgaagcggcggcgctgcgcccctctgcccggccccactccgggcctcaggcccccggacgccgagccgccgccgccgtttcagacgcagaccccaccgcagagtctgcagcagcccgccccgcccggcagcgagcggcgccttccaactccggagcaaatttttcagaacataaaacaagaatatagtcgttatcagaggtggagacatttagaagttgttcttaatcagagtgaagcttgtgcttcggaaagtcaacctcactcctcagcactcacagcacctagctctccaggttcctcatggatgaagaaggaccagcccacatttaccctccgacaagttggcataatatgtgagcgcctcttaaaagactatgaagataaaattcgggaggagtatgagcaaatcctcaataccaaactagcagaacaatatgaatcttttgtgaaattcacacatgatcagattatgcgacggtatgggacaaggccaacaagctatgtgtcatgaagctttgtcacatatctgggtatcaggtttgacctcaagagatggccgctgtacactttttgcaactggtttgatgtcacatttcagctccaactttgcatcctgagaacacttaaacgtttctgcaggtccattttatacaacttgaaagaccgtaaaactttctggttgccacaagcatatctttcttttctgctcatccaataaacagctgtgccctactgtgatagattttccaaacaaaaatacctggagcagcagtttagcaaaatatgccttcagtggcattcaacaaatggagtttccccaagcacagttctgtaagaagtgcgtgtgagagtgtgtgtatatgtgtgtatgtgtattttaagttattatttgtattgtgcaaaaattttttttttgatcttggggattctggctgtgaatttggtgcacgacaattatggtaaaaaaacatttgcttggtctaaagaagatcattaatgttttgtgaccatacaagttgtaacagtggattgtttttatgtgtaggtattgttaaatacagggactgtttccaggcacagaatatgaatcgtaagttaggatggacattagatgtgattatgatgataaagcgaaggtctgcggtcctgtatctacagacacgtggtgagaaattagaacaaactggagacgggccattgacacatggactctgcctgggcatgttaggttaattctttgactccaagccttaaaatactcacatggagtcagcgctcacctcattcacacaattatcatagagctccctggacactgaacctctaaagggaaaaggtctaccctggagccaggagcatcagggttggcttgggagcatgagaggtgagcccagggctaggcctgggccaggccccggcagcactgctacttgggaggagccacttcacctttgtattagttattaaaaaatataatttgggctgggcgcagtggctcacgcctgtaatcccagcactttgggagtccgaggcatgcggatcacttgaggtcaggagttcgagaccaccctggccaatatggtgaaaccccatctctactaaaaatacaacaaagttagccgggcgtggtggcaggcgtctgtaatcccagctgcttgggaggctgaggcagtagaatcacttgaaccctggaggtggcggttgcagtgagcacagatcatgccactgcactccagcctgggcaacaaaacgagacttcgtctc

SEQ ID NO: 14591 - protein, 192 aa, Homo sapiens
MACGATLKRPMEFEAALLSPGSPKRRRCAPLPGPTPGLRPPDAEPPPPFQTQTPPQSLQQPAPPGSERRLPTPEQIFQNIKQEYSRYQRWRHLEVVLNQSEACASESQPHSSALTAPSSPGSSWMKKDQPTFTLRQVGIICERLLKDYEDKIREEYEQILNTKLAEQYESFVKFTHDQIMRRYGTRPTSYVS

SEQ ID NO: 14592 - DNA, 2480 bp, Homo sapiens
  CDS (218)..(859)
ttacccgatcccactctccagacccgccgctgcctatgaggaggccctgcagctggtgaaggaggggagagtgccttgccggaccctcaggacggagctgctgggctgctacagtgaccaggactttctggccaagctgcactgtgtgcggcaggccttcgaggggcttctggaagacaagagtaaccagcttttcttcgggaaagtgggccgacagatggtgacaggcctgatgaccaaggctgagaagagccccaaaggcttcctggagagctacgaggagatgctgagctatgccctgcggcccgagacctgggccacaacacggctggagctggagggccgaggggtggtatgcatgagcttcttcgacatcgtgctggacttcatcctcatggacgccttcgaggacctggagaaccctccggcctcggtgctcgccgtcctgcggaaccgctggctgtcagacagcttcaaggagacggccttggccactgcttgctggtcggtcctgaaagccaagaggaggctgctgatggtgcctgatggcttcatctcccatttctactccgtatcggagcatgtgagccctgtcctagccttcggcttccttggacccaagcctcagcttgctgaagtctgtgctttcttcaagcaccagattgtgcagtacctgagggacatgttcgacctggacaatgtgcgctacacgtcactgcccgcgctggcagacgacatcctgcagctgtcccggcgccgcagcgagatattgctggggtacctgggggtgcccgcggccagcagcgcaggcgtgaatggggcgctgccccgagagaatgggcccctgggggagctgcagtagaggcggcacgggctggggggtggcagagagaaggctcctcctcccttccctgggttggtatctgacagctgtggtggctgagggccgttgcccctgactttgccccacccccatcatctgggagtccccaaggcccagaggggacatttccatggagaagaacggttcctgggggaagcagaggccaggaccagtggggcctgtgggagagaaaggctgtgagagagggggttgttgtggagaattgggacaggcagagccaggatgccccaggtgggggaccccaaaacctcccatcgctccagggctgctgacaagggtgctgggagggtggaggtgaaggatggggcctagagccctgtggtgaaggtcacagtgtcctgagctagaagccacctgtggctatatggtctcagcatccagctggcctgtcctgatgccctccccacctcaaccgccttctcagagagtttgcaactccagagaaggagagtggggccaccttagtgggcagcaggcctgggccatccagagatggggcagaggtgggcctcccactcctgtgctctcttctgagcaggaactgggcccttgacagtgtcctttgacattccctcgccctaccaaagatcgtcttttctcctcccacctctgtcaccaccaaagacgggcggaggtggggctgggccctcctgcccccgcccatcccccttccatgagcccagacctccctgggtggtgctaggctctgagctgggggctcagaccagggatcgctcaggcccctgtcacctgtgggcccggggaccacttgggggaggtcagaggatgtatgtggccggaccagcttccccaccttcattaggacaagaaactgcccagcactttgccttcagttcaacgcacaaacgctcctggggcctcatgggggcagagcctcccctgggcctgcagagagtcctgttagcagcgacgtccccccgccgcggggtcctgtcagcccggcagtgtcttctcagtgtcttcacctgagcgagtgtctgtggccccaacgcgttctgctgtggctctgccctttccaggttgagaggcctgcaggagaaacacactcccctcctgggtttccacactcaggaggtcagaggactggctcctgtgaccagggcccctctcccctgaatgggaaaggggtctggggatgggagggcgcaccacagagaggagatgatgctgggtgtggcccatcttctgtgggccccttcccagacaccggatccatgggcactaacccgcctcccaggctgatgcccggaggcagcttcctgggcaggagggttccatgggcactaacccacctcccaggctgatgcctggaggcagcctccagggcaggaaggaccctgtgctccccgccccccatcctgacatcctgttcttttgcacttaccctgtgctgtgaatgtaacagtgggccttggccccgcccactctgatttgcattttcatttgtgtttgtttacacatccatgcactgcctgtagcagtcgattgtcacagcttcgacttttggatggtagagtgtgtgcactgactgtgagtcgaataaacaattgagacg

SEQ ID NO: 14593 - protein, 214 aa, Homo sapiens
MVTGLMTKAEKSPKGFLESYEEMLSYALRPETWATTRLELEGRGVVCMSFFDIVLDFILMDAFEDLENPPASVLAVLRNRWLSDSFKETALATACWSVLKAKRRLLMVPDGFISHFYSVSEHVSPVLAFGFLGPKPQLAEVCAFFKHQIVQYLRDMFDLDNVRYTSLPALADDILQLSRRRSEILLGYLGVPAASSAGVNGALPRENGPLGELQ

SEQ ID NO: 14594 - DNA, 3344 bp, Homo sapiens
aaaacaattggtatatgaaatatacacatcctgtgccccaatatggtgcattatgaaaaacaaaatcattttctaaaatgcattttttgagcattgctctatagaagggaagggtgatgagagaacagaactggcccctgtacaggtgtcattaatctggttgtatatgggttataatatgtaatacaaaaagctcattaagtatgggactacatggagagggaagacagtttcatttatagctactggggctaccaggacccttgctgactgcagcctggttgtgattagttcaggttactaggtgttctgatggagtgggacagtccaagtccagtaactgacattacgttttatgcgtgtgcagtttggtataacgtggagtcagtgctctaacgacacactatacttctatatgcttttttctgtgaattttccttggtacatgagagaaataagtactctcatcaacttatgataaattggactattaggaataaaacaatctcagagcagctcctaaacaagagaataaaaatgggccatcccagcacttataaggggagcacatcttgtaatgaaagtctgtgcctattgttaatgattaccaatgcaaactgcagaaatcagttgacattgtcccacaaggaaaaagtgatgccagtaaagtgggggaagagatggtaaataattctagaatgagcaaaagtgcttaattagtacagtatactcaaggtcttgcataacccacactccacgaaaaccgcatcgtaaacagagagtgaacagcacctctccattgctacatctccagaatattgttcggttatgttcatgtggttatggagcaataagaatatataccattaatttttaggtctttcaaattgttcaccaagttttgtgtttgatatttatgaagtgatctttaacacatctgcattgttaatttaagcatgcacagaaatttgggtaatgtttgagtagattgccaagcgctactgtgattcatgaatgaatttctcatagtcttctgcctgcagttttatagtttgaggggcacccatatttgtgggttagagttagtaagaatatgaatccagttatcaaagtattcatccctgaggttttgagttttattgtggtggtgattttctcatgagaaggtagacaacacttcagtttttcttgagggggaaaaaaatgtacccgctaaccttttttcacccatgatttgagccctaaaacaacagcctttatgttttcagtgcaggatttcttggaatttcttgcttgtatcaatcctgatgatagccatcctgaacagatgcttctggtctgttttcctggaatagcagacatccttttgaacactaatgatgccaggaagagagtaaggctagaggaggagactcattttaaccccagtccagtggcttgtccgacaacaggccatttccctttacattcctccacagacagaaatggctattaaaaatgttttaacctcatgtatgaactgaatttaaaaaaccactaaagtgatactttatacttctgttttactccctagtgggttttctttaatttggatttttgttgggatgtagcttttcctagactgtatttctgtagctctttttctctggtgtattcatggaaagcatctactgccgcacgacactagtactgtgccttctttcactgccctctgctctgcagctctcacccagcttggctgcttcaagtctgtgcagttgacttggctgtactgaaaagtgaacagcatggattaactcatcctgctgctgagggcagtgcaaacaggtgcttattagaggtagtgacttgcttaattagtgacactcctaatttctactatggataatttcaaagtagaatcactctatgcttagagttttggcaccaatgctgtagggcagcagaatctattctcagtaaaataacttatggtttattagatattctgtattggattttaccagcttgacttttactgctcagatgctttctttcccccccttagacgctgtaattctcttgggaagagtaactattcttaaggtttttacagatacccaccttagttgtaaattggatagtttatatttctgggactttttaaatgaaaatgtggaatgttaagttacaaaagacttttcatcagaaaatttcaaacaaagtaaacatggcgttttatagtcctctaaaatctaggtgctcccacccaccaaaggcatatcctgcaaagggctgtgaactatcttggtgaactgtcttgggtcccctttccatgtatgttttcttgtcactgaaaacaaacaacgctgagtttatcaagaaaatttaaattgggggatcataataattccaaccaagtgacaactctgacatcaaggttattaggagctgtacatccaattcaagttttatttgctgctattctgggagaataaacttgtatatggagaataaactaataaacttgtatcgaggaaatccataaagttataaattagcctgaaaaatatttcaggtaatggtgtggattggcctgctttgactctcagccaccaacagaaatctttgtcacctttgttcctcagctaaaagtaattttgttataaacacaaagtgactttaaacaggtaaaaaacccattcctatttttgtacattaccaaaagtttttcatatacctacagagctaactaattacaactgatttaatccactcaagtttagaccagttaaacccataggatcctgtatggttatcaatgtgatgccttgcttttcataaaataggtataattgggtcatacacttgacgagagggtgactgtttctaggggaagaaaaccctttagattgcaggtaactttcactttttttttttaatatacactttacatttgtataaattatgcagggtactcctaaccctgtagaaatgtatgacctctcacaaagttgagatttgatccaaagagaaatgcaagtataaaagaattagatacttattatcttttaaggttttttttttttttggtagagatgggggtctcactgtgttgcccaggctggtctcaaactcctggccacaagtgatcttcctgcctcagcctcccaaaatgctgagattacaggcatgagccactgtacccagcctttccttataaaattcaaagagaaaatttctacacctttatccctcaaataaaacaagtgctcagttcttaccgtgccttgcaaggtctatatgtaaaagaaatctgaaatttagctgtagaataaaacttgataaataaaaagaaaaaacat

SEQ ID NO: 14595 - DNA, 2423 bp, Homo sapiens
  CDS (155)..(1033)
taagaaactgaaagaattgaaccaacgcattgggaagacagagtgcagaaataagcatgaaggaatagctgataaacttttggcaaaaatagcaaaacttcaaagacgtattaaaacagtattattatttcaaaggaattgtttgaaaccaaacatgttatccagtaatggagcctctaaggttgcaaattcagaggctatgattttggataagaatcttgagtcagttaatagtccaattgaaaagtcttctgtgaattatgagccttctaacccttccgaaaaaggaagtaaaaaaattaatttgtcatcagatcaaaataagtctgtttctgaaagtaacaatgatgatgttatgttgatttctgtggaaagtcctaatttgacaactccaactacatcaaatccaacagataccagaaaaattacatcaggaaattctagcaattctcccaatgctgaagttatggctgtacagaagaaacttgattctataattgatttgacaaaagaaggcctatccaactgcaatacagaaagtccagtatcccccctggagtcacattcgaaagctgcttcaaactcaaaggaaacaaccccattggcacaaaatgcagtccaggttcctgagtcctttgagcacctgccacctctcccagaaccaccagcaccactacctgaattagtagacaaaacccgagacacacttcctccccagaagcctgagctcaaagtgaaacgggttttcagaccaaatggcattgccctgacttggaatataaccaaaatcaatcccaagtgtgctcctgtagaaagctaccacctcttcctgtgtcatgagaactctaataataagttgatttggaagaagattggagaaattaaagctttaccactccccatggcctgtactttatctcagtttttagcttccaacagatactattttaccgtccaatcaaaagatatttttggacgatatggaccattctgtgatataaaatctatccctgggttttctgaaaatcttacgtaaaaggtgtttaataatgatatactactttttttttcatatttgtttgtttgcaatgttactgtaatactatttgccattgtaaaaggccagctcagattgtgagccctttctattgggacagtcctcttctatatgttttaagtggccagtaatttaatgaatttctggtttgtattaaatatgtccttccaatggataagttctaaaacatacgctatcattggcccatgttgctgaggtgcattgtgaacaatacctttagtgactgtggaactgctgcttctatcagaagacctaggatacaagcagccactgtttcctccgttaacaatcagcttttagtaacctgctgtggtcagcatagctacaggaaaagtcagcccttgactgagggccagatcatccctggagtgcacctctactaagattttatgaaaagatgacatgttgggctgcatgataaaagttaattataaaaattaaaagatttttttttttgagatggaatattgctctgttgcccaggctggagtacagtggtcactgcaacctccatctccctggctcaagcaattctcctatgtcagcctcccaagtagctgggactatagtcacttgccaccatgcccggctaatttatttttagtagagatgaggtttcaccttgttggtcaggctggtctcaaactcctgacctcaggggatccacccgcctcggcttcccgaagtgctgggattataggcgtaagccaccatgcctggccaaaaattaaaagattttatgaaacgaaatggcttcccattctttctattcagcttctaagtgggctattcatttgtgctctcctcttttttgtttgttttgcactttgtcaatcatttggggaaatagcctggaggtctttcctgaatctgtttgtagacataataaaatttgtgtgctgtgtacacaaaaacataatgtatcttatgaaagcattacccaacctgtttgagttgagaatgcatttgtccacctttgatttgaggctttagtttgctgatttcctaaatgctaccctttgatcatttcctggccaccatcacaatactaaggggctcagatgtgtcttgtgcccacctcttcctgagaagagatggaagtggagctgtgactagtacaagcagcccaagaaactctgaacgggacccaatggaggcaaacttgagcaaataattgggatgataagaaacaaaaataatcccaactgtttgaaagttcgaaagaggggcattcttttctggtacatggtgagagttcaggctccagagactcaaaacggaatggttttccttggcattttgtaaatgctctcacatctgtagcaataaagctgttattttctgc

SEQ ID NO: 14596 - protein, 293 aa, Homo sapiens
MLSSNGASKVANSEAMILDKNLESVNSPIEKSSVNYEPSNPSEKGSKKINLSSDQNKSVSESNNDDVMLISVESPNLTTPTTSNPTDTRKITSGNSSNSPNAEVMAVQKKLDSIIDLTKEGLSNCNTESPVSPLESHSKAASNSKETTPLAQNAVQVPESFEHLPPLPEPPAPLPELVDKTRDTLPPQKPELKVKRVFRPNGIALTWNITKINPKCAPVESYHLFLCHENSNNKLIWKKIGEIKALPLPMACTLSQFLASNRYYFTVQSKDIFGRYGPFCDIKSIPGFSENLT

SEQ ID NO: 14597 - DNA, 2381 bp, Homo sapiens
  CDS (22)..(1071)
tttacccagactcctcctggaatgctggccttggacaacatgctgtacttggctaaagtccaccaggacacctacatccggattgtcttggagaacagtagccgggaagacaaacatgaatgcccctttggccgcagtgccattgagctcaccaaaatgctctgtgaaatcctgcaggttggggaactaccaaatgaaggacgcaatgactaccacccgatgttctttacccatgaccgagcctttgaagagctctttggaatctgcatccagctgttgaacaagacctggaaggagatgagggcaacagcagaggacttcaacaaggttatgcaagtcgtccgagagcaaatcactcgagctttgccctccaaacccaactctttggatcagttcaagagcaaattgcgtagcctgagttactctgagattctacgactgcgccagtctgagaggatgagtcaggatgacttccagtccccgccaattgtggagctgagggagaagatccagcccgagatccttgagctgatcaagcagcagcgcctgaaccggctctgtgagggcagcagcttccgaaagattgggaaccgccgaaggcaagaacggttctggtactgccggttggcactgaaccacaaggtccttcactatggtgacttggataacaacccacaaggggaggtgacatttgaatccctgcaggagaaaattcctgttgcagacattaaggccattgtcactgggaaagattgtccccacatgaaagagaaaagtgctctgaaacagaacaaggaggtgttggaattggccttctccatcctgtatgaccctgatgagaccttaaacttcatcgcacctaataaatatgagtactgcatctggattgacggcctcagtgcccttctggggaaggacatgtccagtgagctgaccaagagtgacctggacaccctgctgagcatggagatgaagctgcggctcctggacctggagaacatccagattcccgaagccccaccccccatccccaaggagcccagcagctatgactttgtctatcactatggctgagcctggagccagaaacgacggtacccaggagaagggattttgggcccaggagaaacacttacattctggtgccttgtcttttgcttgtacagaatctgtagtgattttggtggccagtaaatgccagccatttctcaaacccacctcggactacccagagtttcctcttggtccctgtctactaagagtcatgaaggcagggtgctctgcccactccatcaccatgaagcctgggattgggccacgaggaacaaacagcagatgcccttgccttccagtccaagaaactgcttcttgaaatggatttaacaacagccactcaccttttcctcctgagcctgctctctgatcagctggatccccacgtgagcaacagctggcccaggaaaggctgcctgcaaaggacaggtgtgttgggcgtgttgagagccttgaagtgactacctgtatcttagatctgagtacaagcctgaggcttttgcttttgtcttttttgatgagggctcactccagcttcatatggtgccaagacgttgctgcttctgaggttggctctaacatctctggtctttagagccaccagatctctctggcccatacagatatcagagcagacggaaatttctccctgcaagcgctcagtctcatcccagcaagtcaaagacctcctggccaagtcctgccctcttaagtctccaggaacgctgcagggaaaacccagctgaggcctgggcctagactgtggtgaggtcactagattctactgctcttcccccacattaataccttttccttcctcagagagaaatctcccctaacctgaattgcagccccctccagtttgctttcctttggccttccagaccccaggaagttggccttcccttcctagtgctatggtttctgccattggccatgatttcagggagctggctgaggccggctgaggccacacctgtgccagtggggcttccctggtgctgcagcacttgtaaaccacacacacagcctctctccctggacatacgttagcacattggcattcagtattggtggcctggcatggtaggtactacccaatgaagagtgtactatatattttcattactataggccatacttatacagacgtgtatatatatttatataagatctacctatcttaggatggaaccttggggaaaaataaaattgaggggaagtaaaaagtatgtaacacttccagttgtgagccaagattgtaaccagagagcagccaggagcttcctgtcagtaaccatgttttcaataaatactctttcatgtac

SEQ ID NO: 14598 - protein, 350 aa, Homo sapiens [sequence omitted]

SEQ ID NO: 14599 - DNA, 1909 bp, Homo sapiens
  CDS (120)..(1289)
atatatcgacgaagaatggaaaaagatgtcccaatgctgccccaaagccagagaagaaagatggggtgtccttctgtgctgaacatgtccgtaggaatgccctggcacttcatgctcaaatgaagaagaccaacccagggcctgtgggtgaaacactcctgtgccagctgagctcatatgctaagacagagctggggtctcagactccagaaagtagtcgcagtgaagccagccgaatactagatgaagacagctggagtgatggggagcaggaacccattactgtggatcagacatggagaggtgaccctgacagtgaagctgatagcatagacagtgatcaagaagatcccctaaaacatgctggtgtctacacggcagaagaagtggccctgattatgcgtgaaaagctaattcgtttgcagtcgttgtatattgatcagtttaaacgacttcagcatctgctcaaggagaagaagcgccgatacttacataatcgcaaagtggaacatgaagctctaggcagtagtctcctgactggcccagagggacttttggccaaagaacgagagaacttaaagcgattaaaatgtctgcgacgataccgccagcgctatggagtggaagccttactgcataggcagttgaaggaacggagaatgctggccacagatggtgctgcccaacaggcccataccactcgttccagtcagaggtgcttggcctttgtggatgatgttcgttgttccaatcagtctcttccaatgaccagacactgccttacccatatttgtcaggatacgaatcaggttctcttcaagtgctgccagggatctgaagaggtaccctgcaacaaacctgttcctgtaagcctctctgaggatccctgctgcccgctgcatttccagttgcctcctcagatgtataagcccgagcaggtactgtctgtgccagacgatctggaagccggccccatggatctgtacttgagtgctgctgagcttcagcccactgagagtttacctctggagttcagtgatgacttggatgttgtgggtgatggtatgcagtgtcctccttcacctttgctttttgatccttcactaacccttgaagaccatttagtcaaagaaattgctgaagacacagtggatattttgggccagatgcagatggctggagatgggtgcagatcccagggatctcgaaattctgagaaagcctctgcaccattgtctcagagtggattggctactgcaaatgggaagccagaacccacttctattagttgatagtttggggaaccattttactttggtggatttaaatttctcgttcttcaaagaagtatttctgatcatctctcacaaaacacaggcaacccagactaccttgtttttcttctggattgagtattatagtcaaacgtaaagccaaattttgaggacgtggaccgtgggtttcttcccactcagggcaaggaagagaaagagagataatccctatcaaagcttctgggattatttgggactatacctaaaaggaaagtgacatctttgtaatgggatttcccaagtcatggatagaaatccacttaagtagctaggtgggagctgtctttgtgagtggtctttgagatactgatggccctaatatcggttatctctatctgaagacctgcagtttagcttttcttcacctctacttaattgggcagtctttaacccctttccctggtgaactctggctttttatcctctgagaaaacagcccacaggactgggtcctccttatccgtcttgcttttaacctatgtaaatttctgtggttgctatcttatgtaaaatatagtaaaaatttattgtatatagtttctattaaatgttaaagaaaatgttatgaaaatatc

SEQ ID NO: 14600 - protein, 390 aa, Homo sapiens
MKKTNPGPVGETLLCQLSSYAKTELGSQTPESSRSEASRILDEDSWSDGEQEPITVDQTWRGDPDSEADSIDSDQEDPLKHAGVYTAEEVALIMREKLIRLQSLYIDQFKRLQHLLKEKKRRYLHNRKVEHEALGSSLLTGPEGLLAKERENLKRLKCLRRYRQRYGVEALLHRQLKERRMLATDGAAQQAHTTRSSQRCLAFVDDVRCSNQSLPMTRHCLTHICQDTNQVLFKCCQGSEEVPCNKPVPVSLSEDPCCPLHFQLPPQMYKPEQVLSVPDDLEAGPMDLYLSAAELQPTESLPLEFSDDLDVVGDGMQCPPSPLLFDPSLTLEDHLVKEIAEDTVDILGQMQMAGDGCRSQGSRNSEKASAPLSQSGLATANGKPEPTSIS

SEQ ID NO: 14601 - DNA, 2051 bp, Homo sapiens
  CDS (262)..(1320)
tcatttcatgttatgttttcatttcccctctgtctgagagattgctctgatgtctttccttccataagtcctacggagatcgagcttacctcatttttctcccaggcctaggagctcaattaccaggatcactttcttccccagggtgtactacagacctccacatgttggacagtaggattcagcagagaatgagtcccacatcctcttttcatccataagccactcttcccaactactcttccgccttccattgtccctatgtctactttactgctcaatctggattttggggaacctcctcccaaaaaggcattagaaggaaatgccaagcaccgaaattttgtcaagaagcggaggctcttagaacggagaggctttctgagtaaaaagaaccaaccccctagcaaggcgcctaagttgcactctgaaccttcaaagaaaggggagactcctacggtcgatggcacttggaagaccccttccttcccaaaaaagaagacagctgcttccagcaatgggtcaggacagcccctggacaagaaagctgcagtgtcttggttgacccctgccccttcaaaaaaggctgattctgttgctgctaaagtagatttgctgggggagttccagagtgcccttccaaagatcaatagccacccaacccgctctcagaagaagagctcccagaagaaatcctctaaaaagaaccatcctcagaagaatgccccacagaactccacccaagctcattcagagaataaatgctccggagcatcccagaagttgccacggaagatggtggcaattgactgtgagatggtgggcacaggaccaaaggggcatgttagttccttggctcgatgtagcattgtcaactacaacggagatgtgctttatgacgagtacattcttcccccctgccacattgtggactaccgaaccaggtggagtggtatccggaagcagcacatggtgaatgccacacccttcaagattgctcgaggccagatcttgaagatactcacagggaagatagtggtggggcatgccatccacaacgacttcaaagcccttcagtactttcaccccaaatccctcacccgtgacacctcccatatcccccccctcaaccggaaggctgactgcccggagaatgccaccatgtctctgaagcatctcaccaagaagctgctaaaccgggatatccaggttgggaagagcggacattcctctgtggaagatgcccaggccaccatggagctatataagttggttgaagtcgagtgggaagagcacctagcccggaatccccctacagactagtggcaatggggacgctggtgatatgaggaggcagaggcagcacccaggagaaacagggcagtggaccaatggacagctccaccagctccacatctttggaagctagatttggggagagagaagctctaccccagacttaatacccattgaaatttcacctcaggtgttgtgtcctgtgtctggttaagtgtcccatggaaggggaaagccttcacgtcagaacccaaccctataccttttacttcttaaatggtgctaaccacaggtgtcccagggtgctctgtgccagttaagatttttaactttcaaggggcagggcatactgggaaatgtagtttcccaaactgccttatcacttgggtggacatatgtctccttttatgccttttggtcttgagtaattaacagcatcctcttccacgctcagaagtgttctggttggggccaggcatggtggctcacgcctgtagtcccaacacttagggaggccgaggcgggcggatcacctgagatcaggagttcaagaccagcctggccaacatggcgaattcccgttctctactaaaaatacaaaaaatgtgtggggtgtggtggcaggagcctgtaatcctagctactcaggaggctgaggcaggagaatcgcttgagcccaggaggcggagattgcagtgagccgagatcgtgtcactgcactccagcctgggtgacaagagtgagactccgtctcc

SEQ ID NO: 14602 - protein, 353 aa, Homo sapiens
MSTLLLNLDFGEPPPKKALEGNAKHRNFVKKRRLLERRGFLSKKNQPPSKAPKLHSEPSKKGETPTVDGTWKTPSFPKKKTAASSNGSGQPLDKKAAVSWLTPAPSKKADSVAAKVDLLGEFQSALPKINSHPTRSQKKSSQKKSSKKNHPQKNAPQNSTQAHSENKCSGASQKLPRKMVAIDCEMVGTGPKGHVSSLARCSIVNYNGDVLYDEYILPPCHIVDYRTRWSGIRKQHMVNATPFKIARGQILKILTGKIVVGHAIHNDFKALQYFHPKSLTRDTSHIPPLNRKADCPENATMSLKHLTKKLLNRDIQVGKSGHSSVEDAQATMELYKLVEVEWEEHLARNPPTD

SEQ ID NO: 14603 - DNA, 2223 bp, Homo sapiens
  CDS (169)..(2223)
taaatgcagctagattcaaatgggctgataaccaaattttaacacatcagcaatttgcattcagaaatttaaaaaatactgggccagacataaccctcaggttactttacctctgagggtgcaacctcttctcctcaaaatgtactggttctgcctgtctggagggccatggagaagaggctgggagtcaagccaaatcctgcttcctggattttatcaggatattattggcagacatctgcgaagtggttgagaagcctgtacctgttttatacttgcttttgcttcagcgttctgtggttgtcaacagatgccagtgagagcaggtgccagcaggggaagacacaatttggagttggcctgagatctgggggagaaaatcacctctggcttcttgaaggaaccccctctctccagtcatgttgggctgcctgctgccaggactctgcctgccatgtcttttggtggctagaagggatgtgcattcaggcagactgcagcaggccccagagctgccgggcttttaggacacactcctccaattccatgctggtgtttttaaaaaaattccaaactgcagatgatttgggctttctacctgaagatgatgtaccacatcttctggggctaggttggaactgggcatcttggaggcagagcccacccagagctgcactcagacctgctgtatcttccagtgaccagcagagcttaatcaggaagcttcagaagagaggtagtcccagtgacgtagttacacctatagtgacacagcattctaaagtgaatgactccaacgaattaggtggtctgactaccagtggctctgcagaggtccacaaggcgattacaatttccagtcccctaaccacagacctgactgcagagctgtctggtgggccaaagaatgtatcagtgcaacctgaaatatcagagggtcttgctactacgcccagcactcaacaagtaaaaagttctgagaaaacccagattgctgtcccccagccagtggctccctcctacagttatgctacccctaccccccaggcctctttccagagcacctcagcaccatacccagttataaaggaactggtggtatctgctggagagagtgtccagataaccctgcctaagaatgaagttcaattaaatgcatatgttctccaagaaccacctaaaggagaaacctacacctacgactggcagctgattactcatcctagagactacagtggagaaatggaagggaaacattcccagatcctcaaactatcgaagctcactccaggcctgtatgaattcaaagtgattgtagagggtcaaaatgcccatggggaaggctatgtgaacgtgacagtcaagccagagccccgtaagaatcggccccccattgctattgtgtcacctcagttccaggagatctctttgccaaccacttctacagtcattgatggcagtcaaagcactgatgatgataaaatcgttcagtaccattgggaagaacttaaggggcctctaagagaagagaagatttctgaagatacagccatattaaaactaagtaaactcgtccctgggaactacactttcagcttgactgtagtagactctgatggagctaccaactctactactgcaaacctgacagtgaacaaagctgtggattacccccctgtggccaacgcaggccccaaccaagtgatcaccctgccccaaaactccgtcaccctctttgggaaccagagcactgatgatcatggcatcaccagctatgagtggtcactcagcccaagcagcaaagggaaagtggtggagatgcagggtgttagaacaccaaccttacagctctctgcgatgcaagaaggagactacacttaccagctcacagtgactgacacaataggacagcaggccactgctcaagtgactgttattgtgcaacctgaaaacaataagcctcctcaggcagatgcaggcccagataaagagctgacccttcctgtggatagcacaaccctggatggcagcaagagctcagatgatcagaaaattatctcatatctctgggaaaaaacacagggacctgatggggtgcagctcgagaatgctaacagcagtgttgctactgtgactgggctgcaagtggggacctatgtgttcaccttgactgtcaaagatgagaggaacctgcaaagccagagctctgtgaatgtcattgtc

SEQ ID NO: 14604 - protein, 685 aa, Homo sapiens
MEKRLGVKPNPASWILSGYYWQTSAKWLRSLYLFYTCFCFSVLWLSTDASESRCQQGKTQFGVGLRSGGENHLWLLEGTPSLQSCWAACCQDSACHVFWWLEGMCIQADCSRPQSCRAFRTHSSNSMLVFLKKFQTADDLGFLPEDDVPHLLGLGWNWASWRQSPPRAALRPAVSSSDQQSLIRKLQKRGSPSDVVTPIVTQHSKVNDSNELGGLTTSGSAEVHKAITISSPLTTDLTAELSGGPKNVSVQPEISEGLATTPSTQQVKSSEKTQIAVPQPVAPSYSYATPTPQASFQSTSAPYPVIKELVVSAGESVQITLPKNEVQLNAYVLQEPPKGETYTYDWQLITHPRDYSGEMEGKHSQILKLSKLTPGLYEFKVIVEGQNAHGEGYVNVTVKPEPRKNRPPIAIVSPQFQEISLPTTSTVIDGSQSTDDDKIVQYHWEELKGPLREEKISEDTAILKLSKLVPGNYTFSLTVVDSDGATNSTTANLTVNKAVDYPPVANAGPNQVITLPQNSVTLFGNQSTDDHGITSYEWSLSPSSKGKVVEMQGVRTPTLQLSAMQEGDYTYQLTVTDTIGQQATAQVTVIVQPENNKPPQADAGPDKELTLPVDSTTLDGSKSSDDQKIISYLWEKTQGPDGVQLENANSSVATVTGLQVGTYVFTLTVKDERNLQSQSSVNVIV

SEQ ID NO: 14605 - DNA, 1985 bp, Homo sapiens
  CDS (3)..(1685)
atatgatgcatcctgaacctggaaaattctaccagattaatccagaagagtatgaacatccaaatccctggaaagagagtttccagcagtcgtataaaggtgcacatgtaaagccaggatttgctgaacatttctacagtaaccctgcaagatataaaggaagagaaaatatgttgtattatgatactattgaagatgcccttggtggggtacaagaggctcattttgatggacttatctttgttcattctggaatatatactgatgaatggatatatattgaatctccaatcaccatgattggtgcagcacctgggaaagtggcagacaaagttataattgaaaacactagagattcaaccttcgtttttatggaaggctctgaagatgcttatgttggatatatgacaataaggtttaaccctgatgacaaatctgcacaacaccacaatgcacaccactgcttagagattacagtaaattgtagccctattattgatcactgtatcatccgaagtacatgtacagttggttctgcagtatgtgttagtggtcaaggagcatgtcccaccatcaagcactgtaacatcagtgactgtgaaaatgttggactatatataacagatcatgcacagggaatatatgaggataatgaaatttccaataatgcgttagctgggatttgggttaaaaatcatggaaacccaattattagacggaatcatattcatcatggacgtgatgttggtgtgttcacatttgatcatggcatgggttactttgaaagttgcaatatacacagaaataggatagcaggctttgaagtaaaagcctatgctaaccctacagtggttcgatgtgaaattcaccatgggcagactggaggaatatatgtccatgaaaaaggaagaggacaattcatagagaataaaatctatgcaaacaactttgcaggtgtatggattacctcaaatagtgacccaacaataaggggaaattctatatttaatggaaatcaaggaggagtttacatctttggtgatggacgaggccttattgaaggaaatgacatttatggcaatgcattagcaggaattcaaattaggacaaacagttgtccaattgttcggcataacaaaattcatgatggccagcatggtgggatttatgtgcatgaaaagggacaaggagtaatagaagagaatgaagtttatagtaacactctagctggagtctgggtgacaactggcagcactccagtactgagaagaaaccggatacacagtggcaagcaggttggtgtttatttttatgacaatggacatggagtgctagaagacaatgatatctataatcatatgtattcaggggttcagataaggactggaagcaaccccaaaattagacgcaacaaaatctggggaggacagaatggtggaattctagtttataattctggtctaggctgtatagaagacaatgaaatatttgacaatgcaatggctggagtctggattaagacagatagtaatcctacactaagaagaaataaaatccatgatggaagagatggtggcatctgtatatttaatgggggtcgaggtattgttgttaattttgcattagtgaaaaatccagttttccattattcttccatatctttaatgatcaatgacattgctaactaagttataaatgagtgaatctcaagtctttttccttatcaagttgaactggtttaggagattagtgcctagagttaagagacaaatgtttacaatacttttccttttgtagccactttgagtctgcagttgtcagtaagcctttttaaagatagaatttgtttacattctctggaccttttaaaattcagaatagtaatatgattataataaacttcaaagtcaagttatagaaatagatgtgagaaattgatctgtaaatatctgaaaatgtctttagtaaacgggtattgcttttgt

SEQ ID NO: 14606 - protein, 561 aa, Homo sapiens
MMHPEPGKFYQINPEEYEHPNPWKESFQQSYKGAHVKPGFAEHFYSNPARYKGRENMLYYDTIEDALGGVQEAHFDGLIFVHSGIYTDEWIYIESPITMIGAAPGKVADKVIIENTRDSTFVFMEGSEDAYVGYMTIRFNPDDKSAQHHNAHHCLEITVNCSPIIDHCIIRSTCTVGSAVCVSGQGACPTIKHCNISDCENVGLYITDHAQGIYEDNEISNNALAGIWVKNHGNPIIRRNHIHHGRDVGVFTFDHGMGYFESCNIHRNRIAGFEVKAYANPTVVRCEIHHGQTGGIYVHEKGRGQFIENKIYANNFAGVWITSNSDPTIRGNSIFNGNQGGVYIFGDGRGLIEGNDIYGNALAGIQIRTNSCPIVRHNKIHDGQHGGIYVHEKGQGVIEENEVYSNTLAGVWVTTGSTPVLRRNRIHSGKQVGVYFYDNGHGVLEDNDIYNHMYSGVQIRTGSNPKIRRNKIWGGQNGGILVYNSGLGCIEDNEIFDNAMAGVWIKTDSNPTLRRNKIHDGRDGGICIFNGGRGIVVNFALVKNPVFHYSSISLMINDIAN

SEQ ID NO: 14607 - DNA, 2666 bp, Homo sapiens
  CDS (112)..(1911)
agccagaccggcggccacaagacccctctctctaaaacaccagacccactgctgggctgcaaaaggaagcgcagaggtggtggccatgtgaggccatccacgcccaagaaaatgcaggaggtggtgaaagacggtagccaggatgccgaccacagccaggggagagctgagcccggccatgagaggcgagacctgcccatccagggcaaagccagtgaggccctgggaggggagggcaccgccaggggccctggcgacactcgcatgtcacagggccagggtaagacagacgaggcaaggcgcctagacgagaaagagagctctgaagacaaaagcagctccctggacagtgacgaggacctggacacagccatcaaggacttgttaaggtccaagcgaaagctcaagaagaggtgcagggagcccagggctgcgtgcaggaagaaggtcaggttcagcacagcccagacgcacttcttggagcagctgggcgggctccggagagactggaaagacaggggcccgccagtgctgaagagctgcctctccaagtccaagagagacagtggcgagggtcctgggaagaaaccccccagtgtctttggcagcacggcagagaggatgaggcaggagggtgccgcgagccaggacgcggccctggccttccgggtgaggagacccgcctccgcctctgcctccgaagggaatccattccccagggagtcccagggcccagctcccagccccggctccctgtctgatgacagcagttcagtggacagcaacgacagcatcgaactggagattaggaagtttttggcggaaaaggccaaggagtcagtgagcagttcagaagttcaggcagagggccccaccgctcttgggacagggggcccagccaggccagaggtgctgtgcaggaaggagccggccccaccgcctggcgtgtgcacacgcagccagagggccaggggggtcccacatctggccgaagggcttcgaggcacagagagcgcaggagcacagggcacagctagtctgttcagccagggcgggaaggggctccctgctgctcctgcccgaggggatccggtgccgcccaggagcaccagcggcggtgtctccgccaaggggctctcagtgagcaggagaaatgtttacgttcacaaagaccagagcccacgaggggctgagcctgctgccaaaagtgcttttggtcagctgcccagctgtgccacagcgggcaccgaggcaggaggcgccagaggaacctttcacatgggctgcgggagcccgagcttcctgacccccagcccgggagcggagagggacgctggagcccaggccgaccgcacaccgccctggagcgacttcgcccaccagagtcggctgcccagcccgtgggtgctgcgctccgaaggcagagatgcagtgtggagggggggcgtcgggagcgagagagacaaggggtccgagggccccgcccggggcctgcccagcctgccccttgcgggcttctcgccgctgctgtccacccagctcttccactttggaaagggtgtctcctgggggggcaggcaggctggcctcttcagcccccacctggggctgcctctgcagggcccctccttctcggccttcagggaggcccaggccggacccagccctgtctttggaagcccacacttgctggcaaagaaggacggcggcccctggccaaccaggaaggcacaggcagggctgagtttgcatgacaggaggagctcgggctcggaggaaagcattttagacctgaggtatcgacgaagggtcaacagggatgaccaggagcaggacgccttgggcagtgacgccagtgacttcagcgacacctccacggaggacagtggcggcagctcagtagtgaaggtctaagccctcgagctgtgggttcgcgtcctgggttgcgtgcattcgtggaaagcggcgtagccgtgcgtgtgtgtgatggttccgtggctgcaaggaagggaaacagtctattatacatagccctgtatatatgtacaccaacatgaaacttttatttaacagacgtgtcctggtaaatatgatttttgtagctttttgtaaattatttaaagtgatgtaaaagatatttttggaaaatactgttgttcaattttgtagggtgttcctaactgcagttttctgtgttctgcatacaagtcttagcttaggaaacatttggttcttaccatcacagccaggttcacagaggctctgatgctttttggttgattgctggtgagaatggccggcggtggctgcagtggtagcctgaggaaggccaagctgccctccctgggaatcactcagatgccccaagatgtccgttgggaagctcccaggacagcactttttatacagaggacaccgcctcggccccacgtccttagaggccagagcacatctgaaaactgcaatcacagccgtccgctggaaaaacgtttcgaagcacagtggccagcgagcgagcacgtggctactccctgttgcatgtcaaatccacacagatgtcagcggcagctgctcggcagcccagccctgggcctgggtgggttcatgtccaatcttgttcgatcactagatgattctaacatcgaaataaacctctttttatatgg

SEQ ID NO: 14608 - protein, 600 aa, Homo sapiens
MQEVVKDGSQDADHSQGRAEPGHERRDLPIQGKASEALGGEGTARGPGDTRMSQGQGKTDEARRLDEKESSEDKSSSLDSDEDLDTAIKDLLRSKRKLKKRCREPRAACRKKVRFSTAQTHFLEQLGGLRRDWKDRGPPVLKSCLSKSKRDSGEGPGKKPPSVFGSTAERMRQEGAASQDAALAFRVRRPASASASEGNPFPRESQGPAPSPGSLSDDSSSVDSNDSIELEIRKFLAEKAKESVSSSEVQAEGPTALGTGGPARPEVLCRKEPAPPPGVCTRSQRARGVPHLAEGLRGTESAGAQGTASLFSQGGKGLPAAPARGDPVPPRSTSGGVSAKGLSVSRRNVYVHKDQSPRGAEPAAKSAFGQLPSCATAGTEAGGARGTFHMGCGSPSFLTPSPGAERDAGAQADRTPPWSDFAHQSRLPSPWVLRSEGRDAVWRGGVGSERDKGSEGPARGLPSLPLAGFSPLLSTQLFHFGKGVSWGGRQAGLFSPHLGLPLQGPSFSAFREAQAGPSPVFGSPHLLAKKDGGPWPTRKAQAGLSLHDRRSSGSEESILDLRYRRRVNRDDQEQDALGSDASDFSDTSTEDSGGSSVVKV

SEQ ID NO: 14609 - DNA, 2497 bp, Homo sapiens
attatgctggtctccatggcggggcctcggagccaagacgaggttgagtagactcgttttgaattttctcccctctgctccggcggacttcccatgtcgccttgtggggctatcggcggcggcaggactgggggagtcagaggtctggcagcgctgtctgcgcagacctaccggacgctacctcccaacccccctgtcttcctcctgcctcctcctcctcccgtcacctcctgacccgccggagctccgagcaactgccggcctccgcctccagccgcagccggtcactggcggcgccttccgcgccaagcttgggggccttttcggggtcccacatggcacggcttccgacccccggcccgggacggggctcgcaggccccagaggggcaggctggagaaggaggaggttaggtgtcttcaggagggttgctgagcccaaggacgcgccatcgccgcggagaaggagccggaccccttgggcggagcgcccaatgtgtggtccctcacgccgtcccgcaccttgctttttagggttctttttccgctttctgagcccttttataccttacgtttagaaggggaaaatcatcctcccacaccttctccccgactttttgccttttttgtcttgaagttacccaaaggcctgtgtattgttctcaatggtcccaagaattactctaatatagttgtttttctgagggaggatggatggagataactatcctgatcccaatgtcactttttaaggcattcgcttcaagagacaagcagtttagaatcaggcagaactggattgcaaaatttatgggcagaccggtatgtgtgcaggtgaagacaaagctttccttttttacgttgtttaaagatgtcctactgtaaggtagacgcctaatgtttaaatgaacgcctaatatttaaatagagaatgagaagagatttaaacaattggaagaaaaaataatttttattagagagcaatgacaataaaagtaggactcttttcagtttactcacctttgtagctccgaatccgggccctggaaccagaattcctgggttcaaatcctgcctctgctacttgattaacctttttgtgccacacttttatcaactataagaattaactgcggcatcggaagcactcagtatatgttaattattatcatcaaatagttactaattccagtttaactagaagctttgccagcgtgaatagataagggagaatagccacattgagtggaggaataaaattagaaaacctctgtgctgaagtcccaggagatcacttattaggcttgagcttgctaatggaagtggtgatcgtttaaccatgtggttattgtagtggtgaggatttacacattaaataagtcttgggcatctgaagcttgaaacactttcttaatgaaatcttgccgttgaatctgtacttactggtaatatgtcattggttaaaatatatttataaaatgtataattgaccagcaggttaatacatttttatcattaatttaaatttatcaaaatgagaatatacagtacctgacagtagagtttgatcttaatttgatttgaaaattatgatcaggaaaataacctgaatatatgcttaataatataagactttcagtttgcaaaacagaaatcctgacttgactaaaatacacttttcatttgacggagacctttagttaaggaaagattagttttagcattcaacataactaaatacccagcattatgttttacggtttttttcaacaatgatttatgtgtcgtgtttggtgttgcctccaaacagtacctaggatagctgatgcttttactttgagtctttttctttagttggaacattaattgcaagcttttggttggtaatcattttttatgggatgtatttactatatggtcctcatggagacacattgttatctggagaaccacagtttggaaaatacatttctctttattataaagttttttgttttatatatataatgccacagtgtgataggatacaaagactaagcattagggctttggagtcttaattgttctttgtgtttttctttttttccaatttgattatggatccaagcctaatgcactctgtgatcttaagcaagtttcttgacagttccagttttcttatctacaaacagagacaagaagatctacctcagagtcattgtaaggattaaataaatttgtaaagctctcaaagagcagcctaatcccagcattttgggtggctgaggcgggtggagcacctgaggtcaggagtttgagaccagcctggccaacatggtgaaaccccgtctctgctaaaaatacaaaaattggccaggcatggtggggggtgcctataatccgagctactggggaggctgaggcaggagaattgcttgaacctggaaggtggagtttgcagtgagccaagatcacgccacttcactccagcctgggcaaaaagagtgaaactccatctc

SEQ ID NO: 14610 - DNA, 2403 bp, Homo sapiens
taatagaatttaaaacatttcacaaaagtcaacacataaataatatcaaccaaaataaagtggtagacagaagagaaaatatactaatttattgttcaaagaggaaaataagtctcaaaggttaaggctattatataaatttatttttaaaaagacataaacctacattttcagaagaagaagttccatgtttccttagattatgtatttagcatccattaatcacagggccaaactaacaacaaaagttgtttagctttcccttacaatccagcttttatgggtgtgcaaacatcacattacagtccctccaaccacaaaccccaacatatagtatttcacttcctgcccaatagtgggtgtccccacacctttcaaccactgtagcaacaaagctctggcctaggcttttcacttgcttctttactgcctgactgactttggtgtttcctcatgtggcctggtgtggcatggcacgccctcttgggagatgaaagtaatcttccataggcaattgtttctgtgtcaccattgctgattaaaacaaatcctaagtacaaatgtcagaacagaaacatgcaaagcaagaaaacattacatcatgaaagtttctttttttttcttttttctttttttttttttttgagacagagttttgctctttttgctcaggctggagtacagtggcgcgatcttggttcaccgcaacctccgcctcctgggttcaagcgtttctcctgcctcagcctcccaagtagctgggattataggcatgtgccaccatggctaattttgtatttttagtagagacggggtttctccatgttggtgaggctggtttttaactcccgaactcaggtgattgcctgcctcggtctcccaaaaagtgccgggattacaggcgtgagccattgtgcccagccaaaagtttctttttcaagagatggtggtcttgccatgttgtccagtatggacttgaactactcagctcaagcagtcctcccacctcagcctcctgaatagctgagactacaggcatgcaccactacacctggctgcgagatgaaattttaagagatgggggtcttgttctgtcgcccaggctggagtgcagtgacatgatcaagccgtgatctcctgggctcaagcaatcctcctacctcagcctcctgagtagctggaactacaggaatgcaacaccatgcccagctaattttgatttttagtagagatgcggtcttcctttgttgcccaagctggtctcaaactccagggcttcctgagtagctgagactacaggtgtgagccaccatgcccagcctcctctcttttccaatattgtgttaagtaaattgtattggtggtaatcaacttgatcatttcatttttaggatagagatatcaaggtgagggtataactgaacgagaagaggaataaacaccaccctgtgattgatggatctttatagctctcctttgataaagaagggaaatatcgtacttacattagcatgttatagttgctgttgttatacagaagaatattaaacaatattcatatattgtttatgaatgcattgaattcataaacaatggtatggatattgactagccaaagaggtggataaatgtagatacaatgatacggtgatttggtattcagtgtccattctgctctcctagtgtgccttcctataatgcaggggctggaaggtgagaaaataaccacatttcccagactccctttgcaggtagatttccagatgtgaattgggttccactgatcagacacccatgtgtgagatttggaatgcagaactgaggagagagccatcttcctcttgcttgtgttctggtggcatgtgtggttgaggagacatttaatttccctgcagcagaattcttgcagtcagttgttgaggcaagtggcgtggtggatgcaaccctgattcttcacctttctcattattgtggggtagcagcgcctctggcaagccagacagacctgcagtgtttttctgggagttaattctggagacccagtatggaacccactcctagcccttgtgacaatattgcaagcatccagttccctgttttacagtccttttaaatgtggctagctacagtagtttgtgtttcctgcaactaatcactcatacatctgtatctaaagcactccacctgggtcatgtactatacttaaaattataaggcaatattaattcacaaaactacctactcgttttatttaaccctcagaagaactgaaaacaaaagctataccaggcttgctctagagcgtgggcttgggaatggaaaggcagagtgcacctattgaattccatcatcagtttttctataccatggagttacttaccatgtgtatacataacactgatt

SEQ ID NO: 14611 - DNA, 2280 bp, Homo sapiens
  CDS (191)..(949)
agacacatcgaaaggaatcgcagatgtccccgagtggttcaaaggcagtcggctcaactatgcagaaaacctcctgcggcacaaagagaatgacagagttgccctttacattgcaagggaaggcaaagaggaaattgtgaaggtgacttttgaagagctgaggcaagaagtggctttgtttgcagcagcaatgaggaaaatgggtgtgaagaaaggagatcgggttgttggttatttacccaacagtgagcacgctgtcgaggcgatgctggctgcggcaagcattggtgccatctggagctccacgtccccggacttcggtgagaatggtgtgctggaccggttttctcaaattcagccaaagctcatcttctctgtggaggctgttgtctataatggcaaagagcacaaccacatggaaaagctgcagcaggtggttagaggcctaccagacttgaagaaagtggtggtgattccttatgtgtcctccagagagaacatagacctttcaaagattccaaacagtgtgtttctggatgactttcttgccaccggcaccagtgagcaggccccgcagctggagttcgagcagctgcccttcagccacccactgttcatcatgttctcatcgggcaccacgggcgcacccaagtgcatggtgcattccgctgggggcaccctcatccagcatctgaaggagcacctgctgcacggcaacatgaccagcagtgacatcctcctgtgctacaccacggtcggctggatgatgtggaactggatggtgtcccttctggccacaggagcggccatggtcttgtacgatggctcccccctggtgcccacgcccaatgtgctctgggacctggttgacaggatagggtatctgggctcatggcgactactgcagaatcaaccccaagaccgggggcatcgtcatgcttggccggagtgacggcaccctcaaccccaacggggtgcggttcggcagctcggaaatctataacattgtggaatccttcgaggaggtggaggacagcctgtgtgtcccccagtataacaagtacagggaggagagggtgatcctcttcctgaagatggcctccgggcacgccttccagcctgacttggttaagaggatccgtgacgccatccgcatgggcttgtctgcgcgacacgtgcccagcctcatcctggaaaccaagggcatcccgtatacgctcaacggcaagaaagtggaagttgccgtcaaacagatcatcgctggaaaagccgtggagcaaggaggtgctttctcgaaccccgagaccctggatctgtaccgggacatccctgagctgcagggcttctgagtcagactggctggcgtgtcactcagccgcacccgtgtgcactgtaacttttgtgtgctcaagaaattatacagaaacctacagctgttgtaaaaggatgctcgcaccaagtgttctgtaggcttggggagggatcgtttctctgttttgttaaatctggtgggtacctggatcttccacacgagtgggattctggccttcagagaccaggagggagtgtctgggccgcaggtgtggcactgtggtgagagtgtgtgtctttgcacacacagtgcagcgggaacggtggggctggctggtgctgaagacagacacactcctgagccaaggtcttgtcttcaacctccccgtcccgttgtcccattttgctctgtgaaggtgcaaatccctttcttcccttcccatctcaggctctcctgttttccctcagggtccagtatgcctttgagctttagctgttagaaaggaatgagtggatttcatacaggatctctttattgcacagactgaatggctttacatgtttctaatgtgaattaggcatgtgaagcagtgggtgtccacccgtgtccctcatgggtgagccctccagctgtgagcccaggcagtgtggtcaccgagtgaggaccctcctcaccaggaaccgcatccctgtgctgcctccacctgagagttgctagggggttcttgtcgagatcatgtcatcagcacccctaagtcaagtcacgggtttccatagccaggcagttggtatgtacaattcagttcagcgtatgaacttgtatctctaatctgatgtccatttttatattttttgaaactgagcacaatgaaatcctttcttgaatcattttccttttggattataaaaatatgggggaaagtgctatgatgaattttatgcaataaatgtatacatgtgtgcacatgc

SEQ ID NO: 14612 - protein, 253 aa, Homo sapiens [sequence omitted]

SEQ ID NO: 14613 - DNA, 2315 bp, Homo sapiens
  CDS (463)..(957)
attgaggaacatggcgttgctggtgcgagtccttacggagttttgctcttgttgcgcaagctggagtgcaatggcgtgatcttggctcactgcaacctctgcctcccgggttcaagcgattctcctgcctcagcctcctgagtagctgggattacagaggaaccagactagcatttctcagtgggttccagtatgcagccgattgatacctgtgtctcctacccaaggacagggggacagggctctgtctcgcacttcccagtggccccagatgagccagtcccaagcatgtggtggatcagaacagattcctggaatagacatacagctgaataggaagtatcacaccacacgtaagctttctactaccaaagattccccacagcctgttgaggagaaggttggtgctttcacaaagataatagaagccatgggattcacgggacctttgaaatacagtaaatggggtgtcagatgcctgatacattcaattcatggtttcttataaccctactccacgtctggatgtgtctagtccgaatgaagcaggaaggccggagtgggaagtacatgtgtcgtatcatagttcattttatgtgggaggatgttcagcagcgcggcagagtcatgggggttaatccctatatcctgaagaagaacatgatcctcatgacaaatcatttctatgcagcgatcttgggatatgatgaggggatcctttcagatgatcatgggctggccgctgccctctggagaaccttcttcaaccggaaatgtgaagaccctcgacatcttgaattgctggtagagtatgtgaggaaacagatacagtacctggactccatgaacggggaggatctgcttctgacaggggaggtgagctggcgccctctagtggagaagaatcctcagagcatcctgaagccccattctccgacttacaacgacgagggactttgatgggctgggccctccgcacggcccgccagctggcttcgaggaacctccaggagagaagtgcctgttggtccaggaccctgcagaaagtggcctgaactgacctctgaacagcatctgtcaaatacctggccccatttgtgttgagtttcctcttagtgtgcccaggagtctgatctgctggggtacagggctgggagaacccctagctctcccggggtgtcctctcccttaggggaagccccgagtgagagtcccccagcacacactccccaaccccctccagcaactacatgtgactgatagcttttcccaaaggccaaggaagggatggtgtaggttcaaaagggaaaccccccagggcctgctgtggcctaggagcagattgtaatgctgccgagtccggtcggtgaccacgcgttgtccctcggctttcagccatggggttgagttggccattaaaagaaacagagacttctctctgccatggcccttctttattccagggacttagaaacttgcctgagatggtggacgcagtaatgagggcaccgcgcagctcagttagagacggagaaagggaagaggctgggatggtctctgctgctcttgcctctagttcatggagatgtgtctctgttcaggccaagatacagccagccaggcctgtcgtctgggacccaggaggcctctgatgaccaagggctttcacatcctaagtcatttggaaggaggccttgagaacaaagtcacctttgtcactcccagtgaactgaatgaggaacatgctgtctcctgtcttggcctcccctttcatgagatactggggagaagagaacattcctcctggcttagttgtagcagacccagacctgtgcccagctttggtcccccttcccaacttctgaagcacgtgctgcagagccaccttggtctgagcacctgaggaccagcccctcctccctcagtgcgggtcatctcttgggggattttcttaaagtgaagaaagggggtggggaaccatattgcccctccctcccccatcaaacttccttcatttaacttgctataaaatgagtcatataaagaaactctatatgggtgaggtatatcccacttctgtgaaaacattacaaatcaaaccgcttctctcagtttatttaagatgcttttgttgcgagcggagctctagagtgaagcctcctgtgtgtgtgtgagataataacaccttgtaactcattacagctgggcactatttacataaaccagagctgagccaggcaggaatttgctgattaatttatttttaatggagtgaagtataccatgcaccaaaataaactttactgtgtgtacct

SEQ ID NO: 14614 - protein, 165 aa, Homo sapiens
MGCQMPDTFNSWFLITLLHVWMCLVRMKQEGRSGKYMCRIIVHFMWEDVQQRGRVMGVNPYILKKNMILMTNHFYAAILGYDEGILSDDHGLAAALWRTFFNRKCEDPRHLELLVEYVRKQIQYLDSMNGEDLLLTGEVSWRPLVEKNPQSILKPHSPTYNDEGL

SEQ ID NO: 14615 - DNA, 2600 bp, Homo sapiens
  CDS (3)..(1703)
acatgcgccctgacagcccaacaatggcggcgcccgcggagtcgctgaggaggcggaagactgggtactcggatccggagcctgagtcgccgcccgcgccggggcgtggccccgcaggctctccggcccatcttcacacgggcaccttctggctgacccggatcgtgctcctgaaggccctagccttcgtgtacttcgtggcattcctggtggctttccatcagaacaagcagctcatcggtgacagggggctgcttccctgcagagtgttcctgaaggacttccagcagtacttccaggacaggacaagctgggaagtcttcagctacatgcccaccatcctctggctgatggactggtcagacatgaactccaacctggacttgctggctcttctcggactgggcatctcgtctttcgtactgatcacgggttgcgccaacatgcttctcatggctgccctgtggggcctctacatgtccctggttaatgtgggccatgtctggtactctttcggatgggagtcccagcttctggagacgggattcctggggatcttcctgtgccctctgtggacgctgtcaaggctgccccagcatacccccacatcccggattgtcctgtggggcttccggtggctgatcttcaggatcatgcttggagcaggcctgatcaagatccggggggaccggtgctggcgagacctcacctgcatggacttccactatgagacccagccgatgcccaatcctgtggcatactacctgcaccactcaccctggtggttccatcgcttcgagacgctcagcaaccacttcatcgagctcctggtgcccttcttcctcttcctcggccggcgggcgtgcatcatccacggggtgctgcagatcctgttccaggccgtcctcatcgtcagcgggaacctcagcttcctgaactggctgactatggtgcccagcctggcctgctttgatgacgccaccctgggattcttgttcccctctgggccaggcagcctgaaggaccgagttctgcagatgcagagggacatccgaggggcccggcccgagcccagattcggctccgtggtgcggcgtgcagccaacgtctcgctgggcgtcctgctggcctggctcagcgtgcccgtggtcctcaacttgctgagctccaggcaggtcatgaacacccacttcaactctcttcacatcgtcaacacttacggggccttcggaagcatcaccaaggagcgggcggaggtgatcctgcagggcacagccagctccaacgccagcgcccccgatgccatgtgggaggactacgagttcaagtgcaagccaggtgaccccagcagacggccctgcctcatctccccgtaccactaccgcctggactggctgatgtggttcgcggccttccagacctacgagcacaacgactggatcatccacctggctggcaagctcctggccagcgacgccgaggccttgtccctgctggcacacaaccccttcgcgggcaggcccccgcccaggtgggtccgaggagagcactacaggtacaagttcagccgtcctgggggcaggcacgccgccgagggcaagtggtgggtgcggaagaggatcggagcctacttccctccgctcagcctggaggagctgaggccctacttcagggaccgtgggtggcctctgcccgggcccctctagacgtgcaccagaaataaaggcgaagacccagcccctcggcggctcagcaacgtttgcccttccctgcgcccagcccaagctgggcatcgccaagagagacgtggagaggagagcggtgggacccagcccccagcacgggggtccagggtggggtctgttgtcacatactgtggcggctcccaggccctgcccacctggggccccacatccaggccaacccttgtcccaggcgccaggggctctgatctcccatccatcccaccctcctcccagaggcccagcctggggctgtgccgcccacaggagttgagacaatggcaatcctgacaccttcctccactacagccctgaccatagacccagccaggtagctcttggggtctctagcgtcccagggcctggtttctgttccctcttcaatggtgtgttcccagccaggtcctgaccctcagagccaagtccctgtcacgtctggggcagccaaaccctcgccccacagggacctggacacgcccggccaggatgtggggttggatgggccattttctgtcctatccctcatctccacccccgccacagcctacacgcatcccacacatgcaggcacacacagcctgtgcacacatgtgttcttggcccggtttcatccccccatgactggtgtctgtgaggtgcagatggacacagcgcacacccagaccctccaccaggctgtgacctcgctgcctctgaggccttgacaaggcccctcaatcggaggacagccggccgtgcacactttcatcatcgtcggacaaacagcgtctactgcacatttttcttattcctattcttgagccatagctatggcatattcttctactattcctattataccacttaccagcttactcg

SEQ ID NO: 14616 - protein, 567 aa, Homo sapiens
MRPDSPTMAAPAESLRRRKTGYSDPEPESPPAPGRGPAGSPAHLHTGTFWLTRIVLLKALAFVYFVAFLVAFHQNKQLIGDRGLLPCRVFLKDFQQYFQDRTSWEVFSYMPTILWLMDWSDMNSNLDLLALLGLGISSFVLITGCANMLLMAALWGLYMSLVNVGHVWYSFGWESQLLETGFLGIFLCPLWTLSRLPQHTPTSRIVLWGFRWLIFRIMLGAGLIKIRGDRCWRDLTCMDFHYETQPMPNPVAYYLHHSPWWFHRFETLSNHFIELLVPFFLFLGRRACIIHGVLQILFQAVLIVSGNLSFLNWLTMVPSLACFDDATLGFLFPSGPGSLKDRVLQMQRDIRGARPEPRFGSVVRRAANVSLGVLLAWLSVPVVLNLLSSRQVMNTHFNSLHIVNTYGAFGSITKERAEVILQGTASSNASAPDAMWEDYEFKCKPGDPSRRPCLISPYHYRLDWLMWFAAFQTYEHNDWIIHLAGKLLASDAEALSLLAHNPFAGRPPPRWVRGEHYRYKFSRPGGRHAAEGKWWVRKRIGAYFPPLSLEELRPYFRDRGWPLPGPL

SEQ ID NO: 14617 - DNA, 2403 bp, Homo sapiens
  CDS (55)..(2376)
ttgttgtttgttgaagcatttcctattagggatccaaaccttcatgctattggaatggatagtgaaatccagaaacagtttgaagagctctatagccttttagaagatccttacccgatggtccgttccacagggatccttggtgtttgtaaaataacttctaagtactgggaaatgatgcccccgaccattcttattgacctcctgaagaaggtgactggggaactggcatttgacacgagctcagctgatgttcgttgttctgtctttaagtgtctgccaatgattttggacaacaaactgagccacccattgttagagcagctccttccagctctcagatacagtctccacgacaattcggagaaagtgagggtagcttttgtggacatgctgttgaagatcaaagctgtgagggctgctaagttttggaaaatatgtcccatggagcacattctggttcgtctggaaactgattctcgacctgtgtctcggcgcctggtgagcctcatctttaattctttcctgcctgtgaatcagccggaggaggtctggtgcgagcgctgtgtcaccctggtgcagatgaaccacgccgctgccaggaggttctatcagtacgcccacgaacacaccgcctgcaccaacatagcaaagctgattcacgttattcgtcattgcttaaatgcctgtatccagagggcagtgagagagcctccagaggacgaggaggaagaggacggaagggagaaggagaatgtgactgttctggacaaaacactgtcagtaaacgatgttgcatgcatggcaggtttactagaaatcattgtgattctctggaaaagtattgacagaagtatggaaaataataaagaggccaaactttacacgattaacaagtttgcctctgtgcttccagagtatctgaaagtatttaaggatgatcgctgcaagatccctttattcatgctaatgtcctttatgccggcctctgctgtccccccattcagctgtggtgtgatttccacgctgagaagccgggaggagggcgctgtggacaagagctactgcactttgttggattgcctctgctcctgggggcaggtggggcacattctggagcttgttgacaactggctgcccacagagcatgcccaggccaagagcaacacagcttctaaaggtagggtgcagatccatgacacacgcccagtcaaacctgaattggcattggtctacattgagtatctgctgactcatccaaagaaccgcgagtgcttgctctctgctcctcggaagaaacttaaccatcttttgaaagcccttgaaacgtcaaaggcagatctggagtcacttctgcagacaccgggtgggaagcctcgtggcttcagtgaagcagctgccccgcgagcctttggtctccactgtcgcctgagcatccatcttcagcacaagttctgctcagaaggaaaggtgtatttgtccatgttggaagacactggcttttggttagaaagcaaaattttatcttttattcaagatcaagaagaagactacctgaagcttcatagggtcatttatcagcaaattatccagacctacctgactgtgtgtaaagatgttgttatggtaggccttggtgaccatcagtttcagatgcaactcttacagcggagtcttggaatcatgcaaacagtgaagggatttttttatgtttcattacttcttgacattctgaaagagataactggaagttccttgattcagaaaacagattcagatgaagaagttgcaatgctgttggacacagtccagaaagtatttcagaaaatgttggaatgtattgcacggagcttcaggaagcagccggaagaaggcctgcggctgctttattctgttcagaggcctcttcatgagttcattactgctgttcagtctcggcacacagacacccctgtgcaccggggtgtactttctactctgatcgctgggcctgtggttgagataagtcaccagctacggaaggtttctgacgtagaagagcttacccctccagagcatctttctgatcttccaccattttcaaggtgtttaataggaataataataaagtcttcgaatgtggtcaggtcatttttggatgaattaaaggcatgtgtggcttctaatgatattgaaggcattgtgtgcctcacggctgctgtgcatattatcctggttattaatgcaggtaaacataaaagctcaaaagtgagggaggttgcagccactgttcacagaaaactaaagacattcatggaaattactttggaagaggatagcattgaaagatttctctatgaatcatcatcaagaactctgggagaacttttgaattcataaccaagccaacatctccagacatgt

SEQ ID NO: 14618 - protein, 774 aa, Homo sapiens
MDSEIQKQFEELYSLLEDPYPMVRSTGILGVCKITSKYWEMMPPTILIDLLKKVTGELAFDTSSADVRCSVFKCLPMILDNKLSHPLLEQLLPALRYSLHDNSEKVRVAFVDMLLKIKAVRAAKFWKICPMEHILVRLETDSRPVSRRLVSLIFNSFLPVNQPEEVWCERCVTLVQMNHAAARRFYQYAHEHTACTNIAKLIHVIRHCLNACIQRAVREPPEDEEEEDGREKENVTVLDKTLSVNDVACMAGLLEIIVILWKSIDRSMENNKEAKLYTINKFASVLPEYLKVFKDDRCKIPLFMLMSFMPASAVPPFSCGVISTLRSREEGAVDKSYCTLLDCLCSWGQVGHILELVDNWLPTEHAQAKSNTASKGRVQIHDTRPVKPELALVYIEYLLTHPKNRECLLSAPRKKLNHLLKALETSKADLESLLQTPGGKPRGFSEAAAPRAFGLHCRLSIHLQHKFCSEGKVYLSMLEDTGFWLESKILSFIQDQEEDYLKLHRVIYQQIIQTYLTVCKDVVMVGLGDHQFQMQLLQRSLGIMQTVKGFFYVSLLLDILKEITGSSLIQKTDSDEEVAMLLDTVQKVFQKMLECIARSFRKQPEEGLRLLYSVQRPLHEFITAVQSRHTDTPVHRGVLSTLIAGPVVEISHQLRKVSDVEELTPPEHLSDLPPFSRCLIGIIIKSSNVVRSFLDELKACVASNDIEGIVCLTAAVHIILVINAGKHKSSKVREVAATVHRKLKTFMEITLEEDSIERFLYESSSRTLGELLNS

SEQ ID NO: 14619 - DNA, 2136 bp, Homo sapiens
ttgttatgtctgccagatggtcagtattctgacagtgtgggacaaaggaaaaacggcagcctgggcaaccccgcctctataagaactaaaaaattagccaggcatggcggtgcatgcccctgtagtcctagcttctcaggaggctgaggcaggaggctctcttgagcccgggaggacaaggctgcagtgagccatgaccatgccactgcactcagcctgggcaacagagtgagaccctgtctcaagaaagaaaaacgagaaagggagagtccctccactgtaaggagatcgggttcattacattttggggtgttggagaaaaatactgagtcagcacctgtgtgggattggtgggagcagatttggtgttttccaccccttcacaggattctgaggtaactcatttctgttggccttggccttgtatggggaggatttccctccagccttgtatggggaggatttcccttgtatggggaggattttccctccagcttgtgggaaaggaatcaaggaccagagacaggcaggggagaagatcactgagggatttacggcagcagcctctgcacggcttccccacgacctccccagctgcttgctggacgctgctggagaaacagcacatcccaagatcatcatggccccagcatcctcttgaacttagtaacagttggcctgacagatgaagcggatatcatccctgccttagaagttctctagcccctttcttagagataagctgctatttcattcctaaaagaagtcatggctgttcaggtgagaagaacggtttagtcagcatctatgcaacactgtagagatgcttagtgagaggtgttgcaggagagtggcagaccgcagggcccgaggtaaggtttcttgtccatctctggaattttggctttttgcaccctgtaaagtcacgtcccctttttttctggtgctttggtggtgacgtagggagaggtgaggatgagaagaggagccatgtcctatggattcccagatccagactcctcttccctgggaaagctggattggagctggcccctccttctgtgccttcgggctgtggaggaggaggcccctgcagggagctgcctggggcgagcgctgggggcttttcctgcagtgcattagcagcatgtcataatggaaagtggctggatttctttccagttgtaatcaatggttaagatttaacctagcaacattgtaggggtacacagccaaatgattcaggaaaaaagatgcaggttgagtctggaggaatccctgtgccagcttcctcatgctccctccctctctcagaaatcacatggaacccattctcccctcagcagtgaaaatgcattcagcctgtgtgcagtgtttctgcccagggaagcccagtagggcctccatgcccggggtgtttactgggatctggttatgtagacaccacctgcctagcacgcaccaaaattccagactttcaggaaaacaggtgcctgtgccacattatttgcacggagagactgtgtccagtgaacggttctgatcagtaaactgttgactaggaacatcccgagagccaagttcccagatgccagccaagggccatctgacctgttttgaatctcaatttcctgatacagaaaacaaaggattgtcagctgacctctgtcctgtgtgcccagtggccccaggtgacgtgtcttcaagaagaggctgagctgcggtgcttgtaaggtctcagccttagatccaaggacagtccaaggaagtcctaagaccatggagttggtgatctgggatctgggtttgctgatatttctcaccgtgaatctcttggtggtgtttgtgggcacgagaggggcagagaatggagagtgaggctaccacatgaagcgtcaccagagctgctccctgctgcctgctcagagcaccccggatccactgttcaatctgcacaagattcggggtccagacatgggagacttcagctgcctcagaggaccgtggacagggaaggccagcctcgcatccctctgtccatgcctggaatgactttaataaccaagagttttatttttgaatttgtagctgtcgttcactttttacccacccattcaataaaccttacagaattgc

SEQ ID NO: 14620 - DNA, 2316 bp, Homo sapiens
  CDS (322)..(2010)
tcaaaataaaattcctgaatttgtacaagccacaggaagctagattgagatcattatatgacaactggaaggccaaggctatgggttacctcaaattgaggaattttggcacctactcacaggctccatgagcagatgaagtagacagctttactcagtatctcagaccaagaacttcatctccatctccaactagctgaaacatcttccctcctcaacctggaaaattctctgacttagaaatttaaacaaaaccctcccctttcattgaatctccattgtctggagtttgcttgttttaatctagcctgttcctccactatgggctccctttcaaactatgccctgcttcaactaacccttactgcttttttgacaattctagtacaacctcagcacctgcttgctccagttttccggacactatctatcttgactaatcagtctaattgctggttatgtgaacatctagataatgcagaacaacccgaactagtttttgttcctgccagtgcaagcacctggtggacctattctggacaatggatgtatgaaagggtgtggtatccacaagcagaagtacagaatcactctacttcctcctatcgtaaagtgacttggcactgggaagcctccatggaagctcaaggtctatcctttgctcaagtaaggttattggagggaaatttttctctttgcgtagaaaataaaaatggcagtggacccttcctaggtaatatacctaaacaatactgtaatcaaatactatggtttgattctacagatggcaccttcatgccctctatagatgttacaaatgaatccaggaacgatgatgatgatacaagtgtttgcctaggcactagacaatgttcctggtttgcaggttgcacaaaccggacctggaacagctcagctgttcccttgattggtctgcccaatacccaagactacaaatgggtagatcgaaattctggattgacctggtcaggtaatgacacctgtctctatagctgccaaaaccaaaccaaaggccttctgtaccagctatttcgcaacctattttgctcttatggcctgacagaggcacatgggaaatggagatgtgcagatgccagcataactaatgacaaaggtcatgatggacaccggacccccacctggtggctcacaggttccaatctgaccttgtctgtgaacaactctggcctcttttttttgtgcggcaatggggtgtacaaagggtttccacctaaatggtctgggcgatgtggacttgggtatcttgtaccttccctcaccagatacctcaccttaaatgctagccaaattacaaacctgagatccttcattcataaagtaacaccgcatagatgcacccaaggagacacagacaatccacctctgtattgcaaccccaaggacaattcaacaataagggccctttttccaagtttgggaacttatgatttagaaaaggcaattctaaacatttccaaagcaatggaacaggaattcagtgccactaagcagaccttggaagcacaccaatcaaaagttagcagtttagcctctgcatcccgaaaggatcatgtcttggatataccgaccacccaacgacaaacggcttgtggaactgttggcaaacagtgttgcctctatataaattattcggaagaaataaagtctaatatacagcgtctccacgaagcatccgagaacctgaagaatgtaccgttacttgattggcaaggcatatttgcaaaagtgggagactggttcagatcatggggctatgtgcttttaattgttcttttctgcttattcatctttgttttaatctatgttcgtgtctttcgcaaatctcgcagatcccttaactcccaacctctgaacctagccttatctccacagcaatcagcacagctccttgtcagtgaaacttcatgtcaagtttcaaatagggcaatgaagggactaacaacccatcaatatgatacaagtctactttgagaatatctgaacaaacagcagctgcagacaaaaagccttagctaaactttgatgagtaaagcaggtcttaccgagaattcagctgccaaaaccctcctctgagtgttcctcttataagggcacttagcactaggacctcccaaggtattgtaaataagccttatcagaactttttgtagtttcattctgaagccttaagacacacaccataaagctgatctgtaaacccttaccccttgctgttcagagagctactctttgtagtgttcttgcatgcatatataataaatgttttttctattg

SEQ ID NO: 14621 - protein, 563 aa, Homo sapiens
MGSLSNYALLQLTLTAFLTILVQPQHLLAPVFRTLSILTNQSNCWLCEHLDNAEQPELVFVPASASTWWTYSGQWMYERVWYPQAEVQNHSTSSYRKVTWHWEASMEAQGLSFAQVRLLEGNFSLCVENKNGSGPFLGNIPKQYCNQILWFDSTDGTFMPSIDVTNESRNDDDDTSVCLGTRQCSWFAGCTNRTWNSSAVPLIGLPNTQDYKWVDRNSGLTWSGNDTCLYSCQNQTKGLLYQLFRNLFCSYGLTEAHGKWRCADASITNDKGHDGHRTPTWWLTGSNLTLSVNNSGLFFLCGNGVYKGFPPKWSGRCGLGYLVPSLTRYLTLNASQITNLRSFIHKVTPHRCTQGDTDNPPLYCNPKDNSTIRALFPSLGTYDLEKAILNISKAMEQEFSATKQTLEAHQSKVSSLASASRKDHVLDIPTTQRQTACGTVGKQCCLYINYSEEIKSNIQRLHEASENLKNVPLLDWQGIFAKVGDWFRSWGYVLLIVLFCLFIFVLIYVRVFRKSRRSLNSQPLNLALSPQQSAQLLVSETSCQVSNRAMKGLTTHQYDTSLL

SEQ ID NO: 14622 - DNA, 1853 bp, Homo sapiens
  CDS (73)..(1425)
tggtgatttgcatctcgtgacccgtattgtggctggttaagccagggatcctgtggtagagtgaccccagggatgcttgctgaaggatatgaacaagacacagaattcggcaacacagctcatctaggggactgccatggtgtacgatgggaagtccagtctggagagtccaaccagatggtccacatgaatgtcctcatcacctgtgtctttgctgcttttgttttgggggcattcattgcaggtgtggcagtatactgctatcgagacatgtttgttcggaaaaacagaaagatccataaagatgcagagtccgcccagtcatgcacagactccagtggaagttttgccaaactgaatggtctctttgacagccctgtcaaggaataccaacagaatattgattctcctaaactgtatagtaacctgctaaccagtcggaaagagctaccacccaatggagatactaaatccatggtaatggaccatcgagggcaacctccagagttggctgctcttcccactcctgagtctacacccgtgcttcaccagaagaccctgcaggccatgaagagccactcagaaaaggcccatggccatggagcttcaaggaaagaaacccctcagttttttccgtctagtccgccacctcattccccattaagtcatgggcatatccccagtgccattgttcttccaaatgctacccatgactacaacacgtctttctcaaactccaatgctcacaaagctgaaaagaagcttcaaaacattgatcaccctctcacaaagtcatccagtaagagagatcaccggcgttctgttgattccagaaataccctcaatgatctcctgaagcatctgaatgacccaaatagtaaccccaaagccatcatgggagacatccagatggcacaccagaacttaatgctggatcccatgggatcgatgtctgaggtcccacctaaagtccctaaccgggaggcatcgctatactcccctccttcaactctccccagaaatagcccaaccaagcgagtggatgtccccaccactcctggagtcccaatgacttctctggaaagacaaagaggttatcacaaaaattcctcccagaggcactctatatctgctatgcctaaaaacttaaactcaccaaatggtgttttgttatccagacagcctagtatgaaccgtggaggatatatgcccacccccactggggcgaaggtggactatattcagggaacaccagtgagtgttcatctgcagccttccctctccagacagagcagctacaccagtaatggcactcttcctaggacgggactaaagaggacgccgtccttaaaacctgacgtgccaccaaagccttcctttgttcctcaaaccccatctgtcagaccactgaacaaatacacatactaggcctcaagtgtgctattcccatgtggctttatcctgtccgtgttgttgagaggatgatgttgtaagggtaccttaaaacaagagactcgcttgtattttaggagaaccaagtggccaaagaaactctttctaactttggcaacatcagaacttgccacatgtagctactgcagcaaggcttctgtgtacttgcctgaaaacaaaggaaggtgctggtcattccatttcttttgtttgaagctaaagagatgtgtagctcacaggggctaccttaccagtataaagagctgataacagtactcagaagaatctgtgaacaaatacttgaaaatgggttcaatgtagactgccattatgtgtggtcttcccattaaatgtgaacattttaatatgtatgcattcaccttgcctcttgcacaaatgtc

SEQ ID NO: 14623 - protein, 451 aa, Homo sapiens
MLAEGYEQDTEFGNTAHLGDCHGVRWEVQSGESNQMVHMNVLITCVFAAFVLGAFIAGVAVYCYRDMFVRKNRKIHKDAESAQSCTDSSGSFAKLNGLFDSPVKEYQQNIDSPKLYSNLLTSRKELPPNGDTKSMVMDHRGQPPELAALPTPESTPVLHQKTLQAMKSHSEKAHGHGASRKETPQFFPSSPPPHSPLSHGHIPSAIVLPNATHDYNTSFSNSNAHKAEKKLQNIDHPLTKSSSKRDHRRSVDSRNTLNDLLKHLNDPNSNPKAIMGDIQMAHQNLMLDPMGSMSEVPPKVPNREASLYSPPSTLPRNSPTKRVDVPTTPGVPMTSLERQRGYHKNSSQRHSISAMPKNLNSPNGVLLSRQPSMNRGGYMPTPTGAKVDYIQGTPVSVHLQPSLSRQSSYTSNGTLPRTGLKRTPSLKPDVPPKPSFVPQTPSVRPLNKYTY

SEQ ID NO: 14624 - DNA, 2253 bp, Homo sapiens
  CDS (31)..(2253)
ctcttctcttgtctctgacggcttgtagttatggggcaggagccgcggacgctgccgccctcccccaactggtactgcgcccgctgcagcgatgccgtgcccgggggcctctttggcttcgccgcgcggacctccgtcttccttgtccgcgtgggcccgggcgcaggcgagagtccagggacacccccgtttcgagtcataggagagttggtgggacacaccgaaagggtctctggcttcacattttctcatcaccctggtcagtacaacctctgtgccaccagctccgacgatgggactgtgaaaatatgggatgtagagacaaaaacagttgtgacagaacatgcactccatcagcatacgatatcaacactacattggtctcctcgagtaaaggacttaatagtatctggggatgaaaaaggagtagttttctgttactggtttaacagaaatgacagccagcacctctttatagaacccaggacaattttctgtcttacttgttcacctcatcatgaagatttagtagccattggctacaaggatggcatagtggtgataattgacatcagtaagaaaggagaggttattcataggcttcgaggccatgatgatgaaatccactccatagcctggtgtcccctgcctggtgaagattgtttatctataaaccaagaggaaacttcagaagaagctgaaattaccaacgggaatgctgtagcacaagctccagtaacaaaaggttgctacttagccactggaagcaaagatcaaaccattcgaatctggagctgttctagaggccgaggggtgatgattttgaaattgccctttctgaagagaagaggagggggtatagacccaactgttaaagagcgcctttggttgacactccattggcccagcaatcaaccaacacagccggtatctagctgttttggaggtgaactgttgcaatgggatctcactcaatcttggagacggaaatacaccctcttcagtgcctcatcagaagggcaaaatcattcaagaattgtgtttaatttatgtcctttacaaacagaggatgacaaacagctgttactttctacatcaatggatagagatgtaaaatgttgggacatagccaccttggagtgcagctggacccttccttcccttggtgggtttgcatacagcctggctttctcttctgtggacataggctctttggccataggtgttggggatggcatgatccgtgtatggaatacactctccataaagaacaactatgatgtgaaaaatttttggcaaggcgtgaagtccaaggttacagcgctgtgctggcacccaaccaaggaaggttgcttagcttttggaactgatgatggaaaagtgggattgtatgacgcctactccaacaagcctccacagatttctagcacatatcataagaagactgtatatacgttagcctgggggccaccagtaccccccatgtcacttggaggagaaggagacagaccttcccttgctttatacagctgtggaggagaagggattgtcttacagcataatccctggaagcttagtggagaagcctttgacatcaacaaactcatcagggacaccaattcaatcaaatacaaattgcctgtacacacagagataagttggaaagcagatggcaaaatcatggctcttggcaatgaagatggatcaatagaaatatttcagattcccaacctgaaactgatctgtactatccaacagcatcacaagcttgtgaataccattagctggcatcatgagcatggcagccagccagaattgagctatctgatggcctctggctccaacaatgcagtcatttacgtgcacaacctgaagactgtcatagagagcagccctgagtctccagtgaccattacagagccctaccggaccctctcagggcatacggccaagattaccagtgtggcgtggagcccacatcatgatggaaggctggtatctgcttcctatgatggtacagcccaggtgtgggatgctctccgggaagagcccctgtgcaatttccgaggacatcaaggtcgactgctttgtgtggcatggtctcctttggatccagactgcatctattcaggggcagatgacttttgtgtgcacaagtggctcacttccatgcaagatcattcccggcctcctcaaggcaaaaaaagtattgaattggagaaaaaacggctctctcaacctaaggcaaagccc

SEQ ID NO: 14625 - protein, 741 aa, Homo sapiens
MGQEPRTLPPSPNWYCARCSDAVPGGLFGFAARTSVFLVRVGPGAGESPGTPPFRVIGELVGHTERVSGFTFSHHPGQYNLCATSSDDGTVKIWDVETKTVVTEHALHQHTISTLHWSPRVKDLIVSGDEKGVVFCYWFNRNDSQHLFIEPRTIFCLTCSPHHEDLVAIGYKDGIVVIIDISKKGEVIHRLRGHDDEIHSIAWCPLPGEDCLSINQEETSEEAEITNGNAVAQAPVTKGCYLATGSKDQTIRIWSCSRGRGVMILKLPFLKRRGGGIDPTVKERLWLTLHWPSNQPTQPVSSCFGGELLQWDLTQSWRRKYTLFSASSEGQNHSRIVFNLCPLQTEDDKQLLLSTSMDRDVKCWDIATLECSWTLPSLGGFAYSLAFSSVDIGSLAIGVGDGMIRVWNTLSIKNNYDVKNFWQGVKSKVTALCWHPTKEGCLAFGTDDGKVGLYDAYSNKPPQISSTYHKKTVYTLAWGPPVPPMSLGGEGDRPSLALYSCGGEGIVLQHNPWKLSGEAFDINKLIRDTNSIKYKLPVHTEISWKADGKIMALGNEDGSIEIFQIPNLKLICTIQQHHKLVNTISWHHEHGSQPELSYLMASGSNNAVIYVHNLKTVIESSPESPVTITEPYRTLSGHTAKITSVAWSPHHDGRLVSASYDGTAQVWDALREEPLCNFRGHQGRLLCVAWSPLDPDCIYSGADDFCVHKWLTSMQDHSRPPQGKKSIELEKKRLSQPKAKP

SEQ ID NO: 14626 - DNA, 2709 bp, Homo sapiens
  CDS (170)..(1681)
aagggttggctgcgcgtgcggcgggagtagaggcgccttgcgcaccaggaagtgactgtttccccaccgcagcaaaccaggccatccgctggccttttagtttgccgcctcaggtttgtaagaggatttattggttacgaaggaaggtggatttcagtgtgttctttggatggcaggccttaagagaagagtcccactgcacagcctcagatacttcatctccatggtgggtctcttctccaaaccaggactgcttccctggtatgccagaaatccaccaggatggtcacagctctttctgggcacagtatgtaagggagatttcacccgtgtgatagccacgaaatgtcagaaaggacaaaaaagtcagaagaaaccaagccatcttggaccactagatggttcctggcaggaaaggctggctgatgttgtgacaccactctggaggttgagctatgaagaacagctcaaggtgaaatttgcagctcagaagaaaattttacaaagactagagtcttacatccaaatgctcaatggagtcagtgtgacaacggctgtacccaaatctgagaggctctcttgtcttctccatcctattataccctctcctgtcatcaatggttaccgaaataagtccaccttctctgtgaaccgaggtccagatggcaatccaaagactgtggggttctacctgggaacttggagagatgggaacgttgtctgtgtgcagtctaatcatctgaaaaacatccctgagaaacacagtcaagtggcgcagtactatgaagtattccttcgacagtctccattggagccctgccttgtatttcatgaaggtggatactggcgtgagctcacagtccgcaccaatagccaagggcgcacaatggctatcatcactttccatccccagaaattaagtcaggaggagctccatgttcagaaggagattgtaaaggaatttttcatcagaggtcctggagcagcctgtggcttgacctcactttacttccaggaaagtaccatgacccgttgcagccatcagcagtctccctatcagcttctgtttggggaaccctacatctttgaagaacttctgagcttgaagatccgcatctctccagatgcctttttccagattaacacagctggtgcagagatgctgtatcggactgtgggggagctgactggagtgaactctgacaccatccttcttgacatctgctgtggaactggtgtgattggcctctctctggctcagcatacatctcgggtccttgggattgaattgttggagcaggcagtggaggatgcaagatggactgcagccttcaatggcatcaccaactctgaatttcatactggtcaagcagagaagattttgccagggctgctaaagtcaaaggaagatggacagtcaattgttgctgtggtgaacccagcccgtgccggactgcattacaaggtgattcaagccattcgaaacttcagggccatccacacgctagtttttgtttcctgcaagctccatggtgaatccactaggaatgtcattgagctgtgctgtcctccagaccctgctaagaagctcttaggcgagccctttgtcctgcagcaagctgtacctgtggatttgttccctcacaccccacattgtgagctggtgctcctctttactcgataagcagcctcctagaagacagcaggctatttgttaaggctgaagtttcagaaactttcaggtttggcatattgctacattgcagaccctgggagcattacagtggaaaccaatctttggtttgtgaataggaagaatctattaggcctctggtctgaggcagattttttttttgagatggggtctcactcttgcccaggctggagtgtcgtggcgtgatctcggctcactgcaacctccgcctcccgggttcaggtgattctcgtgcctcagcttccccagtagctaggattaaaggtgcgtgccaccatgcccggctaatttttgtatttttggtagagacagggtttcaccatgttggccaggctggtctcaaactcctgacctcaagtgatccacccgcctcggcctctcaaagtgctgggattataggcgtgagccaccacaccccgccgcggctgacttaaccttagatttcagattccctttcaatcatgcccgtttgcttgggtttgaccactccccactcctggatctggactgtttcttcctgttgctgtcagccttggttctagtttatagtcttgtctcctccgtttctgcttatggtgtggacaaatgaccttttttaagcagctggtaataattttacattgactggagcctgtgcatttgctcagagatgctacaatttttagatatttctaagacttctggattcttgaggtagttaaggattaaaaccagaaacagtcgaggttttttaaaagcagggtaagccatgaagtgaatacagggtgactgatgagaattaatcagatgagattaattcttttgggttttcttggttttaaggcatctcgaatgccccttgaaaatgtagttttccctggtggtgggcacctgtaatcccagctactcgggaggctgaggcaggataattgcttggacctgggaggtggaggttgcagtgggctgagattgtgccactgcactccagcctgggtgacagagtgagacaccatctc

SEQ ID NO: 14627 - protein, 504 aa, Homo sapiens
MAGLKRRVPLHSLRYFISMVGLFSKPGLLPWYARNPPGWSQLFLGTVCKGDFTRVIATKCQKGQKSQKKPSHLGPLDGSWQERLADVVTPLWRLSYEEQLKVKFAAQKKILQRLESYIQMLNGVSVTTAVPKSERLSCLLHPIIPSPVINGYRNKSTFSVNRGPDGNPKTVGFYLGTWRDGNVVCVQSNHLKNIPEKHSQVAQYYEVFLRQSPLEPCLVFHEGGYWRELTVRTNSQGRTMAIITFHPQKLSQEELHVQKEIVKEFFIRGPGAACGLTSLYFQESTMTRCSHQQSPYQLLFGEPYIFEELLSLKIRISPDAFFQINTAGAEMLYRTVGELTGVNSDTILLDICCGTGVIGLSLAQHTSRVLGIELLEQAVEDARWTAAFNGITNSEFHTGQAEKILPGLLKSKEDGQSIVAVVNPARAGLHYKVIQAIRNFRAIHTLVFVSCKLHGESTRNVIELCCPPDPAKKLLGEPFVLQQAVPVDLFPHTPHCELVLLFTR

SEQ ID NO: 14628 - DNA, 2528 bp, Homo sapiens
  CDS (262)..(1794)
catcaagaccatcagggcgatatctttggcggcctggtcctcctgaaggtgaaggcaaaggtgcgacagtgcctgcaggagcggcggacagtgcccattttgtttgcctctaccgttcggcgccaccccgacaagacggccctgatcttcgagggcacagatacccactggaccttccgccagctggatgagtactcaagcagtgtagccaacttcctgcaggcccggggcctggcctcgggcgatgtggctgccatcttcatggagaaccgcaatgagttcgtgggcctatggctgggcatggccaagctcggtgtggaggcagccctcatcaacaccaacctgcggcgggatgctctgctccactgcctcaccacctcgcgcgcacgggcccttgtctttggcagcgaaatggcctcagccatctgtgaggtccatgccagcctggacccctcgctcagcctcttctgctctggctcctgggagcccggtgcggtgcctccaagcacagaacacctggaccctctgctgaaagatgctcccaagcaccttcccagttgccctgacaagggcttcacagataaactgttctacatctacacatccggcaccacagggctgcccaaggccgccatcgtggtgcacagcaggtattaccgcatggctgccctggtgtactatggattccgcatgcggcccaacgacatcgtctatgactgcctccccctctaccactcagcaggaaacatcgtgggaatcggccagtgcctgctgcatggcatgacggtggtgattcggaagaagttctcagcctcccggttctgggacgattgtatcgagtacaactgcacgattgtgcagtacattggtgaactgtgccgctacctcctgaaccagccaccgcgggaggcagaaaaccagcaccaggttcgcatggcactaggcaatggcccccggcagtccatctggaccaacttttccagccgcttccacataccccaggtggctgagttctatggggccacagagtgcaactgtagcctgggcaacttcgacagccaggtgggggcctgtggtttcaatagccgcatcctgtccttcgtgtaccccatccggttggtacgtgtcaacgaggacaccatggagctgatccgggggcccgacggcgtctgcattccctgccagccaggtgagccgggccagctggtgggccgcatcatccagaaagaccccctgcgccgcttcgatggctacctcaaccagggcgccaacaacaagaagattgccaaggatgtcttcaagaagggggaccaggcctaccttactggtgatgtgctggtgatggacgagctgggctacctgtacttccgagaccgcactggggacacgttccgctggaaaggtgagaacgtgtccaccaccgaggtggaaggcacactcagccgcctgctggacatggctgacgtggccgtgtatggtgtcgaggtgccaggaaccgagggccgggccggaatggctgctgtggccagccccactggcaactgtgacctggagcgctttgctcaggtcttggagaaggaactgcccctgtatgcgcgccccatcttcctgcgcctcctgcctgagctgcacaaaacaggaacctacaagttccagaagacagagctacggaaggagggctttgacccggctattgtgaaagacccgctgttctatctagatgcccagaagggccgctacgtcccgctggaccaagaggcctacagccgcatccaggcaggcgaggagaagctgtgattccccccatccctctgagggccggcggatgctggatccggagccccaggttccgccccagagcggtcctggacaaggccagaccaaagcaagcagggcctggcacctccatcctgaggtgctgcccctccatccaaaactgccaagtgactcattgccttcccaacccttccagaggctttctgtgaaagtctcatgtccaagttccgtcttctgggctgggcaggccctctggttcccaggctgagactgacgggttttctcaggatgatgtcttgggtgagggtagggagaggacaaggggtcaccgagcccttcccagagagcagggagcttataaatggaaccagagcagaagtccccagactcaggaagtcaacagagtgggcagggacagtggtagcatccatctggtggccaaagagaatcgtagccccagagctgcccaagttcactgggctccacccccacctccaggaggggaggagaggacctgacatctgtaggtggcccctgatgccccatctacagcaggaggtcaggaccacgcccctggcctctccccactcccccatcctcctccctgggtggctgcctgattatccctcaggcagggcctctcagtccttgtgggtctgtgtcacctccatctcagtcttggcctggctatgaggggaggaggaatgggagagggggctcaggggccaataaactctgccttgagtcctcct

SEQ ID NO: 14629 - protein, 511 aa, Homo sapiens [sequence omitted]

SEQ ID NO: 14630 - DNA, 2315 bp, Homo sapiens
  CDS (92)..(1717)
aacacgataaaggggacatgccgggagttgcagtaccctcaggaaggtagcgtcttgatctgcgtggcgtggttctgtgccttgggaagagatgaatgggaagcggccagcggagcccggcccagcccgggtgggaaaaaagggaaagaaggaggtgatggcggagttttcggacgctgttacggaagaaaccttgaaaaagcaggtggctgaggcctggagccgcaggacgccgttcagtcacgaagtcattgtcatggacatggacccttttcttcactgtgtgatcccaaacttcatccaaagccaagacttcttagaagggcttcagaaggaactgatgaacttggacttccatgagaagtataatgatttatataagttccagcagtctgatgatttgaagaagagaagagagcctcacgtctccactttaaggaaaattctgtttgaagatttccggtcctggctttctgatatttctaaaattgacctggaatcaaccattgacatgtcctgtgctaaatatgaattcactgatgccctgctgtgccatgatgatgagctggaagggcgccggattgccttcatcctgtacctggttccttcctgggacaggagcatgggtggtaccctggacctgtacagcatagatgaacactttcagccgaagcagattgtcaagtctcttatcccttcgtggaacaaactggttttctttgaagtatctcctgtgtcctttcaccaggtgtctgaagtgctgtctgaagaaaagtcacgtttgtctataagtggctggtttcatggtccatcattgactcggcctcccaactactttgaaccccccatacctcggagccctcacatcccacaagatcatgagattttgtatgattggatcaaccctacttatctggacatggattaccaagttcaaattcaagaagagtttgaagaaagttctgaaattctcctgaaggagtttcttaagcctgagaaattcacgaaagtctgtgaggccttggagcatggacatgtggaatggagcagccgaggtccccctaacaaaaggttttatgagaaagctgaggagagtaagcttcctgagatattgaaggagtgcatgaagttatttcgctctgaggcactattcttgctgctctccaacttcacaggcctgaagcttcatttcttggccccttcggaagaagatgagatgaatgataaaaaagaggcagaaaccactgatatcactgaagaagggactagccatagtcctcctgagccagagaataatcagatggccatcagcaacaacagccaacagagcaatgagcagacagacccagagccagaggaaaatgaaacaaagaaagaatcaagtgttcccatgtgccaaggggaactgaggcattggaagaccggtcactacactttaattcatgaccatagcaaggctgaatttgccctagacttaattctgtactgtggctgtgaaggctgggagccagaatatggcggttttacttcttacattgccaaaggtgaagatgaagagctgctaacagtgaatccagaaagcaattctttggcattggtctacagagacagagagactctgaaatttgtcaagcatattaaccaccgaagcctggaacaaaagaaaaccttcccaaacagaacaggtttctgggacttttcattcatctattatgaatgacagcactgggcaaagctgaacaaaaatgtgacccttcgtaattactgggaagtctgaaagagctaagcatggagtcaaggagaactacatggtagcttgcctgacagtgttcttaaaactggttgtcttttactaggactcataatgattgtcctcaaccgagaccttgagcttgcagctacgtacttatctcttgattaaaaaaaaaaaaagttggctttttttttttttaacatttagtcctttttccatattggcttcttcagtgaatttttaagttcaatttgtttttattggggtaaaatatttataacataaaactgaccagcttacccatttttaaatatgcaattcagtggattaagtacattctcattgttgtccagccatcaccatcatccatctccagaagttttccatcttcccaaattctgtgcccattgaacaataactccccacctccccctcccctagcaacagccatactttttgtctctatcatcaacttcactactcatatttctcatgtaagtggaatcatacagtatttgtccttttgtgactggtttcacttagcataaagtctttaagatgc

SEQ ID NO: 14631 - protein, 542 aa, Homo sapiens [sequence omitted]

SEQ ID NO: 14632 - DNA, 1998 bp, Homo sapiens
ttttagaatggcacatcatatctcattgatgccaacatggttttgtccatggttctgactttctgtgaaggcaccagcttgcaatatgccatcccatttcaccttgcatgtgagacagcaaacaaaatccacaaatggtgtgaactaatatgctggctgctaccttgcataaattaatgatttgatcacacgggttcttcgtggggttacatctgtgaatagcctgttttccacatgtaaatttgtgccttacaccttgagttgtgtacacttgtaaactctttatgatcaactgttcccccttttgaaataagtgcagatatttatttaaccctcccttccccaccctctgccccacttccagccctctgaaagattggagtcaagcagatggaagaatgcagtggtgatagttgtcatgcgacagcctgagaacgctgggcagcaccacaccctccaattcacactgccttctagttgtgccaactggaaccaccctttggctgtgctgcgaagcatggaccccagtgttgttgtgggtgtgtcaaatcccctttcatcctcaagagctccctgcttcccttagattatttcaatacggtgatatccttatttgctagcagaaaagggactaacgtcccattcctcttttctgctgcgtccactggctagagagcaggcggtgcgcggttgggcagacacctgggaggagtctccaagccatgtgcacagcacacacgtgcagtgcacacaaagaaatgacatggaaatagatgcaggcaggctggtccctgctgtgattaacgagtaactccaagtacaaggccgaccacaatggatgctgcaaaaacgttgactggggcaaaggattttttattttattttttattttgttaattatgtttttaggggatgggaggtggtgtgtgtttttctcctcttggttttcatttgctcaagcacacaaaagggacttttgtttactctatcatgaacaaaggaactgtccacatactgtaaaccatgagcagtgttgttgttgtttttttaaacagtatatttggtggtctctttgtctgcttttatttccagttcgatcttctgggtttagttttgtctttaaaaagaattcaaaaaaagactgacaatgacagttttgagttggatagttaaaaaagtggagcctccataatcagtgtggttgccttcagacctgagtacttagctgagggtgggtgagagccctttgttccaaaagtccattagttttgctgttatttaggagtaggtggttgttgttgtttttactttttttttttttggcttttgtaatggaatccatgttcacatcctgtgaactctgtctcctgaaaccctgaagtatttcctagaacctgaaatattgttttcttccttgaattttctctagaaatgcagaaattaggaaggtgatgggtctgtatccccctgcccccttctttcccatgcttgactcccgagagtactggcagtgcagcacccatcattgacgtaagcggctgtcttgtccagtgtttgtaggcatcactgcctcagctgttaaggagacctgtgtcaaaacttacatccacattcctacacccccacaacccatcacttctggtgttaaccctaaaatacccacatgtattgagctggtcttctgcatttaagtatttctccccagtttttttccccactgtgtgtggggggagggtccataaacccgagtgtgcctttgctttccacccttgctagacactggtagatgcaacaaactcagatttatatttgttgtaaagttgtaaaaatattgtgatgtcaccaattttccttccatctccacatcccctaacatctgattcacgacttaatgtatgttgtaagaaaagaaaaaagaaaagaaaaaaagggaaaaaagaaaagcaaggaaaaggctctttattacttaaaagtaataaaacctgactgttctatatt

SEQ ID NO: 14633 - DNA, 2334 bp, Homo sapiens
  CDS (309)..(761)
tcttacctatcaaaaagaaacatttgtttgagaattccaggcttctgcagcctccaaaaggtgttcttctctatgggcctccaggctgtggtaaaacgttgattgccaaggccacagccaaagaagcaggctgtcgatttattaaccttcagccttcgacactgaccgataagtggtatggagaatctcagaaattggctgctgctgtcttctcccttgccataaagctacaaccatccatcatctttatagatgaaatagactcctttctacgaaaccgttcaagttctgaccatgaagctacagccatgatgaaagctcagtttatgagtctctgggatggattggatactgatcacagctgccaggtcatagtaatgggagctaccaatcgtcctcaggaccttgactcggctataatgagaagaatgcctacaagatttcatatcaaccagcctgctttaaaacagagagaagcaatcctgaaactcatcttgaaaaatgaaaatgtggataggcatgtagacctgctagaagttgcccaggaaactgatgggttttcaggaagtgacctaaaagagatgtgtcgagatgctgccctcctctgtgttagagaatatgttaattctacatcagaagaaagccatgacgaagatgaaattcggcctgttcaacagcaggacctgcatcgggcaattgaaaagatgaagaaatcaaaggatgcagcatttcagaatgttttaacacatgtttgtttagattaagagtaaagatcatttgtacagttcagtgatctagtttggtgtgtcctcttatcagttagtggaaatagaacggaaagagtgctctttaaacaatgagggagctcagtgtttatggttttatactctgaattctaagttattgagatatagttgttacataggtggtattactgttggtcaaaaatcatgaggaggaacagttgaatccagcctgaacgtgggtgcttgtgtttgaccttttcagccatatattgtacagccttatagaatctaagctggtcttaaagtcataaatgattcattgggtcattagtgagaaacggggatgtggttaggtgctggttcctagacatgtgagtatgcgtttgtgtgtgtgcgtgtatgtatgtgtatattaaatgtatatatccacacattttatattgacattctgtagatatgtttgaatatagaaactttttttaccccaactactgaatccaggagtaccaaataatatatagtaaaactaagatttaaggttgtgtcaaaaaggtacagtgattcagccatttccatttgtcatttgtttcaaccttttttaagttgagtgtttttatttctgcagttattagttggatcctccacatcttgcatatatacatgggctcaattattatgtttgtcaggataatcaaatgaaaatactagttcagtgatcagcattgaatggttgttaggcagccatgtgctcaacactgatttcacctcttgagtataaactttttaaatttaaattggtttacatgaaagtggattaaaaggcctttcaaaagaatgggtttgaaaaacctcagtaccctttaatacatgtacatttctttcctttttttcatttaatgtaacatgtctgttgtaactatgtttcttaaatattattttaaggttatgtgttctttaattatggtcaaatataatttggtcaccaaaaatgaaataatagtttaaaacaagtagctgttactaagtgtgctaaaaatactcattttataattaattttagttttcttagtatattattataaattgtgccctaagtcaggtacaaatgtacacatcaaaatgcccatattgtatctatctgtagtcgtttaatgtgaattatatgtgaatttttttcaaaattttactaaccagaattctgttataggcacctaaccacgcagcatgaggaaaacggcacaacacaatcttgaggtgccttctgaatcatcagattaaattatgcttcatatgtttttgcttttactgtatttctttaaaaactctaaatctttattcatgtgtcactggattaatttatctgataatgtgtctcacaagaatctgttagatcgtttattcttcagttgtactttgaatggtggggtggaagtttcaggtgaacaatggataacaaaaagcaagttatggaagattgtgaagaggatggaaaaactgaatacaagataccaaaaatgaaaaaaagtgtcccatttttaataactatattctattattttataaatgtgtaataaaggggtccctcttt

SEQ ID NO: 14634 - protein, 151 aa, Homo sapiens
MMKAQFMSLWDGLDTDHSCQVIVMGATNRPQDLDSAIMRRMPTRFHINQPALKQREAILKLILKNENVDRHVDLLEVAQETDGFSGSDLKEMCRDAALLCVREYVNSTSEESHDEDEIRPVQQQDLHRAIEKMKKSKDAAFQNVLTHVCLD

SEQ ID NO: 14635 - DNA, 2353 bp, Homo sapiens
  CDS (123)..(1511)
aagttaaaacagctgagcttctgaatgcctgcaagaagctgccctttgaaattaagaacttcgtgaagaaaacagaggctcttcggttgcagtatcgctacttagacttgcgtagtttccaaatgcagtataacctgcgactgaggtcccagatggtcatgaaaatgcgggaatatctctgtaatctgcatgggtttgtggatatagaaacccccacattgtttaagaggaccccagggggtgccaaagagtttttagtaccatccagggaacctggaaagttttattctctccctcagagtcctcaacagtttaagcaacttctgatggttggcggtttagacagatattttcaggttgcccgatgttatcgagatgaaggttcaagaccagacagacagcctgagtttactcagattgacatagagatgtcatttgtagaccagactgggatccagagtttaattgagggtttgctccagtattcctggcccaatgacaaagatcctgtggttgttccttttcctactatgacttttgctgaggtgctggccacctatggaactgataaacctgacactcgctttggaatgaagattatagatatcagtgatgtgtttagaaacacagagattggatttcttcaagatgcacttagtaagccccatggaactgtgaaagccatatgtatccctgaaggagcaaaatacttaaaaaggaaagacattgaatccattagaaactttgcagctgaccattttaatcaggaaatcttacctgtattccttaacgccaatagaaactggaattctccagttgctaatttcataatggagtcacaaagactggaattaatcagactaatggagacccaagaggaagatgtggtcctactaactgctggagagcacaataaagcatgctctttgttaggaaaattacgactggaatgtgctgaccttctagaaacaagaggagtggtgctccgtgaccccactctgttctctttcctttgggtggtagatttcccactcttcctgcccaaggaggaaaatcccagagagctggaatcggcccaccacccatttactgctccccaccccagtgacatacatctcctgtacactgagcccaaaaaggcccgtagccaacactatgacttggttttaaatggcaatgaaataggaggtggttcaattcgaattcacaatgcagagctgcagcgttatatcctggcaaccttactaaaggaggatgtgaaaatgctctcccatctgctccaggctttagattatggggcaccccctcatggaggaattgccttagggttagacagactgatatgccttgtcactggatctccaagcatcagagatgtcatagccttcccaaagtccttccggggacatgacctcatgagcaataccccagattctgtccctcctgaggaactgaagccctatcatatccgagtctccaagccaacagactccaaagcagaaagagctcattgaatcatgcataccatgcagaaagttgagcttttaggttttgtcctctttgcttccccaaggctaaagtcagatctagagttctgccacaggtctaacaatcaagtctttagatggaaggaatccaggcaacattcttcaccacaacgaagaaacagataaaagatacccaattttgacttgatttcatgcatcatttggattttttttggttaggactttttttgaagttcctttttacttaggtgtgaaagatggttctttgttgaaataatatagtggtttagtgttttcaaatcatgtttctcatacccagatagtagattattcacttaggacagaggtaatcaaattatgtgtgaaatgtaggaaaatgcttgcccctgtaaactagtgagttgatggagcatttgcttcatcatcctcatcaagagaatcatataaattaagctttataatgacatttcaaccatcaacataatatagtgaggagtagcataatattttttaataatgcagaaaacatcactgaaatgagagtcacaaatttttcttcagtgtttcagcctgagtaagttacataaacctcgcttagcctcccttcctgctaatgtgtaaaatacatacttgccctggctacctcaccgggctgttattgctggaatcagaggagataacatatatggaagataaagtgaataaaagtactttgaaaaactataaagcattccacaaatatgagatgatggtattatccatccataaataggtagatatatctctattttatagtttcagattaaacaaaactgatatcaatagtaaaagtcattttacttatc

SEQ ID NO: 14636 - protein, 463 aa, Homo sapiens
MQYNLRLRSQMVMKMREYLCNLHGFVDIETPTLFKRTPGGAKEFLVPSREPGKFYSLPQSPQQFKQLLMVGGLDRYFQVARCYRDEGSRPDRQPEFTQIDIEMSFVDQTGIQSLIEGLLQYSWPNDKDPVVVPFPTMTFAEVLATYGTDKPDTRFGMKIIDISDVFRNTEIGFLQDALSKPHGTVKAICIPEGAKYLKRKDIESIRNFAADHFNQEILPVFLNANRNWNSPVANFIMESQRLELIRLMETQEEDVVLLTAGEHNKACSLLGKLRLECADLLETRGVVLRDPTLFSFLWVVDFPLFLPKEENPRELESAHHPFTAPHPSDIHLLYTEPKKARSQHYDLVLNGNEIGGGSIRIHNAELQRYILATLLKEDVKMLSHLLQALDYGAPPHGGIALGLDRLICLVTGSPSIRDVIAFPKSFRGHDLMSNTPDSVPPEELKPYHIRVSKPTDSKAERAH

SEQ ID NO: 14637 - DNA, 2665 bp, Homo sapiens
  CDS (129)..(2663)
ttcaactagcaaaagaaagctttctgcacagattggcccaagagagagaagcagcaaaagctaagaaagaagaatcaacaacaggtaacgccaacttgttagaaaagacaggaggagtggatttccatatgaaagctgtgccagggacagaagtgccagggcataagaattgggttgtgagcaaatttggaagagtcttacctgttcttcaccttaaaaatcaacataaacgtaaaatcatcaaatatgatccctcaaaatactgccacaacctgaagaagataggggaggatttctcaaacaccattcctatatccagcctgacttgggaattagaaggagggaatgaccctatgagtaagaaacggcgaggagagttctctgactttcatggccctcccaagaagataataaaagtgcagaaggatgagagttccactgggtctctggccatgagtacaaggcccaggagggtaatagagagaccacccttaacacagcaacaggctgcacaaaaaagaacttgtgattccattactccttctaaatcatctcctgtacctgtttctgatactcagaaacttaaaaatctaccttttaagacttctggcttggaaactgccaagaagagaaacagcatttctgatgatgatactgattctgaagatgaattgagaatgatgattgcgaaagaggaaaacttacagagaactacacaaccctcaataaatgaatctgaaagtgatccttttgaagttgtaagggatgatttcaaatcaggcgttcacaaactgcattctttaataggtttaggtatcaaaaatcgtgtctcttgccatgatagtgatgatgatattatgagaaatgatcgtgagtatgactcaggagatacagatgaaattattgcgatgaaaaaaaatgttgctaaggtcaaaaacagtacagaattttcacaaatggaaaaatctacgaagaaaacttctttcaaaaatagagaaaactgtgagctttctgatcactgtattaaactacaaaaaagaaaaagcaatgtagagtcagccctcagtcatggattaaagtctcttaatcgtaaatctccctctcactccagtagcagtgaagatgctgattctgcatcagaattagctgactctgaaggaggtgaggagtataatgccatgatgaaaaactgccttcgtgtgaatctcactttagctgatttggaacaattggctggcagtgatctgaaggttccaaatgaagatactaagagtgatggaccagaaaccaccacccaatgcaagtttgacagaggctccaagagccccaagactcccactggcctccgcagaggccgacagtgtattcgtcctgcggagattgtggcttccctgttagaaggagaggagaacacctgtggcaaacagaaaccaaaggaaaacaatttaaagccaaaatttcaggctttcaagggagtaggctgtctatatgaaaaggagtcaatgaaaaaatccttgaaagacagtgttgcctctaacaataaagatcagaattccatgaaacatgaggatcccagtatcatatccatggaagatgggtccccatatgttaatggctcattaggtgaagtgactccatgccaacatgcaaagaaggcgaatggcccaaactatattcagcctcaaaaaagacagaccacttttgaaagccaggatcgcaaggcagtgtcccctagcagttctgaaaagagaagtaagaatcctatttctaggccattagaaggtaagaagtccttaagtcttagtgcaaagactcacaacataggctttgacaaagacagctgccatagtaccacaaagacagaagcttcacaggaagagcggtctgattcaagcggcctcacatctctcaagaaatcaccaaaggtctcatccaaggacactcgggaaatcaaaactgatttctcactttctattagtaattcgtcagatgtgagtgctaaagataagcatgctgaagacaatgagaagcgtttggcagccttggaagcgaggcaaaaagcaaaagaagtgcagaagaagctggtgcataatgctctggcaaatttggatggtcatccagaggataagccaacgcacatcatcttcggttctgacagtgaatgtgaaacagaggagacatcgactcaggagcagagccatccaggagaggaatgggtgaaagagtctatgggtaaaacatcagggaagctgtttgatagcagtgatgatgacgaatctgattctgaagatgacagtaataggttcaaaattaaacctcagtttgagggcagagctggacagaagctcatggatttacagtcgcactttggcaccgatgacagattccgcatggactctcgatttctagaaactgacagtgaagaggaacaggaagaggtaaatgaaaagaaaactgctgaggaagaagagcttgctgaagaaaaaaagaaagccctgaatgttgtacaaagtgttttgcaaatcaacttaagcaattctacaaacagaggatcagtagctgctaagaaatttaaggacatcatacattatgatccaacgaagcaagaccatgccacttacgaaagaaaaagagatgataagccaaaagaaagtaaagcaaaacg

SEQ ID NO: 14638 - protein, 845 aa, Homo sapiens
MKAVPGTEVPGHKNWVVSKFGRVLPVLHLKNQHKRKIIKYDPSKYCHNLKKIGEDFSNTIPISSLTWELEGGNDPMSKKRRGEFSDFHGPPKKIIKVQKDESSTGSLAMSTRPRRVIERPPLTQQQAAQKRTCDSITPSKSSPVPVSDTQKLKNLPFKTSGLETAKKRNSISDDDTDSEDELRMMIAKEENLQRTTQPSINESESDPFEVVRDDFKSGVHKLHSLIGLGIKNRVSCHDSDDDIMRNDREYDSGDTDEIIAMKKNVAKVKNSTEFSQMEKSTKKTSFKNRENCELSDHCIKLQKRKSNVESALSHGLKSLNRKSPSHSSSSEDADSASELADSEGGEEYNAMMKNCLRVNLTLADLEQLAGSDLKVPNEDTKSDGPETTTQCKFDRGSKSPKTPTGLRRGRQCIRPAEIVASLLEGEENTCGKQKPKENNLKPKFQAFKGVGCLYEKESMKKSLKDSVASNNKDQNSMKHEDPSIISMEDGSPYVNGSLGEVTPCQHAKKANGPNYIQPQKRQTTFESQDRKAVSPSSSEKRSKNPISRPLEGKKSLSLSAKTHNIGFDKDSCHSTTKTEASQEERSDSSGLTSLKKSPKVSSKDTREIKTDFSLSISNSSDVSAKDKHAEDNEKRLAALEARQKAKEVQKKLVHNALANLDGHPEDKPTHIIFGSDSECETEETSTQEQSHPGEEWVKESMGKTSGKLFDSSDDDESDSEDDSNRFKIKPQFEGRAGQKLMDLQSHFGTDDRFRMDSRFLETDSEEEQEEVNEKKTAEEEELAEEKKKALNVVQSVLQINLSNSTNRGSVAAKKFKDIIHYDPTKQDHATYERKRDDKPKESKAK

SEQ ID NO: 14639 - DNA, 2921 bp, Homo sapiens
  CDS (511)..(1716)
gaagatgcacctagcaccaagctccagggagaggtgctagccctggaagaagagcgggctcaggtgctggggcacgtggagcagctcaaggtccgtgtgaaggagctagagcagcagctgcaggagtcagcccgagaggaggcagaggccctggggactgagacaaagctctttgaggacttggagttccagcagttggagcgggagagccgcgtggaggaggagcgcgagctggccggccaggggctgctccggagcaaggctgagctgctccgcagcatcgccaagaggaaggagcgcctggccatcctggacagtcaggctgggcagatccgggctcaggccgtgcaggaatcagaacgcctggcccgggacaagaatgcctccttacagctgctgcaaaaggagaaggagaagctgactgtgctggaaaggagataccactcactcacagggggcaggcctttcccgaagaccacatcgaccctcaaagaggtttaccgctccaagatggatggcgaggccaccagcccccttccccggacccgcagcggccccctcccctcctcctctggctcttcctcctcctcctcccagctcagcgtggctaccctggggcgtagcccctccccaaagagcgctctactcacccagaatggcacgggcagccttcctcgcaacctggcagccacactgcaggacatcgagaccaagcgccaactagctctgcagcagaagggacaacaagtgattgaagagcagcggcggcgactggctgagctgaagcagaaagcggcagctgaggcacagtgccagtgggatgcccttcacggggcagcacccttcccagcgggcccctcgggcttcccccctctcatgcaccactctatcctacaccacctgcctgcggggcgggagcgtggggaggagggtgagcacgcctatgatacgctgagtctggagagctctgacagcatggagaccagcatctccaccgggggcaactcggcctgctcccctgacaacatgtccagcgcgagtggtctggacatggggaagatcgaggagatggagaagatgctgaaagaggctcatgcagagaagaaccggctcatggagtcgagggagcgggagatggagctgcggcggcaggccctggaggaggagcggcggaggcgtgaacaggtagaacggaggctgcagagtgagagtgcccggaggcagcagctggtcgagaaggaggtcaagatgcgggagaaacaattttcccaggcacgacccctgacccgctacctgccaatccggaaggaggactttgacctgaagacacatattgagtcatcgggccatggtgttgatacctgcctgcacgtggtgctcagcagcaaggtctgccgtggctacttggtcaagatgggcggcaagattaaatcatggaagaagcgctggtttgtcttcgaccggctcaagcgcaccctttcctattatgtggacaagcatgagacgaagctgaagggagtcatctatttccaggccattgaggaagtgtactacgaccacctgcgcagtgcagccaagagcccgaacccagccctcaccttctgcgtaaagacccatgaccggctgtactacatggtggccccatctgcagaggccatgcgtatctggatggatgtcattgtcacaggggctgagggctacactcagttcatgaactaactgccgtgggcctcctggcagagcacaactggggcttttgtatatgaagactttaatattctgtaaggagcttggtcctgtgagtttctgggctctggcctcctgaaggaccagccagaagaagaaaagtagaggtggctttgctgcctcctgggagcccagaacttgcagtaaccctttagggtcctgccccaggcccagccagggctgaggagctgtcacagagagggcctcagctctgacctgacacctgctctccccagcctgttttctctcttctaaaagacaaattatggtaccataagctgccaaagatcccctcctgcctcagacccctttgccaggggctttgggggctgagcagagccacatccagagtggggtaatagctcaggcggcccgcttcccatttctcaaaccccgctctgccccattgttctcctttcccttatactttttattaccttgctcaagggccagagatctcaagtgtcaaccttgaggtcccagctccatcccctagttgcagactcatcaccatggttaccatagtgactgcttcattgccatggttacatactaattgctgcagctctgtggcccagcccactgcttcagctgtgggccatctgagggtacgtgccatcatctctccagcccaggcccctgggcatctcatgctggggggaagggactgaatacctttttccttccccctgcctgtgtcttcagccctgatgcacaggctgccagccccccagtccagccctctcccttccactggtgccttgcttagagccagaagggatgaagccgggggatctatggaacagaggaggagcgatgcagttgggagaggaagctagaagggttatggttggagttctgtacagtgttgagtttccgacagggaaagaggattcctccaatgctcctagagagaaagcctgagcaggagatgatgcagcagaggggaagggccctgtggtgccgccgcccttccttcagcctccgaagggtgatggaaatggagagtggaggaccaggcctccagctgtctggcctcgcccttcacgccttaacactaagcccacctcccctgctctccttcccagcattgagcccttggttgcctgggcccaggctgggggttttcagtatttgtaagcatttcagcagaacaataaagcctttggactacg

SEQ ID NO: 14640 - protein, 402 aa, Homo sapiens
MDGEATSPLPRTRSGPLPSSSGSSSSSSQLSVATLGRSPSPKSALLTQNGTGSLPRNLAATLQDIETKRQLALQQKGQQVIEEQRRRLAELKQKAAAEAQCQWDALHGAAPFPAGPSGFPPLMHHSILHHLPAGRERGEEGEHAYDTLSLESSDSMETSISTGGNSACSPDNMSSASGLDMGKIEEMEKMLKEAHAEKNRLMESREREMELRRQALEEERRRREQVERRLQSESARRQQLVEKEVKMREKQFSQARPLTRYLPIRKEDFDLKTHIESSGHGVDTCLHVVLSSKVCRGYLVKMGGKIKSWKKRWFVFDRLKRTLSYYVDKHETKLKGVIYFQAIEEVYYDHLRSAAKSPNPALTFCVKTHDRLYYMVAPSAEAMRIWMDVIVTGAEGYTQFMN

SEQ ID NO: 14641 - DNA, 1480 bp, Homo sapiens
  CDS (83)..(1132)
gtctaccttccggaggcccacatcttgcccactccgcgcgcggggctagcgcgggtttcagcgacgggagccctcaagggacatggcaactacagcggcgccggcgggcggcgcccgaaatggagctggcccggaatggggagggttcgaagaaaacatccagggcggaggctcagctgtgattgacatggagaacatggatgatacctcaggctctagcttcgaggatatgggtgagctgcatcagcgcctgcgcgaggaagaagtagacgctgatgcagctgatgcagctgctgctgaagaggaggatggagagttcctgggcatgaagggctttaagggacagctgagccggcaggtggcagatcagatgtggcaggctgggaaaagacaagcctccagggccttcagcttgtacgccaacatcgacatcctcagaccctactttgatgtggagcctgctcaggtgcgaagcaggctcctggagtccatgatccctatcaagatggtcaacttcccccagaaaattgcaggtgaactctatggacctctcatgctggtcttcactctggttgctatcctactccatgggatgaagacgtctgacactattatccgggagggcaccctgatgggcacagccattggcacctgcttcggctactggctgggagtctcatccttcatttacttccttgcctacctgtgcaacgcccagatcaccatgctgcagatgttggcactgctgggctatggcctctttgggcattgcattgtcctgttcatcacctataatatccacctccacgccctcttctacctcttctggctgttggtgggtggactgtccacactgcgcatggtagcagtgttggtgtctcggaccgtgggccccacacagcggctgctcctctgtggcaccctggctgccctacacatgctcttcctgctctatctgcattttgcctaccacaaagtggtagaggggatcctggacacactggagggccccaacatcccgcccatccagagggtccccagagacatccctgccatgctccctgctgctcggcttcccaccaccgtcctcaacgccacagccaaagctgttgcggtgaccctgcagtcacactgaccccacctgaaattcttggccagtcctctttcccgcagctgcagagaggaggaagactattaaaggacagtcctgatgacatgtttcgtagatggggtttgcagctgccactgagctgtagctgcgtaagtacctccttgatgcctgtcggcacttctgaaaggcacaaggccaagaactcctggccaggactgcaaggctctgcagccaatgcagaaaatgggtcagctcctttgagaacccctccccacctaccccttccttcctctttatctctcccacattgtcttgctaaatatagacttggtaattaaaatgttgattgaagtctgaaaaaaaaaaaac

SEQ ID NO: 14642 - protein, 350 aa, Homo sapiens
MATTAAPAGGARNGAGPEWGGFEENIQGGGSAVIDMENMDDTSGSSFEDMGELHQRLREEEVDADAADAAAAEEEDGEFLGMKGFKGQLSRQVADQMWQAGKRQASRAFSLYANIDILRPYFDVEPAQVRSRLLESMIPIKMVNFPQKIAGELYGPLMLVFTLVAILLHGMKTSDTIIREGTLMGTAIGTCFGYWLGVSSFIYFLAYLCNAQITMLQMLALLGYGLFGHCIVLFITYNIHLHALFYLFWLLVGGLSTLRMVAVLVSRTVGPTQRLLLCGTLAALHMLFLLYLHFAYHKVVEGILDTLEGPNIPPIQRVPRDIPAMLPAARLPTTVLNATAKAVAVTLQSH

SEQ ID NO: 14643 - DNA, 3686 bp, Homo sapiens
ctcggcgtcgctctggactggcgcaggcgcaagccggcaagatggcggcggctggggctttccgtctgaggcgggcggcatcggctctgctgctgcggagcccccgcctgcccgcccgggagctgtcggccccggcccgactctatcacaagaaggtagggacaaaagaggggacgcgcggaatgccgactcagcggaggcctgggctggaggggcggccgcggggttctgcgcagctaggactgggagctgtcccctcccacgtctttgccctgactcgctttcccttgctgcgcagtgaggctcactgcaactgataaacaacagttaccgctcatcgggcggcgacttccagggggccccgccgctggccgcgacttcgtgcgtcccaattttaaattcgccaacagcccaggaggcagggtcctgttgggacttgtctttctgagtccagggacagacacacccccggagcgggctccggcttcagccactccgctgccctggccagatgaccttgggctagtcactgcgcctctctgaacctgtttccccaggtgtaaatggggggctctcagctgtcccttacaaaggatactgtgcgtggagtcctggcatggttcctggcacataggccccagcacgaggagaccgtttctgttactgctttaggagtgcataggggagtcaggcttgtaaccaacatgcgtaatgtttttgttttgtttggggggttttttggcggggaaggagggatagattcatagtctgcagccccttgctgtctggtggcacaaagtcccccagacgtgagactcccactcgagaaacaactaaagaatgccataaatcaacgtggcacaaaaggcccctacattagatactatcctgaggtcccttttacttggagtcaaaatccttagtcagatggggggaaaaggggactggaagatcggcgtgcttactactaaccagtaaccaaacctcaaggttattaaggccttctgtgtgccagttcgaatggatgtttattgtgatctggcttctgccctttctccaagggcttcttcactcctccccctcccgggggtgtgttttgttgagggtacaccctgaagaaacttggactagcagcctttcagcagccagggtgcgctgctgcaccagggtgatgacaggctgtgaaatacggtaatggcactgtttttattttaaaagacacataaacgtacacattccatagcattgttccctgtgtaacagtcaccttaaggcttctaagaaagctttccctccctgggccatggttatttttagaatttttaaatagtaatcatcctttgaggatggattttatttgaaaataacaaaactgctgtttgagcccaagtctggtgatgtaggtgggtgaaagtcaagtatttttgtaaaaatcctatggaactaagacatgatttcactgatttttttttcttctaggtatctcaaatctgtgaagtattgtagaggagacacaaaaggaattgggggtcacaaatggttctcattgacatgagtgtagacctttctactcaggtgaaatttggtatttagtgattgcctgccaggttcaagatgctgaccgaggagcttaccatcaaaccagagaccagtaccaatagagagtgaacatgatttatcttaaccctctcattttaggttgttgatcattatgaaaatcctagaaacgtggggtcccttgacaagacatctaaaaatgttggaactggactggtgggggctccagcatgtggtgacgtaatgaaattacagattcaagtggatgaaaaggggaagattgtggatgctaggtttaaaacatttggctgtggttccgcaattgcctccagctcattagccactgaatgggtgaaaggaaagacggtggaggaagccttgactatcaaaaacacagatatcgccaaggagctctgccttcctcccgtgaaactgcactgctccaaatctgtgctgtttccagcagaggagaaaactcagctttcgccataatcctgtttcctgtgtatttcttcacttcctgtctggatggtattcctgtcggggtctgcatctgtatatatggaacaactaagcccagttgtacaatgtccccctccctgctatcctaaaaaaaagcccagatgccttaagacttgtacttggctttccagtttggtctctgtattaaatctaatgctttttccatcatttcttaaccttctcagggaaagaaggaatgagaaacattagccttaatgcatcgatggaggtttactaaccaaattagttaaaaatcagcagagagtcaggcctcttgccaaggtaatactcacagcagaagagccaggtgccggggcagacacactaactcattcttcaggaagcctggtcagacctaagttctttccacttgatctggaattttaagtacccataaagaaaggtcatcacttgtaaacattttcacatggtttcaggaaatccccagcccttttattaggcctttttaggtactgaaacctttagctgatgttctctgttatttgcttgctttctgctgtcattccagctctctcagtttttattttccccatagcctcactttgaatattgactcctaaataaaagtggtcaaactctcgatcactagagggtgatgtggcaaatgccatcccatcaacagattgacatgatcttttttccaaagggcatgtcaacttttttatcatgacaagattttgtccaaagctagactttgatgggagcaggcaagaagtaacatttcctgtgtccctactatgtgtcagacatcttctgtaagtccccacactatcctggcaagaaaagcatgattatcccagttctatagaagagaaagtagggtcaaagaggctaaggaactagcctgggatcacagatttttaaccctagtctgtctccaggatcacccgcaggagtaactcagctcaggaagcagctgctgacgtgcccagcaactcctcaccccagctttctggcttggttactccattagtccccaccagcaccacttcctcccagctcttaaagattctattcccaagtccatttctttcacatctagaaacttaggcttctttccttccgttacttccagtgctggctgaagatgcaatcaaggccgccctggctgattacaaattgaaacaagaacccaaaaaaggagaggcagagaagaaatgagccctccctcggcgaagcctccagcaggccacaccagctgtttcccacctgctgtgcagtcaccttagatgttcagaagccgcttcctctccactgaagagctatgagatacgcacaatacttgctgttcacgttatgactctcatgcaagcaaaatacacagtttcattgttctgaatcctgtggtttctttcagcccacttttatcgccttaacctagttaatgtatattttgaattgtgtgtatgacctcagaactgaaattgataatgaagttgcaagttttgatagcccgtgaagtgcataagtatctaattttacctgaattgatttggggggaaattaccagtagaatgccttggtctgaatatttgatagaaccaattgttgtacataaaacagattgcgcatatatatatatgtat

SEQ ID NO: 14644 - DNA, 3520 bp, Homo sapiens
  CDS (163)..(627)
aactgcgggcggcgcagggcaggggcagtcagggagcagcggcggcagagacagggccgggcgggcgccgcctgcggagagcaccgggaggcgggccctgcgtggggccgcgcgcagcagcggcgacgactttatctgggccgcgggggacagcgcagggccatggaggaggcggccgcagctccgatttctccgtggacgatggcagccacgattcaggccatggagaggaagattgaatcgcaggctgctcacctgctttccctagaaggtcaaaccgggatggccgagaagaagctggctgattgcgagaagacagccgtggagttcgggaaccagctggagggcaagtgggccgtgctggggaccctgctgcaggagtacgggctgctgcagaggcggctggagaacgtggagaacctgctgcacaacaggaacctctggatcctgcggctgcccccgggcagcaagggggagtcccctaagactacgccatctccaagtccgaggtcctctcccagattgaacaagggaaggagccctgcaactggcgccgccctgaccccaagattccagatgttcctgtggaccccagtccagatgcagaaactgaggcccagcagagattgagtaacttatgcgagttgtcactcacctcacacgccccagcaagcatccaggagagcctgcctcttggaatagaaatcagacatcccacaggaactctgaggttttcccactgctgccagatgtatgcaaggaacacgtgatcttcgtaattccagagcggggcaaactgcttggcacctcttcaataggtgacattcaatgatagatctctggcttcctgctctgtttgttctggttgccctggaaagcctgctgctcagcccatgccccgggacttcctccaccctcaccaggacattctttccatctcttgtctcctgtgtgcaagtccctttctcctggattccatgtcttgaatgtttcttaatttacttcctcattttggcagaggatgtcctccagttgttttctgggaatgctaatatgcaagtgaaccagtgacctgcagttctgcccacacagggttaataaccaatcagattctctcttttcaagatggttaacataacagacaccaagaaagggaagaggagccgacagcagagggggaagctgaaaagacgcacaaagaatggccataaaagatatgagcaaccccagctttccagacagtcacttttcccagtggtcatacctggtctggaagattccccatcatctcgaataaagctgttgttgcttttaactccatggagagaccgaatggagtgagcccagcagggcatgctgggcaagagaggtcccccgagtcccaaataagaatttcaactagtataaaacgaggcagcgaacccacacgtggaagtctgataccgcttgcagaagggaattgaatagatgtctccctattggtaaggatgtggttttattgacttgaaataacaaagcccgcaagcaacaactgatcatccgcgggatgctgccacaaggaataattgagcactcattcagacacaggggaaaccactgcctctttcagtctttctcccagattccaacagtcagtgttacagcatttcaccttgttcacctccctgagaagacgttgcagctcactcaccccagtgggcactgggagcctctgctcaggtgggagacagatgccccccacacgcacatctggtgtttatgaagcagatactggggcttcataaacacagaaggggcagggaagtagccccagggcatagtgtggggcctcctgactaaaagtagcttgcaaacccctgcctataacagccacttcctggcggtcattgtgccacttaggagccctcctcaccgctcttcctttagttccttcactctgtatagaccctgccagagcagctcagggtggagcagctgcagccatgggacctgctccaggcaaggccctatgctacacagtccctgggggtgaggattccagaggagtcaattccctacccgcccttccaggggatggccgagatgagcgttcccacagggaaagtgaaagttgcaaggctgttgcggaaacaccaggggttccatctaggtcttgctgctcatctcacagaaagccagtcactgagacaagtattgtcagggaagaaggctttatccaggtgctacagacagggtgaacaagagatcagtctcaaatccatcatcatcaactgactaaaattaggggtttatatagcagggaagaaatgtaactacatgtgggaaaacagggattaacgaggggcaaggaagaggagttggccaacaggcagcaggtggtcacctggagaatcatgatgggtgaggggtctggcttctcactttccagatgtggggatctggtaaatttcagtttcttgataccgtctgggaggattgctggctggtttcctgagaaaggaattcagatgacataaatgtaaatttctccttgggtttcaagactgagagggtcaatttctaggtttattcaagaaaaaccataaacatcagttctatgggacaattgggcccatttcaaggctctgaggataagggttaatgaggggacagagtcgcctggagaagttcactggggcctacaagaaactagagaggcttcctggcaaagctctatgctgtctatcctctcttctctccttgcaggaagattccagtataatagacccgaggtgaaaaggcttttgttcaataagtagaaaactgaaggggggtgggaggcacatggatttgaaccagagaccgcttggcctgcaggcaaatgctgtaccttcagttgcacccctcacttgttacagctgtttctgataagcacttgtgcagccccatcagcacctcgatttcttcttggtgagtccatgggaacagccccactgcaaacaacccattcctgctctcctctttcctctaaacctcaacctcctcctacctggcagtccacaggcctacagcttctcctcagtgggaaagacatcagcttggaaaaccacttggaaagccaacgttatcctagaaaagctttttaaatgacccagcaggacaagtctccggatggccttggccaacccggtgcttccctcttttcttggttgtagttctcagaataactagagaatgtactgggagtgttgtcctgagataaggaggaactgtcctaaacctggactctgttcccatcacacctagaacaggatgtcctgcaacgctttagcccaatgatccaagttgcccttggggtataaaacttgacagcagagggcgttcagggtccctcagctgcagtgtgaagtgggacacacaggtgagactccatctgccctgggcaggttcctgagccttgggggaccagttcaccctacatcccaggcttctgttgtcccttgcctgcctgtaaggaataaagttgctttgcttaacttgc

SEQ ID NO: 14645 - protein, 155 aa, Homo sapiens
MEEAAAAPISPWTMAATIQAMERKIESQAAHLLSLEGQTGMAEKKLADCEKTAVEFGNQLEGKWAVLGTLLQEYGLLQRRLENVENLLHNRNLWILRLPPGSKGESPKTTPSPSPRSSPRLNKGRSPATGAALTPRFQMFLWTPVQMQKLRPSRD

SEQ ID NO: 14646 - DNA, 1690 bp, Homo sapiens
  CDS (19)..(1014)
atcgttttctctcgtgcaatggcgtccgggctggtaagattgctgcagcagggacatcgctgcctcctggctccagtcgcccccaagctggtccctccggttcggggagtgaagaagggattccgcgccgccttccgcttccagaaggagttagagcggcagcgccttctgcggtgcccgccgccgcccgtgcgccgttcagagaagccgaactgggattaccatgcagaaatacaagcttttggacatcggttacaggaaaacttttccttagatcttctcaaaactgcttttgttaatagctgctatattaaaagtgaggaggccaaacgccaacaacttgggatagagaaagaagctgttcttctgaatcttaaaagtaatcaagaactatccgaacaagggacatctttttcacagacttgccttacacagtttcttgaagacgagtacccagacatgcccactgaaggcataaaaaatcttgttgactttctcactggtgaggaagtcgtgtgtcacgtggctagaaacttggctgtggagcagttaacactgagtgaagaattcccagtgcccccagctgtgttacagcagactttctttgcagttattggagccctgttacagagcagtggacctgagaggactgcacttttcatcagggacttcttaattactcaaatgactggaaaagagctctttgagatgtggaagataataaatcccatggggctattggtagaagaactgaagaaaaggaatgtttcagctcctgaatcaagacttactaggcagtctggtggcaccacagctttgcctttgtattttgttggcttatactgtgataaaaagttgattgcagaaggacctggggaaacagtattggttgcagaagaagaggctgctcgagtggcccttagaaaactttatggattcacagaaaatagacggccgtggaactattccaagcccaaagaaaccttgagagcagaaaagagcatcactgccagctagccgccatggatgcagcagcctgaaacttgagagcgaaagtgagataaatgtcaaaggtgtttcaagccagacattttcacaattgtgaagaaatagatgttttgtttctgttttttactgtgttcccaaaattaaataaatgttaaccaagtcacagtgtttttggttttgtttttctgaaatcttggtttgatcaaatctttttttttttctcttgagatggagtcttactctgtcgcccaggctggactgcagtggtgcgatctcggctcactgcaacctccacctcacaggttcaagcgattctcgtggctcagcctccctagtagctgggattacaggcacacaccaccatacctggctaatttttgtatttttggtagagatggggtttcaccaagttggctagactagtcttgaactcctgacctcaggtgatccacccgccttggcctcccaaagtgctgggattacaggtgtgagccactatacccgaccagatcaaatctttttttgacatttttgcaaaaaaattttcctaatgttcttgatttaattgtatagaatttgtataattaggtgtattttatttgcctctagctttgaggtatcttaatttatgtatcttatgtgaattttttgctgtaataccaataaagttttttttctccac

SEQ ID NO: 14647 - protein, 332 aa, Homo sapiens
MASGLVRLLQQGHRCLLAPVAPKLVPPVRGVKKGFRAAFRFQKELERQRLLRCPPPPVRRSEKPNWDYHAEIQAFGHRLQENFSLDLLKTAFVNSCYIKSEEAKRQQLGIEKEAVLLNLKSNQELSEQGTSFSQTCLTQFLEDEYPDMPTEGIKNLVDFLTGEEVVCHVARNLAVEQLTLSEEFPVPPAVLQQTFFAVIGALLQSSGPERTALFIRDFLITQMTGKELFEMWKIINPMGLLVEELKKRNVSAPESRLTRQSGGTTALPLYFVGLYCDKKLIAEGPGETVLVAEEEAARVALRKLYGFTENRRPWNYSKPKETLRAEKSITAS

SEQ ID NO: 14648 - DNA, 2581 bp, Homo sapiens
  CDS (1668)..(2018)
acattgcagccttctgcaaggatggggtggtactgtccttctcacttctcattctcttccattttaaaatgataaacctgggtcagaggatatttaggaagaggcattgtcattaagtccaagacaagatggtcagatttgttatcctagtgggttacaatccaaaatactctggagcatgctgagattaaggtggttgccaagggaacagaaaacagccatgagtaaataaatcaagactttaaaggatttagatcgggtctatggccagttgcagagtgggcaggatcttaagacccgataggtgcagaacccatctggacacggagaccaggaatggagttccatggaggcctggctggcactgcacccgggcatgaggacacatccagtaagaagacctgcctcaagaggtgcactgcggtgaccagtggaggtgactggttggagcctggaattggaagcagattccaagctctggtggacaaactctccaggcctggtgggaatcacagctggggcagacctcatcctggctgcctggccacaggcccccactctctgccactggtggtaggacgatgcctgtgtggagagctggcttctctgctcccgcctggtccaccacttggctagagttcagagacaggaagtgattggtctaagctaacacagcaagttggtggcagacctggttctagaggcaaaaccttcttccagatgtgaatgaaacctgcaggcttcattttcctttctgagcagtgcttcttagctctttggagacacgaagcccttggaaaatctgatgaaggttacggaccttccctaggaaaacagataactgacgtagactcaaaaaccccaagcaatttcaggagccactggactccctgaatgaaacccatccctggactccaggctaagaacctcagccctggggacttcacctgctgccctttccttacctgtcacacattgagccccgagtcaaggccactgtacaagtagtgcccctccctccccctggccaagcctccttcccttgttcaggaataaagaattccgaggagccctttttagtcattcccttctcccagacctaacgaatggtgcgtcaggtttctggagcctcatttcccttccccagacattggcagaggtcccttgggctagattttctcttctggttttgtttcttgttctgcctgactggccgctggcttccacaaaggagccctttgctcctggcctgggctctgatttcactgtgtggtctcaggggaagctggactgctgtggacgctggtgggagcttgagtctggtctgagtctgccccaggaagaaagaatcctgcttccaccaaccaagcccagtcagcggttcctcccaactggccaagtgttcagcccagtgggctggggaggaagaggatgagggcctcgctcctggtgcctgtggctctgggcagggtgagaggtcggtggaggatctttctgtgtgttctctgagtatgcagcagtgcagttgaagggaacagggcccaggcaggcagcaggacgaggactcctcccatcttcacacctgaaccagtcagcctggaagctacaagttctcacctgcctccccagaatgaacatcagaaaaggcaaaactgaccagggctgggatgggtttgggtcagcgtggttggagggcagcctgtggatccctgcactggagtcttgctgtcttcgatgcaggttggatcatacattgttacctcctactgtatgcctcaccctggaatagcagaatgctcagggggagatccgagaacgagaaggtgctcccagccccaggagcttccagtctggctctgatccttggccgacctagaggaaacctccacacacgccccttttgtgctaatggtgcagtttgtgtccccctctgcccatcactgtgctgtgcttgttcctgcctctgtgccttcccctatactgctcggacatgtcccctttcctctcctctacccagctaagcccttctgatccacggggcccggcttcccaaaccacccagcccacattcctccttcctgctccgaacaggtcccgtgtgagcccctgcccccgaattgcgtgctgtcccatggacgctccagtctcttccgtgtgtgtcttgagtccctaactagacagttagctccctgagggcaagggactgtcatttcctcttgagtcctaccagggtctagcacaggactgggctcctaactctcaggaaacacttgtcggctgactggtgcctcaagcgctggagcttgtcggtggccggtaatgggcagtgcacgtggggagagggtatgtgagttaactcaagggtgccttttcttgggctgtgggctggctcccctgggtcaaaagtggatgtcggaggcctcaggcttttacctccttggggcagtgggagcatcagggacccccacccccaccccggctctgcaggagtgcacggaagtggtcgtccagcctggatatttctacaggttgctgactcctgcgggagctgactgagtggaataaatgttctctcaacatc

SEQ ID NO: 14649 - protein, 117 aa, Homo sapiens
MGLGQRGWRAACGSLHWSLAVFDAGWIIHCYLLLYASPWNSRMLRGRSENEKVLPAPGASSLALILGRPRGNLHTRPFCANGAVCVPLCPSLCCACSCLCAFPYTARTCPLSSPLPS

SEQ ID NO: 14650 - DNA, 2512 bp, Homo sapiens
  CDS (377)..(748)
caatgaatggggagtaaatacacagataatccaaaattgatgtaagcattggaaggggaaagagggaacgcttctttccctctgggcttggtcatttcctcccaagcaaaccccgcgacgttcagccgtcttcctcctatgccacgtgctctcaccagaactgcagcaaaactgcattttatgtcctgtgtctaaagctaaacacatgttcctgtctacttttgctttgttcctgtttcccttctgtgaggaccttcccctcctcagatgtggggagttgccgcctccacttgcattacatgtatttcagagtaggtcctaggctccccttacacctctggtcacgttgccattattcctatggtagataaaggggatgagaaagaacagagctccaggcctttttcaaacaaactggttttctcagtatagccctatgctcaaaaggagtgaggacaggtatgtgactgccataaggagctgtttgctttgcacagagaaatctaatctttctcctgctgggcagctcagtacagatgtcccctcactgctggaagaaacacctgcccttgcttgttctcctgatggcccctcacagtcaggtgtgggatggcacatttctaggtgctcctcgccgagctgtcatgggcttcagtcttgggcctctgcagctggctgtgaccaggtggaaactgtagccttggctgacccagagaaggaaaggaggcagtctgccgcttggctgatttaggagttgtgctgaattcctgcccatctgttctcccagctgagccaaggccaaagctgtctaccttttgccaacctaaggaatgacacagagcatggagcaccatcactgaaacatctgccccagtgccctgccaccttcgtcctcactgacctctgcagcctctctcatctgccaattttgattccgcaaggagaggtggccctgggctcacagctggtgtttgtccacagatgttcatgggtttctttgtgttctctcattttttcaaagctgggtgttgggaccaacatcaccactgacattctgtggctctaaacaagtcctcacgaccacttctcagttttctcatctttatgaagtatggagtaatccccactagccttatagagggactgtgtgagaagggaagagactgctattgtttgccctatatccacctacttccctagttccagaacgctggactttaatgagataacaaagtacctagtaaaaacactgcatcattttccatcccccaccccttgcagtaaaatgtggcccatgagacagaagcactaactactgagcaggacttctaggggagttctttaaaactcagaggagcaccacttttaccttctgctcttccctttttcctgcctggaacgcagaagtgatggctgaagctcctgaggctataagctctgtacgtaggagagtggtgaagaaaggagcttggttctgcaaggatgttgtagagctgccataccagtcctgcatggtattcctgtgcactactgttacgtgaacacacaaacacctaatttgtttaagccattaggccaggcctctattagccattcctgactgatacagaagacaaaaatggcatcacagactcctgaactccaaagacactgcctattctttcgtctgttcttggcaagcaccaacattgagactgtacttcagggttgatgctggccatttggtggcgtgaggagtgggcactcacatgtctctgctagcagttctgacgtgtccattccacactggatccatagaacgagggaacacaagtgtcttctcataagatttatagaaacagtgatcgttgcagaaaaataattagcaagagaacagacttcagctctctgaaggctgatgaccacctgtttctcatctcttctagtgtatgtcaaagctaaattaggtcaaataggaaataagtcagaatccccaattcgatagaaacttacaggtcttgtgatctaatctgccacttgatccgtgaattacctataggtcatccctaagaggtggcctccagcttctgcttgaattccttcaaggatggggtgctcattgtggcttttctaatcatctctgattgttagaaacactgtgaaacttttatccatcagtcctgtttctgaagctgtacggtacaaattttttttttccccacttaaggctcaactattggaatacatctaccatgtctcctatgaaacttgcttctccaggccaatcatccttacttccttaaactttttttttttcctgaaaagttattcttttaatcttattaaaaaagcaacccatgcccattccacaaatacaagtgaaatagtgaaaaacaaaaatcaaactacatctatttggtgatcattattaatgtcttatgtttcctcccagattgttttctgcatgaataataaccaacaatgtgtgtgtatgtatatatatgcttttgcattaaaaggtggttttgaaggt

SEQ ID NO: 14651 - protein, 124 aa, Homo sapiens
MRKNRAPGLFQTNWFSQYSPMLKRSEDRYVTAIRSCLLCTEKSNLSPAGQLSTDVPSLLEETPALACSPDGPSQSGVGWHISRCSSPSCHGLQSWASAAGCDQVETVALADPEKERRQSAAWLI

SEQ ID NO: 14652 - DNA, 2098 bp, Homo sapiens
  CDS (248)..(1033)
atcttctttaacatcaaggcctgtggaaaccactttggaaaataatgaaggtggacaagagcaaggaccaagtgtggaaggtcttaatgtaccaacaaaggctactttagaggtatcctctatcataaaaaagaaaccaaatcaagctaaaaaaggccttggggccaaaaaaggaagtttgggagctcagaaactggcaaacacatgctttaatgaaattgaaaaacaagctcaagctgcggataaaatgaaggagcaggaagacctggccaaggtggtatctaaagaagaatcaattgtttcatcattacgattagcctataaggatcttgaaattcaaatgaagaaagacgaaaagatgaacattagtggcaaaaaaaatgttgactcagacagactcggcatgggatttggaaattgcagaagtgttatttcacattcagtgacttcagatatgcagaccatagagcaggaatcacccattatggcaaaaccaagaaaaaagtataatgatgacagtgacgattcatattttacttccagctcaaggtactttgacgagccagtggagttaaggagcagttctttctctagctgggatgacagttcagattcctattggaaaaaagagaccagcaaagatactgaaacagttctgaaaaccacaggctattcagacagacctactgctcgccgcaagccagattatgagccagttgaaaatacagatgaggcccagaagaagtttggcaatgtcaaggccatttcatcagatatgtattttggaagacaatcccaggctgattatgagaccagggcccgcctagagaggctgtcagcaagttcctccataagcccggctgatctgttcgaggagccgaggaagcagccagcagggaactacagcctgtccagcgtgctgcccaacgcccccgacatggcgcagttcaagcagggagtgagatcggttgctggaaaactctccgtctttgctaatggagtcgtgacttcaattcaggatcgctacggttcttaatactgaagtcatgatgtgtatttcctggagaaattcctctttaaatgaacaagtaaccacatctcaggcggcagtgaagtccagatagttttgcagattgttttgctactttttcatatggtatatgtttctgatttttaatatttcttttgagaaattctgagttctgatgtaggagctttcctgtgatttctgtttcacgttccttcctgtcacaccctcctttggcgtctctgtgtatatccttgctttattttcttggaacctttggtttcaacactgagggcctggagacctcggctcctcctgctcctgaaccaggaggcttcatgtgggggaggaggagaggtctccatgtgacacatgggctcagggctgccagaatcagcggatgctggatgggcctgcagaaacaacactcaccacacacacttccttcaaaagaccaaaagtgactggtgtctcgtgtgacagattgcttcatttatgtttctacatagtaaggtgactgccaaataatatttgaagtcatctgtctctttgtaaattattttatatgacctataaatttaaaaatgtttttcagtgagtgcttttaacaaacttaagcttctgccctgccaagggaattaatgttatcttgtgaaaggtgttgctgtttgaattgatgagaaatggaagatgagaactccctaagagttctcataataaatcatctcatcacaaatcaatacgatatacagagttaaagtggaatgaggtaagaagatacagctacagaaaatagttgcgtgtatgggagaacagtcattgtaattgggtagttttgttaataaatatttttaaatcttgcttttcagaaattaccgaatgtgtataaacaaataaagaaaaataatttagctgtgttttagacagcattagaatatattgttcagcacagtaaaatatatttgaaatttgataagccaaaaatgtggttttgaatgaatattttgtgaatctttcttaaaagctcaaatttgtagacttctaaatagaataaacacttgcagcagatgg

SEQ ID NO: 14653 - protein, 262 aa, Homo sapiens [sequence omitted]

SEQ ID NO: 14654 - DNA, 3072 bp, Homo sapiens
  CDS (133)..(480)
ctctggagccgcgactgcccggggttgtgccggccgccgctgccgcccaggccgcctcagctctcctctgcgccggcccgctcactccgcccggccccagccctagcgctggccgcgaccccggcggagatcatgaatcagacagataaaaatcaacaagaaatcccatcataccttaatgatgaaccaccagaaggttcaatgaaagatcacccacagcagcagccaggcatgttgtcccgtgtgactgggggtatcttcagtgttacaaagggagctgttggtgccaccattggtggtgtggcttggattggtggaaagagtctggaagtgaccaaaacagctgttacaactgtgccttccatgggaatagggctggtgaaagggggtgtctctgctgtggctggaggtgttacagctgttgggtctgctgttgtaaacaaagtgcccttaacaggaaagaagaaagacaaatctgactgaaatatagagatacacttgcgctccacagcactgtaatgccagtggcattgaattgctaaattatggactacaaccaagtcaactgttttggacgtttatcttctaaactgctgtgttgaaagtattgatgactggctttcatctaaaaagaagagaccaatacgagcacagtatatgaaggtttctcatacttaagttccaggtttttatctggtaaaatgttacacttactcggttgtaactgaagatatggtatgtttgaatatttactataagtctttcagtttgactaaaaatgtgaaagttgaatttagtagatgatcttcacagttccatatgtataatgtgccaggtaactcacctgccccttaagaagggaaccttgaattacataagccgtacctttgatgtgcctaatagtttcagatgtcttagttttttataaccatagttgattaggccaagaggcattcatttcttatttaagctggcaaaattagcaggaattagagaagtttaaaaagataaatggttttatgataatgttaaccatcttttgttagtaaatatgcgttctattattttaatcattgatgccttacaaaagaaaacatcttttctaataccctgaatatgtgctgttcttagaatcatctatggattcttttaaaggttgtttgtgaaattagttttccctttttagaatctcaggagtagtggggtaaagacatttcctgctgtcagtggataagacagagcttgttaactgttttggcagtagttagaatcaaattgtacacttctcagcctgggttcatgcttcatcattaatacacctcacagtgcctaaggaacatttacttactggtcagaaggtattttggaagagtttcatattaaggaggaacaaataataattttaagttcttaaaaattacctaaaacaccccaagtataaaaagaagccttcacacctattctgtctttaggatgtcttaaattattagcagtactcctttttttaaaaacactgtaaaagtaaccacaaatatgtgaggacttactattttaaatggaatggaatgagctccatagattagttttgaatataaagtatataaaagtgcatcagtggtttatataggctttaaaaacatgttatcttacagtcctttaaagcagccatagagtttgtatcatttttcaagccaatttcagtcagggatttgaattgtttgattatggatgataaatgtgtcatatcttattaatatgtctcatgtctcgttccttcttaatatgatttagctggaattcattttcttttcgtttcatgtttaatttcataaaacgtttaacaattggcatatatacttggcattcctgtccaccaaggattgtaatccaagcctgggaaaatcttaaatttctttttacttaaatctggaaatttgtctccattctgccaccttttttttttttttttttatagtggaggggaggaaaggggggtgataccttgcagtaagtaagtcgaaatagcatgcctgaaaatttgaaacagaccattctaacacccaaggcttgtttataaaatacttgagaattacattaatgtggaatcaacagatgcagaagaatataacataacttttaaaagctttcataaataccagcagcaattgtaagcaaatctacaaaggttcttgaacctttctattatatacaaaactgaaaagtcattaaggagttcaactaatcaggaattaaatggtcatttatttcatgcagtatgatttaaggtatttcttgagattctggtcaaatgtcataatcagcaaacgggattaaaaaaaaactccaaaatcactaaataattatctaaataatggtattggagaacttgtttcctgctatttggaagagattgttgcttcattgctagtttgtatttctaacttctacagttatagactccactgtgctttgtgtctgaatttctcagtatagacattttgtttactgtatgcttgcatatttattttcaactttgcctgtctttaaaattgcttgaggaaaaatggttgtaattaatttctgctacagaaaagccacctggtacgttttgtctcatcaggattgttttaaattctaaactataagtttgttcagaggggcttttgcaatgatagcagaaaactgtacaaatgtacagttagttatagaggttcttgttgaaatgaacttaccatctgatgatatgtatgtgcagctgtgtacttgagtcttttttagtttacttagaaagactagcagtttgacctgttaaacaggactagttcaagtcaagaaactaaggttgttgtatacacctggaggcatctgttattcagcttatcctttgagtgggtatttggcacaatgaggataaacttatgtgacccacttgaatggctgatctaataatgttgacattatgcattctgtacttagtgaaatgtcagatgaaaataactgatgaataatttttttgtattaaagggatgggaaaagaacacatgaatttgttaataaagcactatgatctgc

SEQ ID NO: 14655 - protein, 116 aa, Homo sapiens; identical to SEQ ID NO: 13579

SEQ ID NO: 14656 - DNA, 1828 bp, Homo sapiens
  CDS (284)..(1537)
agctggagcgttcggtggacagtgagcatgcgtaccatatctgaagttcgtaaattgaaattgaacatgcgtaattaatctttctgaataggaaaaaatatatacacaacaaaactctccgtttatggaacatgcgcatttgttctcagtaagtttttcgttttgaaagtgagcatgcgcatggtgagtaggttggtccgaagtttgaaccggacagaagcgctggtcggcgtctggcggttgtttttagagtgactcacacagttcccagggactctgctctatgagagagaatgaggcatatcaagcatcttgcaaagaaagattcttcagtgaggaggagaatggagttccaattgcccgggctgttcttgttgacatggaacccaaagttatcaatcaaacgctgtcaaaggctgcccagtctggccaatggaaatatggtcaacatgcatgcttctgtcaaaaacaaggttctggaaacaactgggcatatggttactctgttcatggacccaggcatgaagaatctataatgaacataatccggaaggaagtggagaaatgtgactctttcagtggttttttcatcataatgagtatggctgggggcacaggatcaggattaggagctttcgttacacagaatttagaagatcagtactcaaactcattgaaaatgaatcagattatttggccttatggaactggtgaggttattgttcaaaactacaactccattttgacactttctcacttgtaccgatcttcagacgccctccttcttcatgagaatgatgccatccataagatctgtgcaaaactgatgaatatcaagcagatctcctttagtgatatcaatcaagtcctcgcacatcagctgggaagtgtgttccagcctacttattctgcagaaagctcatttcactacagacgaaatccactaggagacttaatggagcatttagttccccatcctgaattcaagatgctgagtgttcgtaacattcctcacatgtctgagaattcattggcatacaccacatttacttgggctggcctcctcaagcatttgagacagatgctcatttctaatgcaaagatggaagaaggtattgataggcatgtatggcctcctttatcaggacttcctcctcttagtaaaatgtctctcaacaaggacctgcattttaacacttccattgctaacttggtcattcttcgtgggaaagatgtgcaaagtgcagatgtggagggatttaaagatccagctctgtatacttcctggttgaagcctgttaatgctttcaacgtgtggaaaacccagcgggcctttagcaaatatgagaagtctgcagtgttggtcagcaacagccagttcttagtaaaaccacttgatatgattgttgggaaggcatggaatatgtttgcttcaaaagcctacattcatcagtacacaaaatttggaatcgaagaagaggactttttagacagtttcacgtcattagagcaggttgttgccagttactgtaatctctgatcttgaacaatgggaaaagtataccttaaggcatttctggactaaaatattttcaatactattttctctgtaaagttttcaaagttctccatcctggctaacacggtgaaacaccgtctctaccagaaaatacaaaaaattagccaggcgcggtggcgggtgcctgtagtcccagctactcgggaggctgaggcaggagaatgacgtggacccaggaggcggagcttgcagtgagccgagatcgcgccactgcactccagcctgggcgacagagcgagactccgtctc

SEQ ID NO: 14657 - protein, 418 aa, Homo sapiens [sequence omitted]

SEQ ID NO: 14658 - DNA, 520 bp, Homo sapiens
  CDS (21)..(293)
aggccacttccggcgtagccatggcggctaacgctactaccaacccgtcgcagctgctgccgttagagcttgtggacaaatgtataggatcaagaattcacatcgtgaggaagagtgataaggaaattgttggtactcttctaggatttgatgactttgtcaatatggtactggaagatgtcactgagtttgaaatcacaccagaaggaagaaggattactaaattagatcagattttgctaaatggaaataatataacaatgctggttcctggaggagaaggacctgaagtgtgaatgagtttccttgacttacactagattttgttttggcttataatgacaagaaaatggaattttttttcccactttctaatgtttaaatcccataaagctaagtttcccgttaaagggaagtgctttgaagatgtgtacccatttttgtaagttaatcatgattatcctggaaaaagaagaaaagagcttcttctttgcagatgaaaataaaggtgtttttggtt

SEQ ID NO: 14659 - protein, 91 aa, Homo sapiens
MAANATTNPSQLLPLELVDKCIGSRIHIVRKSDKEIVGTLLGFDDFVNMVLEDVTEFEITPEGRRITKLDQILLNGNNITMLVPGGEGPEV

SEQ ID NO: 14660 - DNA, 1951 bp, Homo sapiens
  CDS (124)..(1005)
aaaaatttaactcagaagactcacgtgactcttcatggaacagaactgtgtgatgaatcctacccggctttactcactgacattcctgttggagacttacatccaggggaacagctggaaaaaatgttgtatgttcgctgtggaacagtgggttccagaatgtttcttgtatatgtttcttacctgataaatacaaccattgaagaaaaagaaattgtttgcaagtgtcacaaggatgaaactgtaacaattgaaacagtctttccatttgatgttgcggttaaatttgtttctaccaagtttgagcacctggaaagggtttatgctgacatcccctttctgttgatgacggacctcttaagtgcctcaccctgggccctcactattgtttccagtgagctccagcttgctccatccatgaccacagtggaccagctcgagtctcaagtggacaatgttatcttacagactggagagagtgctagtgaatgcttttgtcttcaatgcccatctcttggaaatattgaaggtggagtagcaaccgggcattatattatctcttggaaaaggacctcagcaatggagaatatccccatcatcacaactgtcatcactctgccgcacgtgattgtggagagtatccctctccatgtgaatgcagatctgccgtcatttgggcgtgtcagagagtcgttacctgtcaagtatcacctacagaataagaccgacttagttcaagatgtagaaatttctgtggagcccagtgatgccttcatgttctcaggtctcaaacagattcgattacgtatcctccctggcacggagcaggaaatgctatataatttctatcctctgatggctggataccagcagctgccatctctcaacatcaacttgcttagatttcctaacttcacaaatcagctgctcaggcgttttatacctaccagtatttttgtcaagccacagggtcgactcatggatgatacctctattgctgctgcatgatgttcaagaccggcccttggctgttgttacagagatgttgggcagagctatgcaggtgtttcattgtgaactctagctttgatcatggtaaaaagctaaccttttctattttttaatggatgttataccaactattcagaggaactcatacttcaaaaatattaggaaaatctgtcttatagtttctctaataaatatctgaaatctcagtacgacatgaaagaatgtcagaccattgttattgttgaaagtcatttgatgaatggtaaattctatgaaaagtaagtgatttgcatgtataatatcaggaaaattaagcatcccaagtgtgactggacaaagagagcagatgcaccagtgcctgtgccataaagttccgaatcccccatgtgtctctttcagagctggccagaccggaaataaatcattctcataaattcagtgtgtactcagaacacatacacaacaacatagtgagttgtatgactgatacggaaaacttccagaaagttttaatcaaagcagtttaattaaggtatcaaaaatatctttgcttactatcaagaagtgtcaaataggttcagcttgctgccaaaatatggatcatttatgaagcaggttcatattttagaggtgttaataaaatcctcatcggaaaagatccaaagtgcaaggatttgattataaacataatttcctagactgaaagtttttggaaaagatgcagggtctgagtcaggccttctggttatattgtgcagtttcaaaagaactatttaaaactcttgaaaactcatgtaaataaaaatcatagggtgaaaattgtatttgttaaaataccttaataatttaaaatgacctgatttcctggaaaattttattattcaaaaggtggaggcattgtaaaaaggaaatagtgatgtaaataaacatgttctctttc

SEQ ID NO: 14661 - protein, 294 aa, Homo sapiens
MLYVRCGTVGSRMFLVYVSYLINTTIEEKEIVCKCHKDETVTIETVFPFDVAVKFVSTKFEHLERVYADIPFLLMTDLLSASPWALTIVSSELQLAPSMTTVDQLESQVDNVILQTGESASECFCLQCPSLGNIEGGVATGHYIISWKRTSAMENIPIITTVITLPHVIVESIPLHVNADLPSFGRVRESLPVKYHLQNKTDLVQDVEISVEPSDAFMFSGLKQIRLRILPGTEQEMLYNFYPLMAGYQQLPSLNINLLRFPNFTNQLLRRFIPTSIFVKPQGRLMDDTSIAAA

SEQ ID NO: 14662 - DNA, 1887 bp, Homo sapiens
  CDS (98)..(736)
tttccaaaatgaagcacccaaaagggtagtagaacgaacccttctggaacagtttgcagataaaaatcttagctatgatgaaagatcaatcagcattatgaaggtggctcaagcgaaactgaaggaaattggtccagatgacatgaatatggaagagtacaagaagtggcatgaagattatagtttgttccgaaaagtgtctgtgtatctcctaacaggcctagaactctatcaaaaaggaaagtaccaagaggcactttcctacctggtatatgcctaccagagcaatgctgccctgctgatgaaggggccccgccggggggtcaaagaatccgtgattgctttataccgaagaaaatgccttctggagctgaatgccaaagcagcttctctttttgaaacaaatgatgatcactccgtaactgagggcattaatgtgatgaatgaactgatcatcccctgcattcaccttatcattaataatgacatttccaaggatgatctggatgccattgaggtcatgagaaaccattggtgctcttaccttgggcaagatattgcagaaaatctgcagctgtgcctaggggagtttctacccagacttctagatccttctgcagaaatcatcgtcttgaaagagcctccaactattcgacccaattctccctatgacctatgtagccgatttgcagctgtcatggagtcaattcagggagtttcaactgtgacagtgaaataagctcccacatgttcaaggcccattctggttcctggctgcctgcctcttgcacagaagttcgttgtcatagtgctcaccttgggaaaaggattaggtgggcacataagattccgatcagaccccaaccatgctgcatgtgtaaagaaggattgaaaataaaattgcactttttaggtacaaaatcataaaagctgtttcactagaaaaggcagaaagcagtgtattaaggtgttgaattacgccagaagacctgaaatgccttgtacctacaacaatgcttaggcttttctaagcctcttgccacttttaaaattatccttcaggcataaatatttttgacagcagaatagaagaatgattcatgagaacctgaaccagatgaacagctactagttattttatcaaatacagatgacatttaaaaattcttaactacaagagattagaaatataaccttgcctggctcttgccaggagataacaaaatgggttgctgatgaactgcacccttttacatgtgggtagaatataagctcacatggcagtgagatgttgaaaagtcaaaagagacctgtctctctcctttcttttctatctttaaaccagaaaacctcatactcagtcctcagtgaaagaaagtaaagtattaaggactttagacagaagagcattgtgtaacttgactgaaggtcatccattaatagttattaggcatttaggtaaaattttctaatacctaaaaattgtcaaaaacagtcaatagggctactgctggcccaaagaccatttaggtccacctcctcttttttgctcttttttttttttctgtgacagtttcactgtgtcgcccaggctggcgttcagtggtgcaatctcagctcactgcaaactctgtctcctgggctcaagtgattctcgtgcctcagcctcccgaatagctggaattacgggcatgcaccaccacacctggctaatttttgtatttttaatagagatggggtttcaccatattggccaggctgatctctaactcctggcctcaagtgatctatctgcctccctcagcctcccaaagtctgggattgcagacaagtcatcgtacccggccttcttttttgcccttaaaagtaagggatgtgggtttgtac

SEQ ID NO: 14663 - protein, 213 aa, Homo sapiens
MKVAQAKLKEIGPDDMNMEEYKKWHEDYSLFRKVSVYLLTGLELYQKGKYQEALSYLVYAYQSNAALLMKGPRRGVKESVIALYRRKCLLELNAKAASLFETNDDHSVTEGINVMNELIIPCIHLIINNDISKDDLDAIEVMRNHWCSYLGQDIAENLQLCLGEFLPRLLDPSAEIIVLKEPPTIRPNSPYDLCSRFAAVMESIQGVSTVTVK

SEQ ID NO: 14664 - DNA, 2153 bp, Homo sapiens
  CDS (40)..(804)
gcagtcgctgcagccgccgcgggaggcgtccgtgacaagatgaagctcatcatcctggagcactattctcaggcgagcgagtgggcggctaaatacatcaggaaccgtatcatccagtttaacccagggccagagaagtacttcaccctggggctccccactggccttcctcgagaccacccggagagttaccactccttcatgtggaacaacttcttcaagcacattgacatccacccagaaaacgcccacattctggatgggaatgcagtcgacctacaggcagaatgtgatgcctttgaagagaagatcaaggctgcaggtgggatcgagctatttgttggaggcatcggccctgatggacacattgccttcaacgagccaggctccagtctggtgtccaggacccgtgtgaagacgctggccatggataccatcctggccaatgctaggttcttcgatggagaactcaccaaggtgcccaccatggccttgacggtgggggtgggcactgtcatggatgctagagaggtgatgatccttatcacaggtgctcacaaggcatttgctctgtacaaggccatcgaggagggagtgaaccacatgtggaccgtgtctgccttccagcagcatccccgcaccgtgtttgtgtgtgacgaggatgccaccttggagctgaaagtgaagactgtcaagtatttcaaaggtttaatgcttgttcataacaagttggtggaccccttgtacagtatcaaagagaaagaaactgagaaaagccaatcttcgaagaaaccatacagcgattagcctgtgctgggacctagtgtcaagtacccatagggaaaggcaggtctttctggaaattgtctttagaagaaagaattgtatttctttaatctagtatggttactccagataagtgggtgaacttattgttcttggccatgaggctgggagcctagtcacggagtttagctatagggagaatgtttgtaacttaatcagaaaaaaaatatctgcaaaatgtactccatcattttgatgtctgccaaacccaggttgggagttttaaactttttgttctgcttcagccatggttcacacatatgacacactcccgtcaggaatttctctccttacacgcactgattttcaagtgggagggaattaggggcttatgtatattggataccacctcttgagagtccttcttgcacaggcctgccccttggttgagaaccattgttccaagtgaaggcacaaactctcaatatctaaaataagtgcaaggaagcagtctctttggtcagtaacaagtgcaatggaaagaaaacgatcccttccttcttccactttcacagcttttctctgaactaggagaacctgggggtggatttgggtgggtggggccaaagaggaggcttctattgataaatccagagcctcaaggggcccagccacgtcaaacttctctccctcagggactctccagcaccaaaaggcagaaggtggaagccgtttttcccccagagccctgtgtttttgtgaaaggcctcactgtggctcctctgttttacatactcattagtaagtgggaggtccactggggcaacagacactgccacaatttcagtgttgtgttcagccaaggggacggtctggacaggcagcttaagtgtgagtttagtcacaactcctgagtgtcccgctctcctgcttacctaggaggtgagtgccaggaaaatacaccaaatgcttctagtattgtttccccacttaaaatagtcctgcttaaattcacatggtgtggtctgatgttctgagagcatcaggaaatacaacccttttgcccatttacccttctccccggatcccaaggtggtctgttgctctggcttcctttcattgtcttaggccttcatggagtggatgctgcctcctcctgactgtttttgtgcctgtttgaagctactgctgcctccatttctgggaaagacctttgagagcctagcccaggcctaagggctatgtttggtaccagtgttttgtctttagcttttctatgtgattgtgccgtcattctgttttaagctcatggatcaatggatttgtttacaatgtgatattttctattaaatccagtattttcaaat

SEQ ID NO: 14665 - protein, 255 aa, Homo sapiens [sequence omitted]

SEQ ID NO: 14666 - DNA, 1516 bp, Homo sapiens
  CDS (56)..(1447)
aatccgccgccgcctgggaggggacccgggctgccaggcgcccagctgtgcccagatggatgggacagagacccggcagcggaggctggacagctgtggcaagccaggggagctggggcttcctcaccccctcagcacaggaggactccctgtagcctcagaagatggagctctcagggcccctgagagccaaagcgtgacccccaagccactggagactgagcctagcagggagaccgcctggtccataggccttcaggtgaccgtgcccttcatgtttgcaggcctgggactgtcctgggccggcatgcttctggactatttccaggccaacactggacaaattgatgacccccaggagcagcacagagtcatcagcagcaacctggccctcatccaggtgcaggccactgtcgtggggctcttggctgctgtggctgcgctgctgttgggcgtggtgtctcgagaggaagtggatgtcgccaaggtggagttgctgtgtgccagcagtgtcctcactgccttccttgcagcctttgccctgggggtgctgatggtctgtatagtgattggtgctcgaaagctcggggtcaacccagacaacattgccacgcccattgcagccagcctgggagacctcatcacactgtccattctggctttggttagcagcttcttctacagacacaaagatagtcggtatctgacgccgctggtctgcctcagctttgcggctctgaccccagtgtgggtcctcattgccaagcagagcccacccatcgtgaagatcctgaagtttggctggttcccaatcatcctggccatggtcatcagcagtttcggaggactcatcttgagcaaaaccgtttctaaacagcagtacaaaggcatggcgatatttacccccgtcatatgtggtgttggtggcaatctggtggccattcagaccagccgaatctcaacctacctgcacatgtggagtgcacctggcgtcctgcccctccagatgaagaaattctggcccaacccgtgttctactttctgcacgtcagaaatcaattccatgtcagctcgagtcctgctcttgctggtggtcccaggccatctgattttcttctacatcatctacctggtggagggtcagtcagtcataaacagccagacctttgtggtgctctacctgctggcaggcctgatccaggtgacaatcctgctgtacctggcagaagtgatggttcggctgacttggcaccaggccctggatcctgacaaccactgcatcccctaccttacagggctgggggacctgctcggttcaagctccgtgggccacactgctgctgtgccaagaaggtgtacagcctccccaggatggggcctcatacaacccttcatctgcactcaacatttaatcgtgtccttgctgtctttttattttcctttttgttagcaaaaacctctatttagatttcaataatcagagaagtgtaaaataaaacagattatattgtacttg

SEQ ID NO: 14667 - protein, 464 aa, Homo sapiens
MDGTETRQRRLDSCGKPGELGLPHPLSTGGLPVASEDGALRAPESQSVTPKPLETEPSRETAWSIGLQVTVPFMFAGLGLSWAGMLLDYFQANTGQIDDPQEQHRVISSNLALIQVQATVVGLLAAVAALLLGVVSREEVDVAKVELLCASSVLTAFLAAFALGVLMVCIVIGARKLGVNPDNIATPIAASLGDLITLSILALVSSFFYRHKDSRYLTPLVCLSFAALTPVWVLIAKQSPPIVKILKFGWFPIILAMVISSFGGLILSKTVSKQQYKGMAIFTPVICGVGGNLVAIQTSRISTYLHMWSAPGVLPLQMKKFWPNPCSTFCTSEINSMSARVLLLLVVPGHLIFFYIIYLVEGQSVINSQTFVVLYLLAGLIQVTILLYLAEVMVRLTWHQALDPDNHCIPYLTGLGDLLGSSSVGHTAAVPRRCTASPGWGLIQPFICTQHLIVSLLSFYFPFC

SEQ ID NO: 14668 - DNA, 1720 bp, Homo sapiens
  CDS (196)..(1464)
agaagggcaacctcgtgctttctgcagaggagaccggagggcagaaggcagagtccaggcttagactgcagttcctcgcttacctgtgcagtctaattttgagctgcctctttgtagtcttaaaaggcaggagcttcgtgttgtgggtctgctaacccgtacgtttccgtgggcaagtcgtgtgtactcctcgccatggctcagctccaaacacgcttctacactgataacaagaaatatgccgtagatgatgttcccttctcaatccctgctgcctctgaaattgccgaccttagtaacatcatcaataaactactaaaggacaaaaatgagttccacaaacatgtggagtttgatttccttattaagggccagtttctgcgaatgcccttggacaaacacatggaagtggagaacatctcatcagaagaagttgtggaaatagaatacgtggagaagtgtaccgcaccccagccagagcaatgcatgttccatgatgactggatcagttcaattaaaggggcagaggaatggatcttgactggttcttatgataagacttctcggatctggtccttggaaggaaagtcaataatgacaattgtgggacatacggatgttgtaaaagatgtggcctgggtgaaaaaagatagtttgtcctgcttattattgagtgcttctatggatcagactattctcttatgggagtggaatgtagagagaaacaaagtgaaagccctacactgctgtagaggtcatgctggaagtgtagattctatagctgttgatggctcaggaactaaattttgcagtggctcctgggataagatgctaaagatctggtctacagtccctacagatgaagaagatgaaatggaggagtccacaaatcgaccaagaaagaaacagaagacagaacagttgggactaacaaggactcccatagtgaccctctctggccacatggaggcagtttcctcagttctgtggtcagatgctgaagaaatctgcagtgcatcttgggaccatacaattagagtgtgggatgttgggtctggcagtcttaagtcaactttgacaggaaataaagtgtttaattgtatttcctattctccactttgtaaacgtttagcatctggaagcacagataggcatatcagactgtgggatccccgaactaaagatggttctttggtgtcgctgtccctaacgtcacatactggttgggtgacatcagtaaaatggtctcctacccatgaacagcagctgatttcaggatctttagataacattgttaagctgtgggatacaagaagttgtaaggctcctctctatgatctggctgctcatgaagacaaagttctgagtgtagactggacagacacagggctacttctgagtggaggagcagacaataaattgtattcctacagatattcacctaccacttcccatgttggggcatgaaagtgaacaataatttgactatagagattatttctgtaaatgaaattggtagagaaccatgaaattacatagatgcagatgcagaaagcagccttttgaagtttatataatgttttcacccttcataacagctaacgtatcactttttcttattttgtatttataataagataggttgtgtttatgaaatacaaactgtggcatacattctctatacaaacttgaaattaaactgagttttacatttctcttt

SEQ ID NO: 14669 - protein, 423 aa, Homo sapiens
MAQLQTRFYTDNKKYAVDDVPFSIPAASEIADLSNIINKLLKDKNEFHKHVEFDFLIKGQFLRMPLDKHMEVENISSEEVVEIEYVEKCTAPQPEQCMFHDDWISSIKGAEEWILTGSYDKTSRIWSLEGKSIMTIVGHTDVVKDVAWVKKDSLSCLLLSASMDQTILLWEWNVERNKVKALHCCRGHAGSVDSIAVDGSGTKFCSGSWDKMLKIWSTVPTDEEDEMEESTNRPRKKQKTEQLGLTRTPIVTLSGHMEAVSSVLWSDAEEICSASWDHTIRVWDVGSGSLKSTLTGNKVFNCISYSPLCKRLASGSTDRHIRLWDPRTKDGSLVSLSLTSHTGWVTSVKWSPTHEQQLISGSLDNIVKLWDTRSCKAPLYDLAAHEDKVLSVDWTDTGLLLSGGADNKLYSYRYSPTTSHVGA

SEQ ID NO: 14670 - DNA, 1720 bp, Homo sapiens; identical to SEQ ID NO: 14668
  CDS (196)..(1464)

SEQ ID NO: 14671 - protein, 423 aa, Homo sapiens; identical to SEQ ID NO: 14669

SEQ ID NO: 14672 - DNA, 1878 bp, Homo sapiens
  CDS (53)..(1114)
gggagcttcggacccggaagtggcgccctgggctcgcggcggtgtcgcggggatggcgggagccggagctggagccggagctcgcggcggagcggcggcgggggtcgaggctcgagctcgcgatccaccgcccgcgcaccgcgcacatcctcgccaccctcggcctgcggctcagccctcggcccgcaggatggatggcgggtcagggggcctggggtctggggacaacgccccgaccactgaggctcttttcgtggcactgggcgcgggcgtgacggcgctcagccatcccctgctctacgtgaagctgctcatccaggtgggtcatgagccgatgccccccacccttgggaccaatgtgctggggaggaaggtcctctatctgccgagcttcttcacctacgccaagtacatcgtgcaagtggatggtaagatagggctgttccgaggcctgagtccccggctgatgtccaacgccctctctactgtgactcggggtagcatgaagaaggttttccctccagatgagattgagcaggtttccaacaaggatgatatgaagacttccctgaagaaagttgtgaaggagacctcctacgagatgatgatgcagtgtgtgtcccgcatgttggcccaccccctgcatgtcatctcaatgcgctgcatggtccagtttgtgggacgggaggccaagtacagtggtgtgctgagctccattgggaagattttcaaagaggaagggctgctgggattcttcgttggattaatccctcacctcctgggcgatgtggttttcttgtggggctgtaacctgctggcccacttcatcaatgcctacctggtggatgacagcttcagccaggccctggccatccggagctataccaagttcgtgatggggattgcagtgagcatgctgacctaccccttcctgctagttggcgacctcatggctgtgaacaactgcgggctgcaagctgggctccccccttactccccagtgttcaaatcctggattcactgctggaagtacctgagtgtgcagggccagctcttccgaggctccagcctgcttttccgccgggtgtcatcaggatcatgctttgccctggagtaacctgaatcatctaaaaaacacggtctcaacctggccaccgtgggtgaggcctgaccaccttgggacacctgcaagacgactccaacccaacaacaaccagatgtgctccagcccagccgggcttcagttccatatttgccatgtgtctgtccagatgtggggttgagcgggggtggggctgcacccagtggattgggtcacccggcagacctagggaaggtgaggcgaggtggggagttggcagaatccccatacctcgcagatttgctgagtctgtcttgtgcagagggccagagaatggcttatgggggcccaggttggatggggaaaggctaatggggtcagaccccaccccgtctacccctccagtcagcccagcgcccatcctgcagctcagctgggagcatcattctcctgctttgtacatagggtgtggtcccctggcacgtggccaccatcatgtctaggcctatgctaggaggcaaatggccaggctctgcctgtgtttttctcaacactacttttctgatatgagggcagcacctgcctctgaatgggaaatcatgcaactactcagaatgtgtcctcctcatctaatgctcatctgtttaatggtggtgcctcgcgtacaggatctggttacctgtgcagttgtgaatacccggaggttgggcagatcagtgtctctagtcctacccagttttaaagttcatggtaagatttgacctcatctcccgcaaataaatgtattggtgatttgg

SEQ ID NO: 14673 - protein, 354 aa, Homo sapiens
MAGAGAGAGARGGAAAGVEARARDPPPAHRAHPRHPRPAAQPSARRMDGGSGGLGSGDNAPTTEALFVALGAGVTALSHPLLYVKLLIQVGHEPMPPTLGTNVLGRKVLYLPSFFTYAKYIVQVDGKIGLFRGLSPRLMSNALSTVTRGSMKKVFPPDEIEQVSNKDDMKTSLKKVVKETSYEMMMQCVSRMLAHPLHVISMRCMVQFVGREAKYSGVLSSIGKIFKEEGLLGFFVGLIPHLLGDVVFLWGCNLLAHFINAYLVDDSFSQALAIRSYTKFVMGIAVSMLTYPFLLVGDLMAVNNCGLQAGLPPYSPVFKSWIHCWKYLSVQGQLFRGSSLLFRRVSSGSCFALE

SEQ ID NO: 14674 - DNA, 541 bp, Homo sapiens
  CDS (51)..(407)
ccttgtagttcgtggtctgagaccaggcctcaagtggaaacggcgtcaccatgatcgcacggcggaacccagaacccttacggtttctgccggatgaggcccggagcctgcccccgcccaagctgaccgacccgcggctcctctacatcggcttcttgggctactgctccggcctgattgataacgtgatccggcggaggccgatcgcgacggctggtttgcatcgccagcttctatatattacggcctttttttttgctggatattatcttgtaaaacgtgaagactacctgtatgctgtgagggaccgtgaaatgtttggatatatgaaattacatccagaggattttcctgaagaagataagaaaacatatggtgaaatttttgaaaaattccatccaatacgttgaagtcttcaaaatgcttgctccagtttcactgatacctgctgtttctgaatttgatggaacatgtttcttatgacagttgaagcttatgctaatctgtatgttgacaccttgtaattaaaatacgtaccatg

SEQ ID NO: 14675 - protein, 119 aa, Homo sapiens [sequence omitted]

SEQ ID NO: 14676 - DNA, 1920 bp, Homo sapiens
  CDS (367)..(1398)
agccggctcgggaaagaatcccccaagctccatttcatgagtaagcgtgagagccgctcagtttcctccagctctgctgaagccagcacagaagtagcccaaactcttccctctgctgacagcaaattttaggcaaagtcatgagaaagaagaaattgggtccagaaagggaagtgaggagaatcagatcccagacctttggggagaaggagcaaccgcctctggcacagcccatcagggagaaagagcaggttgagaagagtcctaagctaacagccccaaacaggtgggcgttgctcagctccctgaggcatgtggttgtaaggcagaacccacagaccttgcaggaagaaggctctcggggccatggcccaggtcagcatcaacaatgactacagcgagtgggacttgagcacggatgccggggagcgggctcggctgctgcagagtccctgtgtggacacagcccccaagagtgagtgggaagcctctcctgggggtctggacagaggcaccacttccacacttggggccatcttcatcgtcgtcaacgcgtgcctgggtgcagggttactcaacttcccagcagccttcagcactgcggggggcgtggcagcaggcatcgcactgcagatgggtatgctggttttcatcatcagtggccttgtcatcctggcctactgctcccaggccagcaatgagaggacctaccaggaggtggtatgggctgtgtgtggcaagctgacaggtgtgctatgtgaggtggccatcgctgtctacacctttggcacctgcattaccttcctaatcatcattggcgaccagcaggacaagattatagctgtgatggcgaaagagccggagggggccagcggcccttggtacacagaccgcaagttcaccatcagcctcactgccttcctcttcatcctgcccctctccatccccagggagattggtttccagaaatatgccagcttcctgagcgtcgtgggtacctggtacgtcacagccatcgttatcatcaagtacatctggccagataaagagatgaccccagggaacatcctgaccaggccggcttcctggatggctgtgttcaatgccatgcccaccatctgcttcggatttcagtgccacgtcagcagtgtgcccgtcttcaacagcatgcagcagcctgaagtgaagacctggggtggagtggtgacagctgccatggtcatagccctcgctgtctacatggggacaggcatctgtggcttcctgacctttggagctgctgtggatcctgacgtgctcctgtcctatccctcggaggacatggccgtggccgttgcccgagccttcatcatcctgagcgtgctcacctcctaccctatcctgcacttctgtgggcggtgagcccgcttccactccccagggcccctcctagcccctgtgagcgcttccaacatggtcctttggccttgtgtggaccccatcctgtagaaggagaaactgaagcctgtagaaaagagtcggtgcctaggatgggtccctacatatcccaggccaggtgtcagaagcgccctttgtcctggggtcaccagaacattccgtgagtcctgtaagaatctctatccatggcatggcacggtggctcacgtctctaaacccagcactttgggaggctgaggcagaaggatcgcttgagcctgggagttcaagaccacctgggcaacctagtgagaccccatctctacacaaaataaaataaatagccaggtgtggtggatgcacctgtggtcccagctactcagccacttgggaggctgaggcagaaggatggctggagcccaggagttcaaggctgcagtgagccaagattgcaccactgcactccagcctgggtgagagagccagaccctgtctcaaaaaaac

SEQ ID NO: 14677 - protein, 344 aa, Homo sapiens [sequence omitted]

SEQ ID NO: 14678 - DNA, 1407 bp, Homo sapiens; identical to SEQ ID NO: 11396

SEQ ID NO: 14679 - DNA, 4190 bp, Homo sapiens
  CDS (70)..(3381)
agctgatcgcaagactaggcaacctccagccagtccctgggtcgggcggatcctcccagaggtggcacaatggagcgatctccaggagagggccccagccccagccccatggaccagccctctgctccctccgaccccactgaccagccccccgctgctcacgcaaagccagacccaggttctgggggccaacctgctggccctggcgcggcgggtgaggccctggcggtgctgacttcattcgggaggcggttgctggtgctgatacctgtgtatttggccggggcagtgggactcagcgtgggtttcgtgctcttcggcctcgccctctacctgggctggcgccgggtccgcgacgagaaagaacggagccttcgagcagcgaggcagctactggacgacgaggagcagctcactgcgaaaactctctatatgagtcatcgagagctacctgcctgggtcagcttcccagacgtggaaaaggctgaatggctcaataagattgtggcccaggtctggcccttcctgggccagtatatggagaagcttctggctgaaactgtggctccggctgttaggggatctaacccccatctgcaaacatttacatttacacgagtggaactgggtgaaaagccattgcgcatcattggagtcaaggttcacccaggtcagagaaaagagcagatcctgctggacttgaacatcagctatgtaggtgatgtgcagattgatgtggaagtgaagaaatatttttgcaaagcaggagtcaagggcatgcagctacatggcgttttgcgggtgatactggagccactcattggggaccttcccttcgtgggggctgtgtcaatgttcttcatccgacgcccgaccctagacatcaactggacagggatgaccaacctgctggatatcccaggacttagctcactctctgacaccatgatcatggactccattgctgccttcctcgtgttgcccaaccgattactggtgccccttgtgcctgaccttcaagatgtggctcagttgcgttcccctctgcccaggggcattattcgaattcacctgctggctgctcgagggctgagttccaaggacaaatatgtgaagggcctgattgagggcaagtcagacccatatgcacttgtgcgtttgggtacccagacattctgcagtcgtgtcattgatgaagaactcaacccacagtggggagagacttatgaggtgatggtacacgaggtcccagggcaggagattgaagtggaggtgttcgacaaggatccagataaagatgactttctgggcagaatgaagctggatgtagggaaggtgttacaggctagcgttctggatgattggttccctctacaaggtgggcaaggccaagttcacttgaggctagaatggctgtcacttttgtcagatgcagagaaactggagcaggttctacagtggaattggggagtctcctctcgaccagatcccccgtcagctgccatcttagttgtctacctggatcgggcccaggatcttcctctgaagaaggggaacaaggaacccaaccctatggtacaactgtcaattcaggatgtgactcaggagagcaaggctgtctacagtaccaactgcccagtgtgggaggaagcgttccggttcttcctacaagaccctcaaagccaggagctcgatgtgcaagtgaaggatgattccagggccctgactttaggagcactgacgctgcctctggcccgcctgctgactgccccagaactcatcctggaccagtggttccagctcagcagctctggtccaaactccagactctatatgaaactagtcatgaggatcctgtacttggattcatcagaaatatgcttccccacggtgcctggttgtcctggtgcttgggacgtggacagtgagaatccccagagaggcagcagtgtggatgccccacctcgaccctgtcacacgactcctgatagccagtttgggaccgagcatgtgcttcggatccatgtattagaggcccaggacctgattgccaaagaccgtttcttggggggactggtgaagggcaagtcagacccctatgtcaaactaaagttggcaggacgaagcttccggagccatgttgttcgggaagatctcaatccccgctggaatgaggtttttgaggtgatcgtcacatcagttccaggccaagagctagaggttgaagtctttgacaaggacttggacaaggatgattttctgggcaggtgtaaagtgcgtctcaccacagtcttaaacagtggcttccttgatgagtggctgaccctggaggatgtcccatctggccgcctgcacttgcgcctggagcgtctcaccccccgtcccactgctgctgagttagaggaggtgctgcaggtgaatagtttgatccagactcagaagagtgcggagctggctacggccctgctatccatctatatggagcgggcagaggacctcccgctgcgaaaaggcaccaagcacctcagcccttatgctactctcactgtgggagatagttctcataaaaccaagactatttcgcaaacttcagcccctgtctgggatgagagtgcctcctttctcatcaggaaaccacacactgagagcctagagttgcaggttcggggtgagggcactggcgtgctgggctcattatccctgcccctctcagagctcctcgtggctgaccagctctgcttggaccgctggtttacactcagcagtggtcaggggcaggtgctactgagagcacagctagggatcctggtgtcccagcactcgggagtggaagctcatagccacagctacagccacagctcctcatcgctgagtgaagaaccagagctctcggggggaccccctcacatcacctcctcagccccagagctccggcagcgcctaacacatgttgacagtccccttgaggctccagccgggcctctgggccaggtgaaactgactctgtggtactacagtgaagaacgaaagctggtcagcattgttcgtggttgccggtcccttcgacagaatggacgtgatcctcctgatccctatgtgtcactgttgctactgccagacaagaaccgaggcaccaagaggaggacctcacagaagaagaggaccctgagtcctgaatttaatgaacggtttgagtgggaactccccctggatgaggcccagagacgaaagctggatgtctctgtcaagtctaattcctccttcatgtcaagagagcgtgagctgctggggaaggtgcagctggacctagctgagacagacctttcccagggtgtagcccggtggtatgacctgatggacaacaaggacaagggcagctcctaggagctggcgagtcccagcctgactgctctgtcttcctgccttcgtctcgctccatcaccgcctcaatgtgatgagcctaaagctagggtccaagggcagagcctgtgcccttcagccctttcacctaacaggcccatattcgggcctttgcctgaccaaagagaagaaccgtatgttccctttactgcacggcctttatccttctgggcccctggggcggggacctgagctggctgtttcctgctttgcctgcacattgttctcccttcctcccaactcctcagggccttctgtatctgtgcctggccagtggcagcactagcagtggtattagcttatgccaaatacagctttggaaggatctttttttctttaactagatggtcaccttcttccctaccacacatgggtgggaaggtggacaggctaacctctccagctgtgagcctcttagactactgcatgtagcaaatgttcagcagctcaggcccccatgtccagttctgtccccactgtcctcaaccctgtcctgaaaattctactgctttgatggctggggccagtctcttgtcactttggaaactgaggacgcgtggattctactcaagcctccaagtagtggcatatcagtcttggagctcctagctggtgatacggagagggctttggaggacttgggacagcagggccaatttttttgcccaagtgcctaggctgctaactcactgactagaacttaatctggtactttacagttttgcaccaactctgccaagccactggatcttacattaaacatcatactc

SEQ ID NO: 14680 - protein, 1104 aa, Homo sapiens [sequence omitted]

SEQ ID NO: 14681 - DNA, 2080 bp, Homo sapiens
  CDS (19)..(510)
agtgatggaggagagaagatggcggaagcggaatttaaggaccatagtacagctatggatactgaaccaaacccgggaacatcttctgtgtcaacaacaaccagcagtaccaccaccaccaccatcaccacttcctcctctcgaatgcagcagccacagatctctgtctacagtggttcagaccgacatgctgtacaggtaattcaacaggcattgcatcggccccccagctcagctgctcagtaccttcagcaaatgtatgcagcccaacaacagcacttgatgctgcatactgcagctcttcagcagcagcatttaagcagctcccagcttcagagccttgctgctgttcaggcaagtttgtccagtggaagaccatctacatctcccacaggaagtgtcacacagcagtcaagtatgtcccaaacgtctgtaagttccctaaattttttttttcctggatttaaaattttaaagaattgttttccaaaagtaaactgttgttatttatgaagctgttattataatttgttgcatgctgtttaaagtaacaattgcccagaaatagaaatgataaaattcaagaattcagaactagtgttaaacttatgaaaatctgagtcttaaaaaaatctttttgtattatttcttgtatatccatttgcactgatcatgttcagatcttatgtggtttcagctttctgtgtgtattgaaagcctaaaatatacaatgcagggatattggccatgaatttactgtgatatacaatagtatgtcatgtccttggtagacatctaagcatttctaactttgtgcaattcacattttagaaattatactttcagcttacatgagttatttgggttcaatttgcaagtatccattcaagatagggtaatttattttgagaaaggagtaaaagaaagctgattcgctatattgcacatatatattgggaaattgtgccaagtttcccaggtaaaataaatttatgggcatggtaatacttgtttagcttttaattttggtataattttaaactgcaataataataaaaaaatttctgtatctactctactcagattaatcaattattgcatattgccccattactttatcattcattcttttccactacatgtatacatatttttttctgagtcatttgtaagttgagatatgttcctttattcctaaatactttgatgtgtatttcctaagaacaaggctattgttttttgaagccacagaaaaattactaaattcaggaaatataacattgatacagtgcagttcattttcacatttcatcatttgtctcaggtttcccaacctcatcactatggacattatgagccagataattctttgttgtcaggggctatcgtgtaatttataggatgtttagcagcatccctggctactagatgccggcagcttgtggtctttctccttcctctagtgtgacaactataggtgtttcctggtggggggcaaactgcctgtagttgagaacctaataatgtcctttctagatattttttcctggtccagaatggtaatactttgatacttcataaaattggctccaatacaatatagtttgtaggttgttaaggaattgaaggttaaggaattgtgctctatttcttcagctaagggtatggtctttgctaactacatgctgtggtcagcatatagctgtggttttttttgttgtttggtttttttttctggctgttgatctgactttttttttttggcgtgggaatgtcctggagtgtgaacaagattagtttaaaaagttccctatgacttgaagatgttagattaaatgaaaaacttaaataatgtaacctagctcttaagcattaatactggagtttttgtcattgacatcagatgtctttaatacaatggtaattaaggaaaggagtggtaaatattttgtgggctactgaaggaaattatatagacaaattctttattctgtgaaatactggaataacaataggatgtatttgtatagatatgttattttgaatttttttccttcatgttattaaaaggtatcttttt

SEQ ID NO: 14682 - protein, 164 aa, Homo sapiens
MAEAEFKDHSTAMDTEPNPGTSSVSTTTSSTTTTTITTSSSRMQQPQISVYSGSDRHAVQVIQQALHRPPSSAAQYLQQMYAAQQQHLMLHTAALQQQHLSSSQLQSLAAVQASLSSGRPSTSPTGSVTQQSSMSQTSVSSLNFFFPGFKILKNCFPKVNCCYL

SEQ ID NO: 14683 - DNA, 2657 bp, Homo sapiens
  CDS (571)..(1296)
tatatcaatacaccagtggctgaaattatcatgaaaccaaatgttggacaaggcagcacaagtgtgcaaacagctatggaaagtgaactcggagagtctagtgccacaatcaataaaagactctgcaaaagtacaatagaactttcagaaaattctttacttccagcttcttctatgttgactggcacacaaagtaaggctgttgctttcaatgcatgcaatattaactttgagtgtttactaactctgtgttttgcttacctggcttttcttccttgaagttgcttttttttttcctccaagaggaattatttaaaaagactttagtctgtgacataaccaagatttattctgtttacctaaggaacttattttcttttttgcaatttcatttattctgagtcactttatttgtaataagtgaagaattttaatacttagaaataagttgtaaagaaaataatgagaatcttaccatgctttagaggaacgtaatttctagaaatagttaaaagatgaaatactaagatattattttaccttctttatatagctgtatatactggtagtatgaaagcaactagtgtcattgatgattttttgggggggtatttttgtattctaggcttgctgcaacctcatttagagagggttgccatcgatgctctacagttatgttgtttgttacttcccccaccaaatcgtagaaagcttcaacttttaatgcgtatgatttcccgaatgagtcaaaatgttgatatgcccaaacttcatgatgcaatgggtacgaggtcactgatgatacataccttttctcgatgtgtgttatgctgtgctgaagaagtggatcttgatgagcttcttgctggaagattagtttctttcttaatggatcatcatcaggaaattcttcaagtaccctcttacttacagactgcagtggaaaaacatcttgactacttaaaaaagggacatattgaaaatcctggagatggactatttgctcctttgccaacttactcatactgtaagcagattagtgctcaggagtttgatgagcaaaaagtttctacctctcaagctgcaattgcagaacttttagaaaatattattaaaaacaggagtttacctctaaaggagaaaagaaaaaaactaaaacagtttcagaaggaatatcctttgatatatcagaaaagatttccaaccacggagagtgaagcagcactttttggtgacaaacctacaatcaagcaaccaatgctgattttaagaaaaccaaagttccgtagtctaagataactaactgaattaaaaattatgtaatacttgtggaactttgataaatgaagccatatctgagaatgtagctactcaaaaggaagtctgtcattaataaggtatttctaaataaacacattatgtaaggaagtgccaaaatagttatcaatgtgagactcttaggaaactaactagatctcaattgagagcacataacaatagatgataccaaatactttttgtttttaacacagctatccagtaaggctatcatgatgtgtgctaaaattttatttacttgaattttgaaaactgagctgtgttagggattaaactataattctgttcttaaaagaaaatttatctgcaaatgtgcaagttctgagatattagctaatgaattagttgtttggggttacttctttgtttctaagtataagaatgtgaagaatatttgaaaactcaatggaataattctcagctgccaaatgttgcactcttttatatattctttttccacttttgatctatttatatatatgtatgtgtttttaaaatatgtgtatattttatcagatttggttttgccttaaatattatccccaattgcttcagtcattcatttgttcagtatatatattttgaattctagttttcataatctattagaagatggggatataaaagaagtataaggcaatcatatattcattcaaaagatatttatttagcaactgctatgtgcctttcgttgttccagatatgcagagacaatgataaataaaacatataatctcttccataaggtatttattttttaatcaagggagatacacctatcagatgtttaaaataacaacactacccactgaaatcagggcatatagaatcattcagctaaagagtgacttctatgatgatggaacaggtctctaagctagtggttttcaaactggtacacattagactcacccgaggaattttaaaacagcctatatgcccagggcctaacttacactaattaaatctgaattttggggatgttgtatagggattagtattttttttaatctaggtgattccaatattcagccaactgtgagaatcaatggcctaaatgctttttataaacatttttataagtgtcaagataatggcacattgactttattttttcattggaagaaaatgcctgccaagtataaatgactctcatcttaaaacaaggttcttcaggtttctgcttgattgacttggtacaaacttgaagcaagttgccttctaatttttactccaagattgtttcatatctattccttaagtgtaaagaaatatataatgcatggtttgtaataaaatcttaatgtttaatgactgtt

SEQ ID NO: 14684 - protein, 242 aa, Homo sapiens
MKATSVIDDFLGGYFCILGLLQPHLERVAIDALQLCCLLLPPPNRRKLQLLMRMISRMSQNVDMPKLHDAMGTRSLMIHTFSRCVLCCAEEVDLDELLAGRLVSFLMDHHQEILQVPSYLQTAVEKHLDYLKKGHIENPGDGLFAPLPTYSYCKQISAQEFDEQKVSTSQAAIAELLENIIKNRSLPLKEKRKKLKQFQKEYPLIYQKRFPTTESEAALFGDKPTIKQPMLILRKPKFRSLR

SEQ ID NO: 14685 - DNA, 2114 bp, Homo sapiens
gagcttgggatcgctttctgctattcaacgtcctccacctctgcccccctctccccccagccggtgacaggctgttgccctgtgatctgcaggtcctgggacgtgcacagacagctaagatgccaggacattccagaaggtgggaaaggcacctgagtaatttgactctcctgcctggacccagcgtacagatgggattgtgcttcattgctggacccagcatttagggatcgtcactcccgtggatgatcaaagctactccgggggctgaggcaggagaatcgcttgaactcgggaagcagaagttgcagtgagccaaggtcgcaccactgcactccagcccaggcgacattgtgagactccatctcaaaaaaaaagaaaaaaagtgtactaacaagacccagcacacagaggagacttttaccattgtatgaacacccatcaaacagtacacatcatcattgtgagttctgaatctcacacatagaggaagtcaaaggtggaaaacttgactctcatatttggatccagtccacaggtgtgattttgacgcacacttctgcccagcacctgagtaatgtgattcttcagaattggcccggcccacaaataggattgtgccacactgctggacccagtgcctaagtgatgtaactctattcttctgccttggtgctactcgaaaaagacattgtaacatatctcagagccttacacccaggtaatgtgagtctcctcttctgccttgctgctgcacacagaagcggaatatgtacaggattgttaatctcatcttggatcttcctgcacttgtgattgtgacacatgcctctgtgtagaacctgagtgagtttactctcctgcctggatttaacccatagatggaatcgtgacatatcactgtaccagaaactaggtgatgtgactctattttcttgcctctgtgtttttatatggggcatcgtgacatatcactgggccttgcacccaagtgatgggagttttctctcctgctttggtgccgtccacaatgaaaattgtgaaatattgctgccctccccactaggttatgttactctcctgcctctgctttgcccacatgggtcactgtgacatattgctgggtctaaaacccaggtaatgtcactctcttgtttgggttctgcctgcaggagtcattgtcacatatctctatgctcatcacccaagtaatatgattcccttttactgcttagttccttctcacaaaacaacttgtgacatattgctaggcccaatacacctagctggtgtaactcttcttttcttttctttcctttttttttttttttttgagatggagtctcactctgttgcccaggctggagtgcagcggcatgatttcagctcactacagcctctgcctcctaggttgaagcgattgtcctgacttggcctcccaagtagctgggattaaaggcatgtgccaccacgcccggctaatttttgtatttatagtagagacagggtttcgccatgttggctaggctggtttcgagcttctaacctcaggtgatcctcctgcctcggcctcccaaagtactggaattacaggcatgagccactgcacctggcctgattcttctcttctttctaggtttcaactgcagcagagattgtaacaaaccactgggcccagccgcataatgatgttactcttttgccttgggcctgccctcagaaggcactgtcacatattcatgggcccaacgccaaggtgatatgtgtctccagcctggaccctgcccacagggggcattgtgacatatctcttggcccatcagatgtttgattgttatcccctcccctcttctaccctgtgtttgcctataaaagacacagtcatatgttcctgggcccagcacctaggtgttgtcttactggaatgtgtccacatggggattgtgatatgtcacgtggcccagtacttaacttgatgtgactctcctctcatgcctaggccttgtagagaatccccttccccttttgttttcctttttttctttgcagatccaggagataatcaactaagagccaggcacccgtttaggtctaataaacattttacaaactgc

SEQ ID NO: 14686 - DNA, 2357 bp, Homo sapiens
  CDS (168)..(1112)
actagagtctccggcttcgctcacgcgccttgggcataagagtcctctcgttggtcccggaggtggggttgcgctcacaaggggcgaccgtcgccacggtggcggccactgcatcgcgtcccacctccgcggccctgggcgccgtggtgtcgacgggccccgagcctatgacgggccagggccagtcggcgtccgggtcgtcggcgtggagcacggtattccgccacgtccggtatgagaacctgatagcgggcgtgagcggcggcgtcttatccaaccttgcgctgcatccgctcgacctcgtgaagatccgcttcgccgtgagtgatggattggaactgagaccgaaatataatggaattttacattgcttgactaccatttggaaacttgatggactacggggactttatcaaggagtaaccccaaatatatggggtgcaggtttatcctggggactctactttttcttttacaatgccatcaagtcatataaaacagaaggaagagctgaacgtttagaggcaacagaataccttgtctcagctgctgaagctggagccatgaccctctgcattacaaacccattatgggtaacaaaaactcgccttatgttacagtatgatgctgttgttaactccccacaccgacaatataaaggaatgtttgatacacttgtgaaaatatataagtatgaaggtgtgcgtggattatataagggatttgttcctgggctgtttggaacatcgcatggtgcccttcagtttatggcatatgaattgctgaagttgaagtacaaccagcatatcaatagattaccagaagcccagttgagcacagtagaatatatatctgttgcagcactatccaaaatatttgctgtcgcagcaacatacccatatcaagtcgtaagagctcgtcttcaggatcaacacatgttttacagtggtgtaatagatgtaatcacaaagacatggaggaaagaaggcgtcggtggattttacaagggaattgctcctaatttgattagagtgactccagcctgctgtattacctttgtggtatatgaaaacgtctcacattttttacttgaccttagagaaaagagaaagtaagctcaaagaggacaattccagtatatctgcccaaggcagcaacaagctcttttgtgtttaaggcataaaagaagaattctgcatagaaacatggctcatattcgaaattgctctatagtcaatagaagccagagaactgctaagtctcctgcaatgtttttctgctttttgccttccccatatatatggaacttggctacctctgcctgaaatggctgccatcaacacaatgttaaaactgacacgaagtatagagtttcacagatttctacgttttattggtggaagctgatttgcaacatttgctaaatggattagatgaatgtacttctttttgtgagcttacttgcctggattgctttaaaattaacctttgtgcaataccaagaaaatagctctttaaaagaatgtctttgtatgtctcaaggtaaattaaggatttactgaataaggtgttgaccaaatccagaccattttattttatttttttatttatttattttttgagatggagtcttgctttgtcgcccaggctggagtgcagtggcgtgatctcagctcactgcaacctccacctcccgggttcacgccattctcctgcctcagcctcctgagtagctgggactacaggcacctgccaccacgcctggctaacttttttttatattttgagtagaaatggggtttcaccatgttagccaggatggtctcaatctcctgaccttgtgatccgcctgccttggcctcccaaagtgctgggattacaggcgtgagccactgcgcctggccagaccattttagaattgggaaattttagtgagaaaaaatgcactgtaaatatgctttagttttaattcagttgggatgcactacctagcgaaaattgagaaactatatacttctcagagaaatatctgacatctattgtcattccattgctattttttttccccagagacttccataatttaaaataaaatcctagatccagttcttgttttttggcataaatacttaatctattttaaatttataaaatctgagcttctaggatccagctgtgtcaacctttatttagcatatataactataaatcacttattacagatgctaaatagatcaccttttacagatgctgaaatgtttgggatatgtttgttgacaaggtaaatggaaatgagaaactttatacttcagttttcagatatatggatctagatcccaaataaatgattaatcttc

SEQ ID NO: 14687 - protein, 315 aa, Homo sapiens
MTGQGQSASGSSAWSTVFRHVRYENLIAGVSGGVLSNLALHPLDLVKIRFAVSDGLELRPKYNGILHCLTTIWKLDGLRGLYQGVTPNIWGAGLSWGLYFFFYNAIKSYKTEGRAERLEATEYLVSAAEAGAMTLCITNPLWVTKTRLMLQYDAVVNSPHRQYKGMFDTLVKIYKYEGVRGLYKGFVPGLFGTSHGALQFMAYELLKLKYNQHINRLPEAQLSTVEYISVAALSKIFAVAATYPYQVVRARLQDQHMFYSGVIDVITKTWRKEGVGGFYKGIAPNLIRVTPACCITFVVYENVSHFLLDLREKRK

SEQ ID NO: 14688 - DNA, 2545 bp, Homo sapiens
  CDS (83)..(2485)
agaattagaattggctgttttggaagctggaagttctgaagctgtgaaaccaaaatgcactctagaagaaagacagcaatttatgaaagcatttaggcagccagcatcagatgcacttaaaaatggagttaaaaagtcttctgataagcagaaagaccttaatgaaaaatgtctatatgaagtaggaagagatgataattctaaaaaaatcatggaaaattctggtatccaaatggtttcaaaaaatggcaatttacagttacacactgataaaggaagttttctgaaggagaaagataaaaagctaaagaagaagaataagaaaacattagatactggggctattccaggcaaaaacagagagggaaacactcaaaagaaagaaacaacctttttcttaaaagagaaacaatatcaaaatagaatgagtttaagacaaaggaaaacagagtttttcaaaagcagcactttatttaacaatgaaagtcttgtttatgaagatatagcaaatgatgaccttctaaaggtttcctctctgtgtaacaataataaattgtcaagaaaaaccagcataccagttaaagatattaagcttacacagtctaaagctgaatctgaagccagcttgctaaatgtttccacgcccaagtcaactagaagatctggaagaattagcagcacacctactacagaaaccattagaggtattgattctgacgatgtacaagataatagtcaactaaaggcttccactcaaaaagcagccaacttatcggaaaagcacagcttatatacagcagaattaataacagtaccctttgattcagagagccctattagaatgaaattcaccagaattagtactcccaaaaaatctaagaaaaaatctaacaaaagatctgagaaatctgaagcaactgatggaggttttacttctcagattagaaaggcaagcaatacttcaaaaaacatatcaaaagcaaaacaattgattgaaaaagcaaaagctttacacatcagtaggtcaaaggtgactgaagaaatagcgatacccttaaggcgctcctctagacatcagacacttcctgaaaggaagaaattgtcagaaacagaagattctgttataataatagattcaagtcctactgctttaaagcatccagagaaaaatcagaagaaacttcagtgtttgaatgatgtgctaggaaaaaaacttaacacatccactaaaaatgtacctggaaaaatgaaagtcgctcctttatttcttgtcagaaaagcacaaaaagcagctgatcctgtccctagttttgatgaaagcagtcaagatacatctgaaaaatctcaggattgtgatgttcaatgtaaagcaaagcgtgacttcctaatgagtggtttgccagatttgttgaaacggcaaattgcaaagaaagctgctgcgctggatgtgtacaatgcagtgagtaccagtttccagagagtcgtacatgtgcaacaaaaggatgatgggtgttgtttgtggcatttgaaaccaccctcttgtcctctcttaactaaatttaaagaactgaacactaaagtaatagatctctcaaaatgtggtattgctcttggtgaattttcaacattgaattcaaagttgaaaagcggtaactctgctgctgtgttcatgaggacaaggaaggaatttactgaagaagtaagaaatcttttgcttgaggaaattaggtggtcaaatcctgaattttcattgaaaaaatattttcccttactcctaaaaaaacaaattgagcaccaagtactttcttccgagtgtcatagtaaacaagaactggaggctgatgtcagccataaagaaaccaaaaggaaactcgtagaagcagaaaattctaagtcaaaaagaaagaaaccaaatgagtattcaaaaaatctggagaagaccaataggaagtcagaagaacttagcaaaagaaacaactcttctgggataaagctagattcttccaaagattctggaactgaagacatgctttggacagaaaagtatcaacctcagactgccagtgaacttataggaaatgagttagctataaaaaagttacatagttggttgaaagactggaaaagaagagctgaattggaagaaaggcagaatctgaagggaaaaagagatgagaaacatgaagatttctcgggtggcatagactttaaaggcagttcagatgatgaagaagagagtcgtctttgcaatactgtccttataacagggccaacaggagtgggaaaaactgctgcagtgtatgcttgtgcccaggagcttggatttaagatatttgaagtgaatgcctcttcccagcgcagtggtagacaaattctatctcagttgaaggaagctactcagtcccatcaagtagacaaacaaggtgtaaactcacaaaaaccctgtttttttaatagctactacataggcaagtcaccaagtaagtaaactattttccttaagccataatgttttgaaaaaaataaaatctaagaaagtaatgtt

SEQ ID NO: 14689 - protein, 801 aa, Homo sapiens
MKAFRQPASDALKNGVKKSSDKQKDLNEKCLYEVGRDDNSKKIMENSGIQMVSKNGNLQLHTDKGSFLKEKDKKLKKKNKKTLDTGAIPGKNREGNTQKKETTFFLKEKQYQNRMSLRQRKTEFFKSSTLFNNESLVYEDIANDDLLKVSSLCNNNKLSRKTSIPVKDIKLTQSKAESEASLLNVSTPKSTRRSGRISSTPTTETIRGIDSDDVQDNSQLKASTQKAANLSEKHSLYTAELITVPFDSESPIRMKFTRISTPKKSKKKSNKRSEKSEATDGGFTSQIRKASNTSKNISKAKQLIEKAKALHISRSKVTEEIAIPLRRSSRHQTLPERKKLSETEDSVIIIDSSPTALKHPEKNQKKLQCLNDVLGKKLNTSTKNVPGKMKVAPLFLVRKAQKAADPVPSFDESSQDTSEKSQDCDVQCKAKRDFLMSGLPDLLKRQIAKKAAALDVYNAVSTSFQRVVHVQQKDDGCCLWHLKPPSCPLLTKFKELNTKVIDLSKCGIALGEFSTLNSKLKSGNSAAVFMRTRKEFTEEVRNLLLEEIRWSNPEFSLKKYFPLLLKKQIEHQVLSSECHSKQELEADVSHKETKRKLVEAENSKSKRKKPNEYSKNLEKTNRKSEELSKRNNSSGIKLDSSKDSGTEDMLWTEKYQPQTASELIGNELAIKKLHSWLKDWKRRAELEERQNLKGKRDEKHEDFSGGIDFKGSSDDEEESRLCNTVLITGPTGVGKTAAVYACAQELGFKIFEVNASSQRSGRQILSQLKEATQSHQVDKQGVNSQKPCFFNSYYIGKSPSK

SEQ ID NO: 14690 - DNA, 1763 bp, Homo sapiens
  CDS (540)..(1529)
gatgcggctgtgattgctgaattgtctgggcaggtttggagtctctggcaagctcccctgactgtgcatccctctggagacgaagaggagggggaggcctgtcctctctgggatccattggtcacatccccctgaggattcccgaatgcctacctccagtgtcgtcaacatggagttctgaagtccatgtggctcttcacagtgaatcaggtgttaaggaagatgcagagacgccacagcagcaacacggataacattccacctgaaagctgtgaccaaggctggcccctctggggaactgggggccattgaacttgaagactgcagagccagcggtccttgggatcccgagaaaccgcagccaggcgctcagctccgaggcgagtgtggatgaaggtggcgtctttgagagtctgaaggcagaggcagcctccccaccagcgctcttctcgggcttatcaggcagcctccccaccagctcgttcccctccagcctggtgctgggctcctcggctggcggcggggacgtgttcatccagatgcccgcgtccagggaggaaggagggggccggggcgaggggggcgcctaccaccaccgccagccccaccaccatttccaccatggcggccaccgcgggggctccctgctgcagcacgtgggtggggaccaccgggggcactcggaggagggaggcgacgagcagcctgggacgcccgcccccgccctgtccgagctgaaggctgtgatctgctggctccagaaaggactccccttcatcctgatcctcctggccaaactgtgctttcagcataagctcggcattgctgtgtgcatcgggatggccagcaccttcgcctatgccaactccacgcttcgagaacaggtctcactgaaggagaagaggtcagtgctggtcatcttgtggatcctggcctttctggcggggaacaccctctatgtgctttatacattcagctcccagcagctgtacaacagcctcatattcctgaagcccaacctggagatgctggacttctttgacctgctatggattgtggggatcgcagactttgttctgaagtacatcaccatcgccctcaagtgcctcatcgtggccctgcccaagatcatcctggccgtcaagtccaagggaaagttctatctggtcatcgaggagctgagccagctgttccgatcccttgtccccatccagctgtggtacaaatacatcatgggtgacgactcctccaacagctacttcctgggcggggtcctgatcgttctctacagcctctgcaagtccttcgacatctgtggacgtgtgggcggagttaggaaagccctgaagcttctctgtacctctcagaactatggagtccgagccaccgggcagcagtgcacagaagctggtgacatctgcgccatctgtcaggccgagttccgagagcctctgattctcctgtgccagatgctgttgaaggggcacaagaaattggagctggagaagattgatgaaagtgcaggtgtgtaaggaaatagaacagtctgctgggagtcagacctggaattctgattccaaactctttattactttgggaagtcactcagcctccccgtagccatctccagggtgacggaacccagtgtattacctgctggaaccaaggaaactaacaatgtaggttactagtgaataccccaatggtttctccaattatgcccatgccaccaaaacaataaaacaaaattctctaacactgat

SEQ ID NO: 14691 - protein, 330 aa, Homo sapiens
MPASREEGGGRGEGGAYHHRQPHHHFHHGGHRGGSLLQHVGGDHRGHSEEGGDEQPGTPAPALSELKAVICWLQKGLPFILILLAKLCFQHKLGIAVCIGMASTFAYANSTLREQVSLKEKRSVLVILWILAFLAGNTLYVLYTFSSQQLYNSLIFLKPNLEMLDFFDLLWIVGIADFVLKYITIALKCLIVALPKIILAVKSKGKFYLVIEELSQLFRSLVPIQLWYKYIMGDDSSNSYFLGGVLIVLYSLCKSFDICGRVGGVRKALKLLCTSQNYGVRATGQQCTEAGDICAICQAEFREPLILLCQMLLKGHKKLELEKIDESAGV

SEQ ID NO: 14692 - DNA, 1746 bp, Homo sapiens
gtatgtacaaaggaagagttttactctttaagagacatataaagacttaagatactcaatgtgggacgacatattgagaagttaatatttttattaaatgtgtttgagttttggtcgactttctaaaaggtaatcatttaataaaaccttgaataggagttggtataaataaggaagggaaaagattgacaagtcagcccaaaagcacagacactttatgtaggcaaatgaatgtctgtggttatccactcacaacttaaactttgaaatccctgctttttgactgcctcccaggtttctctgctatttcgcaaatgagccctcactatctcaggtcaccctctcacctccttttccttggcctggagctgcaaagtcttcttttgcagctggtctctgagatcccagtctttctccttccctgtaccctcaggctccacttcgttagggaaggactttggactccacacgggcaaagcctgatctaaaaaagcagccagattcttggtgacagtgaggcccacacctctgaggaagggccctgagggtgaaaccactaggagtggggagaggggagggaacttgggagggcgtgcttttggctagactgatggcattctctgacataaaggttaacttccagtaggcccctgctaagcttggacagacagctggaatctgagctccttgagggcaagattgggatcttttctttgtatccccagtcctatctagtgctagatagttttagtgaatacttcttaattgaatttcattggttgtatgtcacattcttcctagtttgtcaaataagtttggtaaatgctttaatacaatcccttttccctgatgtcctcatttgaaagttgtgaagatggcagtcatatcctaaaatttatcttcatatggttaaagatggttttttagccaccctgcagtcttagtcttggtgaaaagagcatggactaggagtcagaagttttggattgttgttatagctgtgttgttagtttgtgtcaccatagactttcatgttcttatccatactctgtgagcataaaaatttctgccttatctattatattatgcccaatgattgtgaagagaaaacaaaaggtcgtgtgtagtggacaggtgaggagctattgcccctctgtatacacagtgaattctcaggaaacatggacagtagactctctagggctaacagtgagttgactctggactgctatgtggtttggggctggggagttggatgtgatttggaaaatcaagtgtgtaaaaattgacatgaaatcctgagttcaaaataaatttactgaaatgttcaacacagacatgtgctttcagagagaatagaaaccctttttcacagtttatatacctcaagatagaaggccaactagttgaagtgtcctcagagccaatgatcactccttaaaaagctcccacacatcccggacttaacagactcccagaactggctgggactccaggaggtcatgtagtccatcccgctgcctctaggcaggtaagagaagagcaatatcttagaatttgtggtaataaatttgctgacctttctttgttaagagtttctcctgttcttgaagctgtaaggattgattttgaagcaaacctgttggaaaacacaaggaacttgtctatgctagcatatttactacaaaaagttttcttttcagaactttgcttagaaccttggttattaaatatgttcccatctgc

SEQ ID NO: 14693 - DNA, 2484 bp, Homo sapiens
  CDS (389)..(952)
caggaatttggaagcaggctataaatctcatgaattccacccagaatcacatttacaaataaaaaatcatttgataaaaagatcacatgtacatgaagacaatggaaagttatttccttcatccagtctacaaatacccaaggaccataatgcaagagaacatatccaccagtcagatgaacagaaacttggaaaaccgaatgaatgcaaattttctgagtggcttaatatagaaaattctgagagaacaggtttgccttttcacgttgataactctgcttctgggaagagagtgaacagtaatgaaccatcttcattatggtcttcacacctaagaactgttgggttaaagccagaaactgctcccctcatccagcaacaaaatatcatggatcaatgttactttgagaactctctatccacagaatgtataattcggtcagccagcagatctgatgggtgtcagatgccaaaacttttttgccagaatctaccaccccctttgccaccaaagaaatatgctataaccagtgtgccacagtcagagaaaagcgaatctacacctggtgtcaaacttacagaggtgtttaaagctacctctcatcttccgaagcacagtttaagtacagcttcagaaccaagtttagaagtgagtacacatatgaatgatgaaagacataaagaaacatttcaagtgagagaatgttttggcaacacaccaaactgtccatccagctcctcaactaacgattttcaggcaaactcaggtgccattgatgcattttgccaaccagaactagactctatttctacctgtccaaatgagacagtttcattaactacctatttttcagttgatagctgcatgacggatacatatagattgaaataccatcagaggcccaagctctcttttccagagagcagtggcttttgtaataattcactatcttagagtgaaaaaggactagacctgtgttacataataatcttggttcaagctgcccttctgaacaaagatataaacctagcatacattgtaatagataactggtaaaactgaccaacttttacttctcagaggccatttaaatataataggaacctactgaccaaacctagtgatacataaaattaaagcctgtggcatttttaaagttgttaatcactatacatatgtatgtgtatatgtgtatacacatatataattttatgatcaatatcttagatattttagaaattccctttgaatagtcttggcgtgccgtgaaaaatagaaaatcagggagatataataattcatttgtcatatgctacagttgaataaaaattaaatttgtccccctattttgtggccagtagactgggaagtattaaactaaccagtactcatgtatggagattataaactatgctaattgaaaagtaccaggtgatacatagcctggtacttttttgtcaaagaattgctttatgaagaagcactttctaatgggtaaccagaaaagggcttcacccatttgtttttgacttctatgatagtcactgcatatgatccctttaagtgtctttaaaaaaatgacttatgaatttgatagcatttggggaaaaaaagccttatatgattaacaatttgtaagttttcaagatcggatggaatttaattttgctcctagaatttttgtcttcagaatatctagttaagataaattaggcctttgactattataggtattcataaatgctactttagccatgtaagttaaaaagttaaaatacttaaactttagtgtatttatttatctcgttactttttttctaattttatatgaaatgtgaaaggtctttattttggtttggtttactttgggctgctaaccaccagtgttaggaattaatgtagggcaccctcttattgggaatgtcactgtaattgcctacattttctttgctgtaatattacctgcttataggttgtcaacccattttatctgaatttgaaaatctatctaggtttccagattaaatttctacctttcatatagagagtttaattttaataaaatgtttaattagagcatccttcccttttattctactttgaacaaatagtaattttaccccaactacttttcatgaagagtgctttgaaaattaaaggaatttttattattatggtaaccttatgagtaaaaataagttactttaattgctttatttcgctgtcattttattttgtactatgctggtaaactaattgtggtttagaatagttttatgttcactcctgataactgagaaacagaactaaagttttccttacattgctaaatggataaacctcatattcaataaactagtaaatgtagccacttgactgattgcgtaaatcgtgttaaaacattctaaaatgttgtaactaatttaatgtgaatactgttaaacagaaaataattgcttataaaagtctaacttcacccagtt

SEQ ID NO: 14694 - protein, 188 aa, Homo sapiens [sequence omitted]

SEQ ID NO: 14695 - DNA, 1294 bp, Homo sapiens
  CDS (372)..(875)
agtagagtgtccggcttcggtgccgagtgccaccgcgagtgggccgagacgcggagggaggcgcggccggagctcgggtcgccgacgctggccaggaccgcgcttcttcccggcggcaggcggcgcggtccccgtgactctcagaagccgcccgatgtagagccgcttctttgtcccatacccctgaccattcgtgcgtggcacggagccgggtatctgcgggtacagcgatgaacagggcagacgtggccaggccacactaccatcacccctttctccaaccctgaaaaacagttcctgagacctgaactattgaccatcattttaatcggaccaactgcagctgtaacaagcttctctttggggtcacaatgaccactgcaggcaggggaaatttaggcctcatccccaggagcactgctttccagaagcaagaggggcgcctgactgtgaagcaggagccagcaaaccagacctgggggcagggcagcagtctccagaagaactatcctcctgtctgcgaaatcttccggctacacttcaggcaattgtgttaccacgagatgtctgggccgcaggaagcattgagccggcttcgggagctctgccgctggtggctcatgccagaggtgcacaccaaggagcagatcctggagctgctggtgcttgagcagttcctgagcatcctccctggggagctccggacctgggtgcagctgcatcaccctgagagtggtgaggaggctgtggctgtggtggaggatttccagagacacctcagtggatcagaggaggtttcagccccagcacagaaacaggaaatgcattctgaggagacaacagctctgggtacaacaaaggaatctcctcctacctaacccctcagtgggggctcagcccctggagcccacctggagcctccttatgacccagggacacaccacctccccagtggggacttcggatactgtggcatatgaggacctatctgtagactacactcagaagaaatggaaaagtctcacactcagtcagagagccctgcagtggaacatgatgccagaaaatcaccatagcatggcctccttgggtgagaacatgatgaagggttcagagttgactccaaagcaggaattttttaaaggatcagagtcatctaacaggacatcagggggactctttggggtggttcctggggcagcagagactggagatgtttgtgaagatactttcaaggagttagaaggacaaacctcagatgaagaagggagcagactagaaaatgatttcttgg

SEQ ID NO: 14696 - protein, 168 aa, Homo sapiens [sequence omitted]

SEQ ID NO: 14697 - DNA, 3493 bp, Homo sapiens
  CDS (40)..(396)
agaccggaaacggaggagagcgcgggggatgtgtttggcatggggacgcactgttacagttgcgctcctggttggctttgtgtttccgcggtgttggtagagtctcggtgtttctacctcttagcaccctttcctgccaccctttgtcctgtggaagcccggagacatcagcggctgcaattttgctactcgctgctcggcatggaacggtcaggtaccgcagttcagcgctcttggccccgcaggtcctcgggcatccccgtgccccgtgctgtacattcagttatcctccgacttcccggggtcgaaggtattacctgctgggttttagaatctattgctttacatctgagaaaagaaaaatcccagaaagataagatgacttgcccaagatcatagcgtgcctggaagacagtgctccgattacaagctggtcgctgtgcctcattcgtcttgtcatcaactcctgtcagtttatccaagctccaaaagcgaagttgttttagcttttgcttcccaagatttatttgatagtctcatttctgtttccttcgtttattctttcgttcattattggaaaactttacagcgtgccagtactggtcataaaccccagtgtgtcttaggccttagtgagctgtgaggtgcatgaccttaggtaagttacttctctgattttcagtttccttatctgcaaaatggagaccttagggagttaatgtgggtatgagaaatgtacataaaacatattgcacaaggtgaggcatgtagtgtatgctaataaatggtaagttgctgctgctatggttgttaacaataattataaaaagcaaatggaaaaggcttgaattgaaaaaaatttagacacatagtttttttccttattagcctgcactgtatttttcattttttttaatgcatctttccaggacaaaaaataatatccaaagatattttggcactaacagcgctatctgtagcaagaaagttgagcagtgtgaactgttgagacttccaagaagacttcagagaaccaagacagtgtaaaggaaaacaggaaaaaagacttgttagacattattaagggcacgaaagttgaattgagcacagtaaatgtacaaacaacaaagccacccaacagaagtccacttaaaagctacaactggcccgcctcaaagagctacagagcatgctccaaagaagagaaatgagcccgtgagtcctgagttggtggcagctgcatctgctgctctgttttgacaagcaaacaagccagaactgctcaggcagctccgtagcatgaggaggagtcaggggcacagagagatggagagagacctagttagagagcgaaccatgtgctggatttagccagtcctgcatttttctatacttcaaatcaaaacgggccatgcttcacatctacccatgatgaataggggtactttgattaagaataaatagagctgactgaattctgaacaagaaaaacatattcaaggggaagagatgtaatagttttgacgtgacgacagttactaaagaagcacctgaacagacacatcaccttcactttgggatgtggaatttgctaaataagccacagaaaatgaacatcccttcagaatgggtttgaagagctgatccagtggattaaagaggggaaactgggagtttccagttaacaatgaagcaggagctgactaaggctttggaacagaaaccagatgatgcacaatattattgtcaaagagcttattgtcacattcttcttgggagttactatggatctgtaaataactgacgaaaaacccatctgtttctacgtagttgctgttgccgacacaaagaagtcttatgaactcaatccaaataattccactgctatgctgagaaaagggggctggcggcatggagtcttgctctgtcacccatcctcgagtgcaatggcaccatcttagttcactgcagccttgaattccagggctcgagccatccttctgcctctgcctcctgagtaggtgggactacaggcatgtgccaccatactgagctaatttgttaaacactttttttgtagagacgaggtcttgctacgtttcccagactggtctctgaactcccggcctcaagtgatcctactgccttggcctcccaaagtactggcataatagacatgagccactgcacctggctcctaagttcttttcttgaataatatctttctttttttttattttttgaggtggagtctcaccctgttgcccaggctggagtgcaatggcgtgatctcggctcactgcaacttctacctcccgggttcaagtgattctcctgcctcagcctcctgaatagctaggattacaggcgtgcgctaccacgcctggctaattttttgtgtctttagtagagatgcggtttcaccatgttggccaggcttgtctcgaactcttgacctcgtgatccacccgccttggcctcccaaagtgttgggattacaggcgtgagccaccacgcctggccaagtaatatcttaatatcatgccattgacatttatcctctaattatttcagaggtggccttcagaagaaggcctctttggtaaaattgctattgaggatatttcactgaaaaacaaatttatctttaaatttaaatccaggaaaaatttaaactttcaggcttctatttttatcagacagggtaaaaaatttataactcagaatattaccctttcccctctttgtgtgatggattgcttggttttagttactgattatttaaaataataagttattcaaatctaggattttgatacaatagttcttctctagaatatagtgtgtgtgtgagagtatatttaaaatttttattaaggcccatggggcagcctttgaggaaaccagaccttggggatcgccaggcaggattagtggcaggaattgagagaacagagccccacagagctcctcggggaccgtcccccagtcacaagagtatctcaaggaagtagtcttctcccacatcccccaaagataactaccagagggtcagttctctgagcccttctcagtgtagaaaagacaagtgtcaaagcttccccactcaccctgagtttgccttctatgacaatacgtcgtttggcctcactgaggctgagcagaggatgctggacctcccaggatattttgggtcaaatgaagaggatgaaaccacaagtacacttagcgtggagaagctggtgatctagactgagaatcagcctgagcttaacacagctggggtctgctactcgcgttttgtagacttttgtgtaactatttgtaccgtaggacagaatgtgaggaggaagtaacacacacagaggaggatgtgtgtgtgtgcatgtgtttgaattcacaaggaagaaattatttatcttgagctttttcctttgttattcagtttttattggtttattactaataatgataataaaatgtaaacaagagc

SEQ ID NO: 14698 - protein, 119 aa, Homo sapiens
MGTHCYSCAPGWLCVSAVLVESRCFYLLAPFPATLCPVEARRHQRLQFCYSLLGMERSGTAVQRSWPRRSSGIPVPRAVHSVILRLPGVEGITCWVLESIALHLRKEKSQKDKMTCPRS

SEQ ID NO: 14699 - DNA, 1880 bp, Homo sapiens
gataactaaattgaaagtgctggcagtccatttggggattgattagaatctaggggagatgtagttgtcagtgttcattctgtatgtaactcctgtctttggtttcagatctggttaggttctgttgatccttggggaactttctcatttgtttttatttttgccttggatctatgaatacctgaatgtattgtctaaaatggaaaaatcttaatgtagccattctattactatcactgaccctaggcctgaaaaaagtcacacctagggttaagaaatttttattttattttattttatttacttatttagagacagtttccctcttttgcccaggctggagtgcagtggcatgatcccagttcactgtaacctctgcctcccaggctcaagtgattctttagcctcaagcctcctgagtagctgggattacaggcgcccaccaccatacccagctaatttttgtatttctagtggagacggggtttcgccatgttggccaggctggtctggaacccctggcctcaagtgatcaccttgcctgggcctcccagagtactgggattacaggcgtgagccaccacgcccagccaaggacatttttctagtagaatgcaacacatgtccaagttgtgcatgatccaaaaaaagtgactagcaaaaaaaagtaatgatgtcttcatgtccagatctagatatcttctacttcatgtaactaaagagtaagcacagtgtgaataaagcatcaaataagtacaattatcattttaaaataatgtcttattaatgtaattttaagagaaaaaaattaaacatataaccttaagtggacatagtacttccttaacacgttaatgctgcagggcacagtggctcatgcctgtaatcccatcactttgggaggaggccaaggcaggtggattgcttgagcccaggagtttgaaaccagcctgggcaacatggcaaaaccctgtctttacaggaaaaattttaaaattagccaggcgtggtggtgtgtgcacctgtagtccctgctactcgggaggctgaggcaggaggattgctttatcccgggaggcagaggttgcaatgaactgagatcacgccattgcacaccagcctgggcactgtctcaaaacaaaaaacaaaagttaatgctcacatagaaaggattctttttaacaactttgttgagatataattcacataaccccccaaaaaaagaaataaaaaataattcaaatactataaaattcactgatttaagatatataattcagtaagttcacagggttatgcagctatcctcacagtctaatttcagaacaatttttaacccagaaaggaatcctgtacccattaatagtcattccccatgaccccacccacctccccccttactctaggcaactgacccactttctgtttttataggttgtctgttctgggcattttctataaatggaatgaatcatataacgtgaagttttgtgatgagcttctttcacttaatgttttcaaggtttatccacgttaagtacttcatatatagcatgtattatggccaaataacattccattttatggatataccaccttcatcaactgatggacataggggttatttccactttttggctactatgaataatgctgctacatacattcatacatgagctttagagtggatatgtgttttcagctctctgggatataaaagagtagaattgttgggttaaaactccatgtttaacattttaagaccaggcacaatggctcacacctgtaatccccgcactttgggaggctgaagcaggaggatcacttgagcctaggagtttgagaccaacctgggcaatatggcaaaaccttgcctctac

SEQ ID NO: 14700 - DNA, 2363 bp, Homo sapiens
  CDS (357)..(959)
gctgtcggagctcagaccagcaggcctacgacctagaaagtgctcaaaaccccacttcctaaggcctagaaggagcgacgtgaagatataaggtctcactatgttgcccatgctggtttcaaactcctgggctcaagtgatcctcctgcctctgtcttccaaattgctgagattactggcatgagccattgcacctggccttcttttttgagatggcctcaggttggctctgcctggagagggggaagcttgtaaagatggcttagaaaaaaagtcctggctccatttctattttctcccttcttttgctggcctgtttcctgctttttgcaaattgcaggaacaagaccctgcagatggagaagatcaaggctcgtttgaaggctgagtttgaggcacttgagtcagaggaaaggcacctgaaggaatacaagcaggagatggaccttctgctacaggagaagatggcccatgtggaggaactccgactgatccacgctgacatcaatgtgatggaaaacactatcaaacaatctgagaatgacctaaacaagctgctagagtctacaaggaggctgcatgatgagtataagccactgaaagaacatgtggatgccctgcgcatgactctgggcctgcagaggctccctgacttgtgtgaagaagaggagaagctttccttggattactttgagaagcagaaagcagaatggcagacagaacctcaggagccccccatccctgagtccctggccgctgcagccgctgccgcccaacagctccaagtggctaggaagcaggatactcggcagacggccaccttcaggcagcagcccccacctatgaaggcctgcttgtcatgtcaccagcaaattcaccggaatgcacctatatgccctctttgcaaggccaagagtcggtcccggaaccccaaaaagccgaaacggaagcaggatgaataaagaaagggagagcacatgaagctttgctaattataacccctcaccttgaccagagtcattgatgtcctgatgtgaaacaacccttgcccaaccccacgaagtctcctatttaatgtgatggaagcacaacccctctctcactttgctcctatttctttctgctcttgggatttctggtttaggaagagatgtggttcaggtgctaaacagtgtgtctgatgatcccttctctcccactcacatttcaacccctgcccttgtttggagctaagggaagggcaaaaggctcagatatgattctctatctcttgtgcctgaggcctggagcctaaggagctgtagggtctgaggggcaggggaggcccatatcttgtttcaggtaaaggacccagtatttcccctccttgtacttttgccttaggttctcaagggacaatagtcttcatgttggattctccaacaggctgggtgcatgtatccccctactcctaccctcatctcatccttaaggcccagaggtagcttggacaagccctccttttcataatcatttgggaggcatggctgtaattctttagctttctccacttctgtctcccacatatactaaaattcttaggtactaggctgtgtgtcttgggatcttaagatcaatgaacctttccccaatatctagtctttgcaaattctagtagaagatttccacagtgaaatcagtgagccagaccaactctacatctcctgcctaacctactgcctaagtcattagggctgagggctcggctgtaggggcttccttaggctgagagtgcccccaggctgacatctgtgttggcttttgttcagaaccattactctggcacatgctcaatggtatattgcagggaggagaggagtagatttagatttgagtaaatgccaatcactttacacatgaaggtgggtgggactttccttccattcatcccttgctctcttggatctgaactcttctggagcctcagctcaggatagctgctggccactcctgtcctgtggattgtgcaggtggcctttcctcccaaaagaaaaggcatcaggctccccaagccccacagctctcctttccaccaaagccaggtttcctggtaaggtcactcgaagataagggatggggatgggggctgactgacaaaaaattttagccccaggtctcagtacctggctggggagggggatatttttccttccttaagtagttttacattgccacagtgtgtatgtgttcactatataaaatgttcctctgctctttgaaagtaagagtgttgtgtctgtacaaatccttttaacatgcattcattggagtaaattctgagtatctactgtgtattggataatacaaaagatgtaatgtcattt

SEQ ID NO: 14701 - protein, 201 aa, Homo sapiens
MEKIKARLKAEFEALESEERHLKEYKQEMDLLLQEKMAHVEELRLIHADINVMENTIKQSENDLNKLLESTRRLHDEYKPLKEHVDALRMTLGLQRLPDLCEEEEKLSLDYFEKQKAEWQTEPQEPPIPESLAAAAAAAQQLQVARKQDTRQTATFRQQPPPMKACLSCHQQIHRNAPICPLCKAKSRSRNPKKPKRKQDE

SEQ ID NO: 14702 - DNA, 2104 bp, Homo sapiens
  CDS (31)..(627)
gggagcggggcggcgggcgccggggctggcatggcgtggccctgtatcagccgcctgtgctgcctggcgcggcgctggaaccagctggaccgctccgacgtggcggtgccgctcactctgcacggctactcggacctcgacagcgaggagccgggcacgggcggcgccgcctcgcgcaggggccagcctcccgcgggcgcccgggattccggccgggacgtgccgctcactcagtaccagcgggacttcggcttgtggaccacgcccgccgggcccaaggatccgccgccggggcgcggaccgggggcgggcggccgcaggggcaaatcctccgcgcagtcctccgcgccacctgcgcccggcgcccgcggggtctacgtgctgcccatcggcgacgcggacgcggctgcagcagtgaccacgtcgtacagacaggaattccaggcttggactggagtgaagccctcaagatccacaaagacaaaaccagcccgagtcatcacaacccacacttcgggatgggacagcagccctggggccggcttccaggtcccagaggtgaggaagaagttcactcctaacccctccgccatctttcaggcctcagctccccggattctcaacgtgtgactgcctgcaccgtgacaccatggctgccgacaggacagggctggggagcggcctcaggacccactgccgcggggctgggcgagagcatggcatgggcccctgcgggagggcacagcccctctcaaagctgtcaccagggccaaagtgctggtgtggagcagatgcaccgatggacttggcacacccagctcagcctcaagcatcctcttgagaagcctgtggaaggctcctgcgttcgttaactgccatctggccgtctctcagttttgaaatctctgaggagcctgaggatcaagtcagttgggaaccgaattggtccatggaagctgaggaatgtggacacatccggcccttgaaagaaccagttatgtccacttttggtggatttcccaggatgcgtgagcacttgattaatttcataacctacagtgagacccttggctcttcctacaaatggcccctgcagttgaagctgttggaatcttgggccgtcacctgcatgactcatggtgatgctgagtatccaggaggaaatttccagaagaaacagaccgtcagtcacgggcttccacttcacagacctccttatggccaagatgagcctcatgttttaacaaaacagttcttgggattgaatgactcacatttaccttgtgctaggttctaaagattgaatccacattttgtcactaatgattttcccgctaacataaggatgatgagcagggcactatcatacacactggctgagaactggaactgtttttgggaaggtggcatttgtctcattccctgaaataccttaaaatgtcctctacaccaacccttccgtctaccctgctcacatgtacagtgacggggaactcaccaccttttgaagaggcagttcattttctttgcaaagctctctcctaacttcctccgtaaattccagccagcatggccacatgggtcacgcctggtgccttcacacgtttgaggggtcttcgtctctttttaaagcttagaggtacaagctcaggacagtcttcagtaaggaaatttgtggatttccctttggatctttcttcctctccagcccacaagtggctctagtgagacgagcatttaagctgcaggtggtggcactcgggtctcagagccaccagacgtgcaggtgggacagtggttccagctccgactgcctgtcagcgtccctcccaggtgctagccctggcaggcacagccctcccctcatgccagcaaaggaaatgctcttgatgagaggctcgctttaaagaagcccaaagcgtgtgcttatccaaggggttcagctattcctgacttcacggcttgcatgtttgatttttctaagagaaaagaggctgcctgctgggtgtctgtggaaatgagattaaaaactgtacaatctcagattttactaaaatgcaaaaatgtagtttcagtttcttaaattataagcacgagtcttctc

SEQ ID NO: 14703 - protein, 199 aa, Homo sapiens
MAWPCISRLCCLARRWNQLDRSDVAVPLTLHGYSDLDSEEPGTGGAASRRGQPPAGARDSGRDVPLTQYQRDFGLWTTPAGPKDPPPGRGPGAGGRRGKSSAQSSAPPAPGARGVYVLPIGDADAAAAVTTSYRQEFQAWTGVKPSRSTKTKPARVITTHTSGWDSSPGAGFQVPEVRKKFTPNPSAIFQASAPRILNV

SEQ ID NO: 14704 - DNA, 2365 bp, Homo sapiens
  CDS (1533)..(1892)
agttctacaggggtgagggatggaaggacttttttggcaatgatggaaatgagatgtctgcaggaagatgggatttacaaagaaataggaaatgtttatcattgaccatacaaagctggcttatcttacttgtagaagagtgtttggcagctgaaacccaagggaaagaaaggaagtgcgtcattataggcaattcaggctagatattatactaggtacttcatataccctcttttttttttttgcccccaacaaagagaaggggtcttgctctgtcacccagtctggagtgcagtggcaaaatcatggctcactgcagcctggagctcctgggcacaagtgatcctcccatctctgccttgagtagctgggacttcaggtgcacgccacaatgcctaattttttagttttttgtagacacagggtctcgctgtgttgcccaggctggtttcaacctcctggcctcaagtgatcctcttgcctcagcctcccaaatagcctcttcaagacaactaccccataaggtggattaccattactatgttacagataagtccttcgaaactttggaaagtttaatagctcaaagccacactaggtagtaaccactagagccagaatgcaaattcaagtctgcccaactccaaagtccatgttctctcaatataaagggaccatctcaatgtctaatctcatgttaacatttgtagccactgctctcagcaagtatttgggatgtggctttgtcctaggatccctgcacaataggaaattgtggtcctattgtatagtttgcagttattgtctctggaagggagtttgcagagttctcctgtggcgaagaggaggcaaggaaggctaagtgtcagttaagcaatagctattggggctacttctttgttaatcccataccccagatttctctcctgaccttttggggcaaagaggtgggtatttactaacttgaaggaaaactagagtggggaaaaggccggcaaattagtgacactttggcgagggagaaaaaggaggcagtttgccacttggagaagatgaggaagacagggttgcaagacggtgactccaaaagagggagctcgacaggggtaatgtaaacagagatgctaactaagtcagaaaactctcctggtgaccaaaagagaaccactattgggggtaatggctagatttggtctcctttaacttaaggaggggagatttgagaatgacagacagttgaacttcctggcagcagcaagcaaaaaacaaatcaggaagagtttagtgtgtcttctggcaggggacaccagggcccagcacaggagaaggtggcccctgtgagatactggtgggctatataggcgttttctgaggggctttgggaggcatggacaaaggtggaaacattgctgttggcttcggcagtatctgaatttactgtgagatggagggtttaaatctaaccccatggaatgcaggagtccatgaattatctaaatcgatcattttgatctttaatcaactctgcaattatgtgtaccttgtttgctcaattaaaccctgaactatttgagaatgaaagctatgctgttcctctagtgcaagcctcagggcctgtcctgtgcctacaggatgtccccattctgccaaaacctgtccctcttccagagactcctacttcaatgtctcttgctagaaacacatccctttcctcacacatccagtcactcatcaagtgtaatctgtctcctaaatatctctggaacctatcttcttttctccaagttaccatcacctcttgtctaaactgctacggaaacttcctaacctgttctcccatttccacttctgacttccatgctgcaatgagagtcagctatgaaaaacaaacctaaacatcgaactttccttagcttcttcagtggcttccaactgcttttggaataaagtcctaaattcaaagatcttgtataaatcaggctcatctcgcaacacccctctttgttctctatggcctagacacactggctttcagttcattacatgtcttgcctcagaccctcacacactgtcctctctgcctgcaacactcttcctttcactttccacctagctgatcctaaatgttccttcctcagggaggtcttttctgatttcttggtgggtcaagactttctgataaatcagttagcaccatgcattttccagagtttttattacaattgtaaaattatggctgtaataggctggctgcgctgctagattgtaagctcacgagggcagagatcttgttcacatcttgctcactgctatattctcattgctgagcacacagttgcagctcaataaattttgaatgaactcc

SEQ ID NO: 14705 - protein, 120 aa, Homo sapiens [sequence omitted]

SEQ ID NO: 14706 - DNA, 2738 bp, Homo sapiens
  CDS (104)..(958)
gtcacgtgtcccccccgcggggggcggcccttgagggcggcgcttccggtcggcggagcctggtggccgcagcggcggtggcgacgacggccgagacgtggggatggcgggcgccgggagcgaagcccggttcgccgggctgtcgctggtgcagctcaacgagctgctggaggacgagggccagctgacggagatggtgcagaagatggaggagacacagaatgttcagcttaacaaagaaatgacacttgccagcaaccggagcctggcagaaggaaaccttttgtaccagccccagctggacacgttgaaagcacgcttgacccagaaataccaggaactccaggttctctttgaagcctatcagataaagaagaccaaattagacagacagtctagcagtgcttccttggagaccctgttagcacttcttcaggcagaaggggccaagattgaggaagacactgagaacatggcagagaagtttctggatggagaacttcctctggattccttcattgatgtctatcagagcaaacggaaactggcccacatgcgacgggtgaaaatcgagaagctccaggagatggtcctaaaggggcagagactcccacaggccctggccccgctgccccccaggctgcccgaactggcacctaccgccccccttccctaccctgccccagaggccagtgggcctcctgccgttgcacctcggcgcatcccccccccaccacccccggtgcctgcgggacgcttagccaccccgtttactgcggccatgagttcgggacaggccgtgccgtacccaggattacagtgcccgcccctgcccccccgcgtgggcctccccactcagcaaggattctcttcgcagttcgtgtccccatatccgccacctctccctcagagacccccgccccggctccctccacaccagccgggtttcatcctccagtgagcgccggcgcggtccttcccgggagacttcttccacctggcgtgttgtgctctgctcacgggaaggaggctggaggtccgctctgtgccaagggctctggggccctgggccagcgtgtctgtctgattttagaactgtaggtcagtggtgagtagtaggagcccaggctttgggcatcaaggcagttgtgtgtgccgggttacagcctgacacctgtgcgttgcatcggtttgcattatccgtgtgatttctaagtatcttagcgttgatgaactcatgtttgggaagaaataggcctctcccccagtcccatttagaatcgtggtccttctgttgcagctttatttaatgagcatggttcatgatacttattttattttcgaaagacagtcctatgtgtctcacccaccggccactgcagccctggtgagggcgggtgggcgccggccggcctggaagagcgccgtggctgggccaccacctgtggctgcgttgttgctcactgaatctgttggggagaggtcaccatagtcaccgcctgacctggctgctgctcttgcttcagagccacaagcaaagtttgcactgggcccactgccgagtccagaggccggagaacggccactggtgtgggaggggagcgcacgagtgggactttgcacagcaaattgtgtccccagctcctcctctcccgcctgcctggagccggccctgaaggtttctatgaagaaataatcccccaatatttttactacgtgtgtgattttcctgttttatattgaaaaaacttttttgacactcccaagaccattcagggaaattttataaaaaatgcagatactgtcttgagcagatcgaaatgccgatgaagtggatgcaatttccttttgtgcaagcagtgcacggtgcccccccctcgggtgtccgtgctgtgccttagcttccccaggtgccgggactcacacctgctaggggctgggcaaggccccggctctgctttctctgaagggcttgtccaagttcattgccctgttacaggtggtcaagacgtccggccgccttgacccaggctacccttagccaatatcctctgcccctgggtggctggtggctgggcctcagggtgggcaacgttaggggtttggcgaaagcccgccccatgggattgagggacggggctgcactccaaccgtctgcacctgctcttcccccacccctgtgggacctcatcttcacgtgccatgtgtgctgaaggcccagggcccagcagggggcagtggcacctgttgacggaaaaggccgaggtgcttaccagtggaccttctggcccgcccctcccctgtcacttgtcgggcatccagggccccgacctgtgcctagccgccagggtgacagaaggcagaactgaagcggggtctgggccacgggccaggccactgccttttgtcctcagtgaccatacattcctgctctcggacttgaactctactgtaactgttttcttgaaatgaagctgtacaggacgattcactgccatgccagtcaggcgggcttgccatgttctgtgaatctcgagtgagcggtgccacccgcccccatacctccgccaccggccgctgtcggggatgccacagcctgccacggtcgcagccagacgtgagcttggcattgaagttgcaaagcggcccctggccgggctcgccgtcgctgtccagggccgtgtccggtgctgtggctgtaaagctgtaggaccctttttaataaatagagaattatt

SEQ ID NO: 14707 - protein, 285 aa, Homo sapiens
MAGAGSEARFAGLSLVQLNELLEDEGQLTEMVQKMEETQNVQLNKEMTLASNRSLAEGNLLYQPQLDTLKARLTQKYQELQVLFEAYQIKKTKLDRQSSSASLETLLALLQAEGAKIEEDTENMAEKFLDGELPLDSFIDVYQSKRKLAHMRRVKIEKLQEMVLKGQRLPQALAPLPPRLPELAPTAPLPYPAPEASGPPAVAPRRIPPPPPPVPAGRLATPFTAAMSSGQAVPYPGLQCPPLPPRVGLPTQQGFSSQFVSPYPPPLPQRPPPRLPPHQPGFILQ

SEQ ID NO: 14708 - DNA, 2724 bp, Homo sapiens
  CDS (889)..(1743)
aataacaatggaacatatgatggtattgcatattttgagtgcaaagaaaagcatggtatttttgctcctcctcaaaaaatatctcacattccagaaaactttgatgactatgtagacattaatgaagatgaagactgttactcagatgaacgatatcagtgctataatcaagagcaaaatgatacagagggtccaaaagacagagaaaaggatgtcagtgaatatttttatgagaaatccctacctagtgtgaatgatatagaagcctcagttaatagaagtagaagccttaaaatagaaacagacaatgtacaggacatttctggggtacttgaagcccatgttcaccagcagtcttcagtggattcacagatttcttcaaaggaaaacaaagacctcatttctgatgccacagaaaaggtttccatcgctgcagaagatggcactttagacaataccttttccgaagaattggagaagcaacagcagtttacagaagaggaagacaacctatatgctgaagcttcagaaaagctttgtacaccacttctggatcttttaacaagagaaaaaaaccaactggaagcccagctgaagtcatcactaaatgaggaaaaaaagtcaaaacaacaactggaaaaaatcagcttactgacagacagtttactaaaagtctttgtaaaggacacagtcaatcaactacaacaaatcaaaaaaaccagggatgagaaaatccagcttagcaatcaggagcttcttggtgatgaccaaaagaaagtaacaccccaagacctatcccaaaatgttgaggaacagtcgccaagtatttcaggttgcttcttaagttctgaattggaagatgaaaaagaagagatttcctctccagatatgtgtcccagaccggagagcccagtatttggtgccagtgggcaggaagaacttgctaagagacttgctgaacttgaactcagccgggagttcctgagcgcgttaggagatgatcaagactggtttgatgaagactttggtttgagctcttctcacaagatccaaaaaaataaggcagaagaaaccattgtacctctaatggcagaacctaaaagagtaacccaacaaccatgtgaaacattattggcagtcccccatactgcagaagaagtagagattcttgtacataatgcagcagaagaactttggaaatggaaagaattaggccacgatcttcatagcatcagtattcctacaaaactgcttggctgtgccagtaaaggtccagatatagaaagcactagtaaaagggtctacaaacaggcggtttttgatttaacaaaagagatttttgaggaaatatttgctgaggatcccaacttaaatcaacctgtctggatgaagccatgtagaatcaactctagttatttccgacgagtgaaaaatccaaataaccttgatgaaatcaagagcttcatagcaagtgaagtactcaagttgttcagtcttaaaaaggagccaaaccacaaaacagattggcagaaaatgatgaaatttggaagaaagaaaagagaccgagtggatcatatcctggttcaggagctccatgaggaggaggcacagtgggtgaactatgatgaggatgagttgtgtgtgaaaatgcagctagccgacgggatctttgagaccctgatcaaagatactattgatgttctgaatcagatcagtgaaaagcaggggagaatgctacttgtgtgacatcttgcaaataaatcgaacgctgagtgctaatcattgcttctcacaactattacctgcatctgaaaaaaaatctatagactccagctgctacattagagcataagagatgctctcctgggacctcagtaccctgccttcttgactggtttccgttcatcagtcctgtccctcttcaagtaatctagaagaatgtggatactcctaggcgtgaatgtaaatgccttaatattgaaggtcctggttagaagcatgatacaagacatctactggattcatatttacaaatatcctggaatgttatagcttcaaagtatattagaaaaaccccaaagatggtataatctttaagtgtgcacgttcgtttatttctgcatcttccctccaaacttgcctttgcatcttaaatatttcactatgcacactcccattcctcttgggtttcatcttgtcgtttaagaaatgtactgaaataatcattggaatatttgcattttgcacaatgactggtatgatagctcttgacaaataaggaaagcactgaaatgttgtgattgggtctcgggaaatgctcagattgatgtcttaccagcatttcttctgggcttgtgatgttgagctgtagtcttgtagccataatgagcaaattgactaagagaagcaaaggtttcttggggttattaaccagtagtgtggaaatactagttttatgtggccaaggaaaagcaaaggcttttcttttcagtttgtgttatttggaagacagaaaaacatcttgtctacatcctttggctgtttgtaggatcacgttgtccttacgatactgaaactttacagctgctgtaaattttttataaatgaatttcaaaatgttataatgggactgtaggttgtttttctacatcttcattatttggacctaaaaccagtttttaataagaaagtttatctttactctttctgaaattatgactccag

SEQ ID NO: 14709 - protein, 285 aa, Homo sapiens
MCPRPESPVFGASGQEELAKRLAELELSREFLSALGDDQDWFDEDFGLSSSHKIQKNKAEETIVPLMAEPKRVTQQPCETLLAVPHTAEEVEILVHNAAEELWKWKELGHDLHSISIPTKLLGCASKGPDIESTSKRVYKQAVFDLTKEIFEEIFAEDPNLNQPVWMKPCRINSSYFRRVKNPNNLDEIKSFIASEVLKLFSLKKEPNHKTDWQKMMKFGRKKRDRVDHILVQELHEEEAQWVNYDEDELCVKMQLADGIFETLIKDTIDVLNQISEKQGRMLLV

SEQ ID NO: 14710 - DNA, 3035 bp, Homo sapiens
  CDS (51)..(788)
tttataatattccacctaataatgaaacgaatttagaagattgctcagtaatgcagccacctgttgcctatccagaagaaaatacactactcatcaaggaagaaccagatttagatggtgctctactctcggggccagatggtgataggaatgtgaatgcaaatttattggctgaagctggcactagtcaagatggaggtgatgctggtacttcacatgatttcaagtatggtttgatgcctggtccttcaaatgatttcaagtatggattattgccagaatcttggccaaaacaagaaacctgggaaaatggtgaatcatctctaatcatgaacaagttaaaatgccctcattgtagctatgtagccaaatacagacgaacactaaaaaggcacttgctcattcacacaggagtgagatcatttagctgtgatatttgtggaaaactgtttactcgaagagaacatgtaaaaagacattccctggtgcataaaaaggataaaaaatacaaatgtatggtgtgtaagaagatcttcatgttagcagccagtgttggaataagacatggatctcgacgttatggtgtttgtgtagactgtgcagataaatcacagccaggagggcaagaaggtgtagatcagggacaggatacagaattccctcgggatgaagaatacgaggagaatgaagtaggagaagctgatgaagagctagttgatgatggagaagatcagaatgatccctctcgatgggatgaatcaggagaagtttgtatgtctctagatgattaactgacctactatactcctcaaggatgctgcatttggacctaatatgaatcgacaatttggattgttgaacttgaaggcttgcaaaatatggtacatgctggatagtagttatgttgctgtgaaaactgtagggtcaaagccttatagcaaaaaaaatttttttttatatttgcacaggactatacagcaaacaaccatgtggttggattacatggagtccccacatactcagtcagttatcaaagtaaaatattttttatttataggatatacagtaactatttgggtcctatgaaaatagtccttaaagagcttacattcatgtgctactttaacatgaatggagaaaatccatttatggaagtacagtgacaattgacccaatcactctgtccatcaaaccactcaggctagtttgtactagtagagttttgtttctatttttatttttattaattttattttttttaatacagattttcagtgaggggctttttcaaccccattggttctattttcttgtatttttccatttaatttgcttcataacttaaaccaagtctcttctagtcttaggtattatttctcgattttgtgctgatgggcatgtttataagaactggagaggtaatttattggaatgaactaactgacttcctccattcccctcttcctttttgacatgaattttactacttcacaaatgaagaatgatgttatgaagttaccgtggcgaagttgacaaataccactaaaatgattatgatttagaagtaactttcttctgctgctctaatctgataaatggttactatatgatattttctgacatggtatttggttttgggtatctgttactttggcactattcttgtttgcctctttatttttgccagtgtactatacctcagtcctatttgaaagacctaattgaaagaaaaatcatagaaataagtaaaatgatttgttttataatttatccaccatgtccagtttggttagcttgttatgcaatataagtgaaatatcaggtttttacccgtgtcccttttatcatgaaaattaacacaaaatgtgcattctcttttgtttcatacttagcgggatattgattgttttgaaattatgatcaatacttaatttatttttttctgtccttgaagtcactacaccttgatacagtctttctagtagtcaccatgattcaacagtctcaaaaatcttacaaataaaattctgagaagctttattattctataaattcttcagggtacaaagggtgacatattgaggtgaaattgtcagatttacttagcctggtgacatgaattagctgattgtggaactctcagcagcatttcacgtattgttaacatgtatggcatttattagcatattgtatattatataagattgagggatgtcatattttcagctttcttttaaataaaaattgagtatattttcctattttatatcaggtaactaaattatgctagttatgtggaaaaaattgcaaagatgctttgacagatataatccctttggtgctccatctgatcaaagttgaaaagttgatgttttttaagagacaagctttatcattgtctctgatttcagtagaataatggtttattgttagacaatgatgtttctgcttggataaatcaaagataaattacagttacatggttagatgcatcttttgtcatctatattgtagtttctacataactgtaaacctgacagataagaatagtttcggtttgatttttgtttaaaacagatgagtacttcttaatgttctagacaaatgagtaaaatgtatttctggtagaaattagttgggcaaagatactatgaatgaaaaagtattttaaacgtaaaatgttctttgtgaatatgtaagtatagtataaagatttctttcatcccatttatccccttcctttaaataaactagtttacaattggtagatctgtctatatataaatatatattaaagaacaaagatatatatctaaaaatcacctaaatctgctttattagactacagttcacttattgcatagaaactggacttggctttacattcttaatgtacttttacttttcctcaagatatgaacttactctcttgaagctgaattttcttttactacttaaatcatttatgtatatctggtaaattatgaccaaatttttgttagattgcatacagtaaattgaaatacacacttggt

SEQ ID NO: 14711 - protein, 246 aa, Homo sapiens
MQPPVAYPEENTLLIKEEPDLDGALLSGPDGDRNVNANLLAEAGTSQDGGDAGTSHDFKYGLMPGPSNDFKYGLLPESWPKQETWENGESSLIMNKLKCPHCSYVAKYRRTLKRHLLIHTGVRSFSCDICGKLFTRREHVKRHSLVHKKDKKYKCMVCKKIFMLAASVGIRHGSRRYGVCVDCADKSQPGGQEGVDQGQDTEFPRDEEYEENEVGEADEELVDDGEDQNDPSRWDESGEVCMSLDD

SEQ ID NO: 14712 - DNA, 2325 bp, Homo sapiens
agagtgccccggcgtctttctagcctccgcctccaggcgggtgaggaggtgacacctgagaattcctccctctcacccctgaccctgccggaaagcgaaactgagatgcgggcattgggccctgggaagcgtggggaaggggaaaggagaaagccagaaaatggagaaattaagtcctttccatggatcattccttctgtaaacagagatcacaaagcaagagcttcagcatcctcgtgaaaaagacattttgttctgggtgtcatcatctccttccactacagcttgcaattggaacaagcttcacatcctgggggtgctgcctatctctgtcttgatttctgtctgtctattcctcccattgacaggaatgtcgtttgtatcctccacgcagcagtttgcagaaatccagcaaggtttatggtttatgttgcccagcatgtataaacacaacgctctcaaatgctttttaaaaatctatgaatttgttagatgtcttcacatcctggtcctcctaccccaattctcaaacacaaagtactctgttgccctattatagtcctgcgatagttctggctaggattaggttgacggtctaagccccaagaaaggcctggcattttcatagcaggctttccccagtgctttgagtcttcctctctcactccctttttctttttccctcggaggagggggtgttgggggtgggaggtgattagtaaatgtttcaggtaatctgtgaattcttaatagtcatatttccgtggtggaagatctccctatttctctgatgtgacaggttacagaaaccttggtgttgggggttttacagatatttacaagttctaggagtttgaactttgggtcaagatgttgattccttttaatgtgcgagggtgaaggaggttttattttgctttattcttttggatattatgagatgagattgtatccagtcttggctgtaacctataccataaatgcagagctgcaaccattatttctgtctctttctccttttatcacctacacttctagagatattactttcagttttattgcaaatcatctgtgtctttagtttaaaccattatttttcatataccccaggcacatttcccttataatgagacaaattttagattattaatgttccacctaaaaggatactgtacacttttcattgccaatatgggctttgaagcttaaatatcaacatttttataggaaatttacccatgtcaaatttaaatatatttgcttatatttcttggaaaaaagattttggataactatcaattaagcagccaattccatttggggtgcagaaaattttgagccccttgataagaaggaacaaaatttttcctctaaataaccaactctggatcagaaaaactgaacttttctaaatatttattattgacaaaacttttttttgtctgattccactagaagcattctatgttgtgaacactataaagttatcctatgttgtgaacaccataaagttatgagggaaaaaatgtcaaatctaaattttatttagaagtaagatattgtttttctggacttgcaatccaattcgaatgcatcgttagacttttctgttttcttatgattaaacaacaatggcttaaaatgatagcaagtcaactgaaaagttgctttggaataaaacaaaagtgggaatgccaactttcttttcttctctataacttcattaacatggttgtatagacatttgcatgtaaaatgtagctaacaaaaattacacagaagtaaatttagtcctctagtgcctacctctatggtgaaatcagaccatttggcatagtttgaagtcttccaagaagcctggtttccacctggaaaataaattactaaatttgaatgtgttacttatactatggtgagttgtctatctgttacattttattttagtgcatatactagaaattgtatttagggtgttctaaaattgtcatctgtcaaggtagagaattataataatatactcagaaagcgttctgattttagattattttggcactgttacaaatatgatgaattttaaaaaaatgcagaatgtttattacaaattcatatgtttaattgtcaaattctgagattaatttagataagctataaccaaagtttattttctttgcatttattggtacatagttaatgcttatacacaggcttcagtgtaacacctatacactactacaatatttagctgtacttatttgctttatctttaaatggtactttgtcccaaaattttctgagcttgataaattattaaacatttatcaaatc

SEQ ID NO: 14713 - DNA, 2321 bp, Homo sapiens
  CDS (355)..(1527)
gtgccgcccgggagaaccaggtcatcggtcggttcccgtgaaaacaaaaacaatcggccgcgccgtcgcaggcacccgaacgtcgcgagcggggcctggggacgcggagccgagtgcagcgagcgaacgggagcagcggcgactcgccggggggctagggcgccatggggcaggcgggctccggctgcgcggggctcccccggcgccgcggctagtgcgcccgccgcctcggccgcctcagcctcccgcgccgcccgcttggggaacgaggagcaggacgcggcctcggtggggcccgggccgaacggctgcggacacctgggcgccgaggagccgagcgccgccgtctccggcatggatcagtgcgtgacggtggagcgcgagctggagaaggtgctgcacaagttctcaggctacgggcagctgtgcgagcgcggcctggaggagctcatcgactacaccggcggcctcaagcacgagatcctgcagagccacggccaagatgctgaattatcagggacactttcacttgttttgacacagtgctgtaaaagaataaaggatactgttcaaaaattggcctccgaccacaaagacattcacagcagtgtttctcgggttggaaaagccattgataagaattttgattctgacattagcagtgtgggaatagatggctgctggcaggcagacagccaaaggcttctcaatgaagtgatggtggagcacttctttcgacaaggaatgctggatgtggctgaggagctctgtcaggaatctggtctttctgtagacccaagtcagaaggaaccatttgtggagttaaatagaatattagaggcattaaaggtcagagttctgagacctgctctggagtgggcagtgtcaaaccggggaatgcttatagctcaagacagctccttggaatttaagctacacagactgtattttattagcttgttaatgggtggaaccacaaatcagcgagaggcattacaatatgctaaaaattttcagccatttgccctaaatcatcaaaaagacattcaggttttgatgggaagccttgtgtacctgagacaagggattgagaactcaccatatgttcacctacttgatgcaaaccagtgggctgatatctgtgacatctttacacgggatgcttgtgccctcctggggctctccgtggagtcccctctcagtgtcagtttctcagcaggttgtgtggcgctgccagctttaattaacatcaaagccgtgattgaacagaggcagtgtactggagtttggaaccagaaagatgaattacctattgaagtggaccttggtaaaaagtgctggtatcactctatatttgcctgccccattcttcgtcagcaaacaacagataacaatccacccatgaaattggtctgtggtcatattatatcaagagatgccctgaataaaatgtttaatggtagcaaattaaaatgtccctactgtccaatggaacaaagtccaggagatgccaaacagatatttttctgaagagataactttagtttgcaatttgtaagtgaaattgaatcgtgggtgcatttcagaagagaacgttccatataatgcagctaaccaaggactcctgtgtttctataagctaatgctccagaaactttgccaacctgttagtgtacacacactgaggggagtgctcccggtgaatattatcatagggctttattatattcttggtcttcatttctgatcaagtaaatacaccagcagttgtcattcaatgcaggtttttgtacttaattatatggtgatttttttactttttaagagcagaaacggaaattgacctccccgccatgtgtctaatattcctcctgcttttacttttgtcattttcttgataatcgtaagccttgagagtgtttgtgaaaaagttttatttcctgttatgtatacataattaaatgaaaattcttcagaaaaagtttgataaattgaattgtggttatgaaactaatttgcatttttatttgcttaagaaagaaagctgtgatagattccagatatgctttttgatgttttcctctgctccagctccaagaagtcagcacacctgcattttagctctgcatgcagccccagcaggctgcgtgtttaagaatttcattgtttaactggctggtgtgagaagtcttccgttagcatagagtggaaggagtactattgtttggttgggtttttgtttgtttgttttttgtttttgcttttattgccaagaggtgcttgttttaaaagtatgtttaataaaatgaaattctaaagtt

SEQ ID NO: 14714 - protein, 391 aa, Homo sapiens [sequence omitted]

SEQ ID NO: 14715 - DNA, 3804 bp, Homo sapiens
  CDS (125)..(2230)
ctctcgggcctgggcggcgcagacgaggcctgaggcggcggcgcgaggcagttccagctattcttcagatgctctggattttgagacggagcacaaattggaccctgtatttgattctccacggatgtcccgccgtagtttgcgcctggccacgacagcatgcaccctgggggatggtgaggctgtgggtgccgacagcggcaccagcagcgctgtctccctgaagaaccgagcggccagaacaacaaaacagcgcagaagcacaaacaaatcagcttttagtatcaaccacgtgtcaaggcaggtcacgtcctctggcgtcagccacggcggcactgtcagcctgcaggatgctgtgactcgacggcctcctgtattggacgagtcttggattcgtgaacagaccacagtggaccacttctggggtcttgatgatgatggtgatcttaaaggtggaaataaagctgccattcagggaaacggggatgtgggagccgccgccgccaccgcgcacaacggcttctcctgcagcaactgcagcatgctgtccgagcgcaaggacgtgctcacggcgcaccccgcggcccccgggcccgtgtcgagagtttattctagggacaggaatcaaaaatggaaggcagcctctggagtgttctggtggctggggattggatggtaccagtttgttactttgatttcttggctgaatgtgtttcttcttaccaggtgccttcgaaacatctgcaagtttttagtcttgctcatcccactcttccttttactagcaggtctctccttacggggccagggcaatttcttttcgttcttgcccgtgttgaactgggcaagcatgcatagaacacagcgggtggatgacccccaggacgtgtttaaacccacgacttctcgcctgaagcagcctctgcagggtgacagtgaggcttttccgtggcattggatgagtggcgtggagcagcaggtggcctctctgtctggacagtgccaccaccatggtgagaatctccgagagctgaccactttgctacagaagctgcaggctcgggtggaccagatggaaggcggcgctgccgggccgtcagcttcggtcagagacgctgtgggacagctcccgagggagactgactttatggcctttcaccaagaacatgaagtgcgtatgtcacacttggaagatattctgggaaaactgagagaaaaatctgaggccatccagaaggaactagaacagaccaagcaaaaaacaatcagtgcggttggtgagcagctcctgcccacggtcgagcacctccagctggagctggatcagctaaagtcagagctgtccagctggcaacacgtgaagaccggctgtgagacagtggatgccgtacaagaaagagtggacgtgcaagtcagagaaatggtgaaactcctgttttccgaagatcagcaaggcggttctctggaacagctgctgcagaggttctcatcacagtttgtgagcaaaggcgacttgcagacgatgctgcgagacctgcagctgcagatcctgcggaacgtcacccaccacgtttccgtgaccaagcagctcccaacctcagaagccgtggtgtctgctgtgagcgaggcgggggcgtctggaataacagaggcgcaagcacgtgccatcgtgaacagcgccttgaagctgtattcccaagataagaccgggatggtggactttgctctggaatctggtggtggcagcatcttgagtactcgctgttctgaaacttacgaaaccaaaacggcgctgatgagtctgtttgggatcccgctgtggtacttctcgcagtccccgcgcgtggtcatccagcctgacatttaccccggtaactgctgggcatttaaaggctcccaggggtacctggtggtgaggctctccatgatgatccacccagccgccttcactctggagcacatccctaagacactgtcgccaacaggcaacatcagcagcgcccccaaggacttcgccgtctatggattagaaaatgagtatcaggaagaagggcagcttctgggacagttcacgtatgatcaggatggggagtcgctccagatgttccaggccctgaaaagacccgacgacacagctttccaaatagtggaacttcggattttttctaactggggccatcctgagtatacctgtctgtatcggttcagagttcatggcgaacctgtcaagtgaagacactactcattatttttgtacatttttgtatatactgggacagcgtgaaacactggaatccttcatggacgagggcatatacaatgatgggacagtgccacactccttcaataaacgtggctgctggccagaggacgtgagcgtgtgacgggcgccttggcgccacctgttgggtgctcactgcctctgcaggtgcagaggggtcagcagcaggagaagcgtgttgaacacgtggctctcagacactccttgtttttaacgggaagctctttgcatttgcatttcctcaacaaaggagcaaagcagaggaagctgagagtctggcgtgttcttgacgctttggtcttcagccttgcactggctcttctaaaggacttttggagggcagataatttcatctgttaaatccaacacacatttctttcagggaaaaacaatgtcaccaaattttcagagttctaaactcctttccttcaagccggaattttccttttttcagcaccagtaggtactaagtctccagatggggaaataactaaaatgtgtttttctgctttgttcgctcttacttctgaggaaggtttccagtcaggactcgctgtaccaatatccatggaggaatatgggagcgtttcgctctccttgtaggctgaagtcagtctgacttgaaggggcctggtttggatctaagcaaacacccagatggggttctctggtctcagcaaggcttttcctgttgggagtcacagtaaacagaaacccaaaaatctcatcttgggtgttttcagggcttgttttgagttttgctgaatagggagcgcaagacgccctgagcctccctctcactggtggtgataagaggagccgtctggtgtgtcagggtcacgaacccgttacatttcaggacgatcctttttccttcagcagcatttcttactggctgtggctggaatctgccttttatcacagctgtcaccattctcacgtgattcttgtgagactctttttggttataattactatttaatatttagactattttactgagcagactttataaatgagatatctacaaggcacttaaagtgttacagatgttttaccttaagaattatttaagttgtgttgggttaagacagttttcagtgtaccgtaaatgttgtgttttcagaaaaagacaaaacgatggtgctgactggttttctgtatattgcacaacagtcctcaaatacactgatgtatgaaactattcatacatcaagcagcatttttttcactctccttagaattggaactatgcagttaaggcagataaaatgtacagatgtttcatatattacaggttacatatataaatcaaaatttcctatataaaactgatttgggatttggggtggaaatattttgaatattaatttatttttaaagatgcaagataggactttgtgcaatgtatttttgtaaatgcttttcaaaatatctgtctttggtagtgcttctgctgctgccaccaaattgataagatgctattaagaggtttaaataaagagttttaatttttaaaaggg

SEQ ID NO: 14716 - protein, 702 aa, Homo sapiens [sequence omitted]

SEQ ID NO: 14717 - DNA, 3382 bp, Homo sapiens
  CDS (220)..(537)
gcagccaagcaccacattactattgcagagatctatgagactgaacttgtagacattgagaaggctattgcacattatgaacaatctgctgattattacaaaggagaagaatccaacagctcagcaaacaagtgtctgctgaaggtggcagcatatgctgcccagcttgagcagtaccagaaagccattgagatctatgagcaggttggggcaaacacaatggataatcctttgttgaaatacagtgcaaaggattacttcttcaaagctgccctctgccacttcatagtagacgagttgaatgccaagcttgctcttgggaaatatgaggaaatgtttccagcatttactgattcaagagaatgtaaattattgaaaaaactcctagaagctcatgaagaacagaacagtgaagcttacactgaagcagtgaaggaatttgactcaatatctcgcttggatcagtggctgaccaccatgttgcttcgcatcaaaaagtccatccaaggggatggagaaggagatggagacctaaaatgaaatgtttttgtctttgtggcatgcagctaactcctctttagttttgtcttagggtcaagtgatctttatgggatgcctatttaatggcttaattttgttgcatatgagccagacggcctgtgtattgtttaagctcgccaagtctgtgttgctgtgaaatgaatgaaggagaggctcctgttcatcttgtggtaatgatgggttgtttcatgcttatcagaacccccagcgttttctgagaagtacttcagaatctcattcctcatatttcattggtatttgtggagcctatgtttaatgttgccacgtgtttttatgtcctttttgttggacttgagtactcagcccagttgttctcatagatgctttgcattttctctgtgctttggcatctgaatatgttctttaaatgtgtgtttagtttaggacagttactaggaatgagtttataacttcattagaaatcatttctatttttgttatcctgtgattattttgatggtgctagtgactagtttctttgctttttgtgttgttccgtatgctaacatgtgcatggcaaaaatttagaatagccagggtctgtaggcatcacattgtgaggaagggagctttctggaagtacttgcttcatgtatggatgagtgtcaaagtgaatttgatttgtacttagacacacgcgtgcacacacacacacatatcacaagatctgttagaaatggaatttttctctttttctggagatagttttcacttttagttggagtggaaatccctttatatttacattgaagtattttaattggcatagcctgctcattattttcatgtttatacactttcccacgttgaggtggtgtgttctgtgctgtgactatagaaatcttggtcagggctggatagattatctaagtcaagcttgagaatgaatgtatgtaattttcctgtttattgtacatgatgggttaggtggggtgaatgtggtacaggaatgtcctgtatgcccaagtgggcaagaaccccaacttgtttctcaggggacttgattgttctcttagctggtggaatatgttggcttatgtgtttgaactctgtcgtgtttaattggtttatataatatatgtatgctatcttgattcatgaacttgattctattaatttatatgctgatattgtactttagacatacgcttgtctcctgaatgtcctctgaatattttatagttaaatgatttatatttgaaatgtgttgccagacttaacccagcagacactctgacatcacggagcttcactgatgacaggtaacgaaacttcctatgttatgtcaggtagtagtaagtagtattggaatgatgttttcatttttggtggctctcaactggaattggtagtgtttccaggccaagggtcgactgcaggttgtttgagaaatgatgagtaggtcagtctaggaagaaagagaaagtagcaggaaaggaagtgggaagggccagccaaggacagactgtagaggatccacatcaggtggccacgaggacttgcaggctatagttatggtggtgacatgcatgaggtgggctggtagagcaggaagctctgtgatgtcagagcatctactgggactacaggtgcactgtagtccccactactgggggtggcaatgaagacactctgtctgttgggccctagaatttaatgtggatttcctccttccttccaagttctgagattcttaaatgagagctggctgtcttctagaggtaagacctggaatggagtccagttggtactttttcactccctcttagaatctcttatgaaaaaatgatcagagagaaaagtggggttttgtttccccacctaatatatcctacaaccagccaaatgcacttttgtgaaaatggggtgtgaggagtggttctgcagcttgagtcctctggttttaagtagtttgtttctacttgtttaaagaatcttctggtctgaccacttaaagtaaaaactacatgatttattttcgggcaattatgtttagctttcatcattatactccaacagacccgtctgaaggggtatttttttttaacaataatgtttgtaacattttgttgtgtcaattagagggtcacttgtttgtattgcaataaacactgggaccagttccggggttaagaattaatttttgtttttaatatttcacatgaaaagaatcaaagtaattgtaatggctagaagagacctgccagaagattaaaaaaaagaatgagagaaaagcccagttagtggtgtgcaaacttacttcctttaaatgtcccatggatgtaggacagtgccatgtttcaagatgcctgtgagctaggtcttcaagatttatagaatgttacttatgaacaaaatataattatttatggtacaatacttgtactttagcaaatctggagttagttcatagtcaaagtcagttaatatttcttagaggaaagtttagctttttgtggcaacatttttatagcttgtgtgagttcttttttatttaatgatttgaaagcatttttgcacagtcgtgaccgtgtgtggtggcgtcactgtaaccaaagtatatgcaccagcccttgtgcatttattgtttctcctgattttgtggatttaaatgtccaaatgcaaacctttgtgacttcctttggaggacttggcagcacagcatgcccccgtgacctgcctgctgtggtatgagctatgaccaagagcaggcttcctgctccatggagtcctgagttgctctggggcaggggattatgttatgaaaactaaccatgtgtaacaataaatctaccttagc

SEQ ID NO: 14718 - protein, 106 aa, Homo sapiens
MDNPLLKYSAKDYFFKAALCHFIVDELNAKLALGKYEEMFPAFTDSRECKLLKKLLEAHEEQNSEAYTEAVKEFDSISRLDQWLTTMLLRIKKSIQGDGEGDGDLK

SEQ ID NO: 14719 - DNA, 2258 bp, Homo sapiens
  CDS (10)..(2085)
gcattttttatggttttgtttcaaaagccattttcttctgggaaaactattaccaaacaccagtggatcaaaatatttaaacatgcagttgctgggtgtattatttcactcttgtggttttttggcctcactctttgtggaccactaaggactttgctgctatttgagcacagtgatattgttgtcatttcactactcagtgttttgttcaccagttctggaggaggaccagcaaagacaaggggagctgcttttttcattattgctgtgatctgtttattgctttttgacaatgatgatctcatggctaaaatggctgaacacccagaaggacatcatgacagtgctctaactcatatgctttacacagccattgccttcttaggtgtggcagatcacaagggtggagtattattgctagtactggctttgtgttgtaaagttggttttcatacagcttccagaaagctctctgtcgacgttggtggagctaaacgtcttcaagctttatctcatcttgtttctgtgcttctcttgtgcccatgggtcattgttctttctgtgacaactgagagtaaagtggagtcttggttttctctcattatgccttttgcaacggttatcttttttgtcatgatcctggatttctacgtggattccatttgttcagtcaaaatggaagtttccaaatgtgcttgttatggatcctttcccatttttattagtgctctcctttttggaaatttttggacacatccaataacagaccagcttcgggctatgaacaaagcagcacaccaggagagcactgaacacgtcctgtctggaggagtggtagtgagtgctatattcttcattttgtctgccaatatcttatcatctccctctaagagaggacaaaaaggtacccttattggatattctcctgaaggaacacctctttataacttcatgggtgatgcttttcagcatagctctcaatcgatccctaggtttattaaggaatcactaaaacaaattcttgaggagagtgactctaggcagatcttttacttcttgtgcttgaatctgctttttacctttgtggaattattctatggcgtgctgaccaatagtctgggcctgatctcggatggattccacatgctttttgactgctctgctttagtcatgggactttttgctgccctgatgagtaggtggaaagccactcggattttctcctatgggtacggccaaatagaaattctgtctggatttattaatggactttttctaatagtaatagcgttttttgtgtttatggagtcagtggctagattgattgatcctccagaattagacactcacatgttaacaccagtctcagttggagggctgatagtaaaccttattggtatctgtgcctttagccatgcccatagccatgcccatggagcttctcaaggaagctgtcactcatctgatcacagccattcacaccatatgcatggacacagtgaccatgggcatggtcacagccacggatctgcgggtggaggcatgaatgctaacatgaggggtgtatttctacatgttttggcagatacacttggcagcattggtgtgatcgtatccacagttcttatagagcagtttggatggttcatcgctgacccactctgttctctttttattgctatattaatatttctcagtgttgttccactgattaaagatgcctgccaggttctactcctgagattgccaccagaatatgaaaaagaactacatattgctttagaaaagatacagaaaattgaaggattaatatcataccgagaccctcatttttggcgtcattctgctagtattgtggcaggaacaattcatatacaggtgacatctgatgtgctagaacaaagaatagtacagcaggttacaggaatacttaaagatgctggagtaaacaatttaacaattcaagtggaaaaggaggcatactttcaacatatgtctggcctaagtactggatttcatgatgttctggctatgacaaaacaaatggaatccatgaaatactgcaaagatggtacttacatcatgtgagataactcaagaattacccctggagaataaacaatgaagattaaatgactcagtatttgtaatattgccagaaggataaaaattacacattaactgtacagaaacagagttccctactactggatcaaggaatctttcttgaaggaaatttaaatacagaatgaaacatt

SEQ ID NO: 14720 - protein, 692 aa, Homo sapiens [sequence omitted]

SEQ ID NO: 14721 - DNA, 2262 bp, Homo sapiens
ttgcatttccccctcctcagatgggaagcctggcaaagctgcccaaccgggtagtgcccctcacccatcggatcactgccttcttcctcctcttgccccattcacccgcttccttgcactctgggagtggggcagggtaaggtgggccttacagacaggctgaggtttgggtggtgtgatctgtcctaattggcccctcaccaatgcatctatctgtctgccaccagcccaccccaccctgcccccaccctcacccacgcttctgctcattggtctcaatcccagcctggaagcagggagtaaggctggactccaatggcccattcccctcaccccagcccaagacgtgggaggctgcttcccagtaagaatccaggagcaagctttggtgaatccagtgggctgagtggctctatggatgtggttgtttggatgtggtagggagtgcttagcagaatgtgtgtgtatctctgaggctgtcagggggtgggtgggtgtgtgtctctgttggacctgtctctcctcagtctattcctgtcatagatgtgggtgtccctggtagggaagtgcctgtgtggtctgtttacagtgcagaaggcggctcagcagtgcaatgggctgacagccttggaccgggagtcagaagcctgggttctggttgtagctctggcccctccctgtgatcttcaacaagccacttgctttctctcgtcttcagtttcctcaactagaaaatgaacagcagctgaaattatgttgaagatccttttatacctgaaagagtttcttcatagaaatttctgtggtggggagggggcaatctctgtgtgtctcagtatacctaaaggttggggtggggcggagttgtgtgtctctgtagaaaggcgaaggggcagttcctatcaggactgtgtatgtctgagcacatgtggctctgtttgggattacgtgtttgtctgtgaatgtgtgtgtgtgttggagggttgtctattgtgtgtggctgtatagggtgtctgtagatcaagatgtgtatacagctgcttctgctattgctggtttgggggaggggactggaaagctgagactgaaaatcaagagggaagaggcgaggaaggcccacccctggggctgggcagtgtagacctgccaccgtgtgaagaaaaatgaaagcacagatagcctaagactgcacaggcctgtgcccacataccttatagcacaggcccaggtggatcatctcatgctaacaccccacatgtgctggtggatccactcccatggatccactcacatgctgcaggcatgcagtagactcacccacagcccactctctggacaccaatcctgggaggtgggagctggaatggggagcaatgagaggagggagtgagactgttggcttaggaagggtggtacctctccctgcatcatacccaggaacttccagctccaaaatattggggtacagctcaccaccccccactccgccaacccattcctacctcctctagtgcagggacccaagttagatgatgagaaaatgccaaacaaagggaggcaaggacagagaaggtacctgcaggacccacaaggcccatactggcccccatctgaacccacctctcccacccagatcaacatccccccaacccctgtgcccccatcatctggaccccagagccagccctcccactaccaccaccaccaccccggggctccttggctcacctttctagaacatgggtacctcctctttttgggggctcatttagactgctgcctttgctgctgacttgcagtgtgactcgggcccattgttcaatctctgtggccctgagacaccagggaaaatctccccccccacaggacatactagttccctggcaggcaagggcttccaactgaggcagtgcatgtgtggcagagagaggcaggaagctggcagtggcagcttctgtgtctagggaggggtgtggctccctccttccctgtctgggaggttggagggaagaatctaggccttagcttgccctcctgccacccttccccttgtagatactgccttaacactccctcctctctcagctgtggccgccacccagccaggtttctccgtgctcactaatttatttccaggaaggtgtgtggaagacatgagccgtgtataatattttttttaacattttcattgcagtattgaccatcatccttggttgtgtatcgtgtaacacaaataatgatattaaaagcatcaaacaagcc

SEQ ID NO: 14722 - DNA, 2654 bp, Homo sapiens
  CDS (98)..(1027)
ccccgcctccgcccccggctggcgtgagctgggtgtttcctgcctctctcagtccgggtttggagactcctgcgtcctccgacttttcgtggaagagatgtcaggagaaagtgtggtgagctcagcggtgccagcggctgctacccgcaccacttccttcaagggcacgagccccagctccaaatacgtgaagctgaatgtgggtggagccctctactataccaccatgcagacgctgaccaagcaggacaccatgctgaaggccatgttcagcgggcgcatggaagtgctcaccgacagtgaaggctggatcctcattgaccgctgtgggaagcactttggtacgatactcaactaccttcgagacggggcggtgcctttacccgagagccgccgggagatcgaggagctgctagcagaagccaagtactacctagtccaaggcctggtggaagagtgccaggcggccctacaaaacaaagatacttatgagcctttctgcaaggtccctgtgatcacctcatccaaggaagaacaaaaacttatagcgacttcaaataagccagccgtgaagttgctctacaacagaagtaacaacaaatactcatataccagcaattctgacgacaatatgttgaaaaacattgaactgtttgataagctgtctctgcgctttaacggaagggtcctgttcataaaggatgttattggggatgaaatctgctgctggtccttttatggtcagggccggaagattgctgaagtctgttgtacctccatcgtctatgccactgagaagaaacagaccaaggtggagtttcccgaagcccggatttatgaggagaccctgaacattttgctgtatgaggcccaggatggccggggacctgacaatgcgctcctggaggccacaggcggggcggcggggcgctcccaccacctggacgaggacgaggagcgggagcggatcgagcgcgtgcggaggatccacatcaagcgccctgatgaccgggcccacctccaccagtgagcaggcaagagaccgagccgccctcctctcaccgcccccactccctgccgtgctacacccagatcctgtgcaggctgccgggccccttctgcttcccttggagcctggagatacttttgtaacaagccagatgattattttggtattgcttgacaaggcaaattgattgtcttgacccaggcgtatgacccctgtcgttgaacaagctgtgtctaagatctctacttttcatgagaatctgagactctttggagccaggctttctcggttctcagaggaaaagtatgaatgagtgtgaagtgtatgtgagaacttttgtttgcaatatttatttttgtgggtgtcggcttcctatgtgggctttttgggtgacactcccttaagggttcagtttgacaattctgagagttgtcctgcagttggaggccaccagaggtatctgagctccctgcttcctatttcataatcctccagccccagcaggtccactcctggttcctgtgtgtttggcccgggcacaatccccactgctttgctagacgtgctttctgccatgtggctttgggcctagagcttgttgataattgcagcttgtggcaggggaaatatggctgaatgagcgtctaaatcgttgagaccagtgcaactttgggtgcaaggctttgtttagggatcaagccttttgccaccttgggctggtctttggcctggtgctcactgggaccccatatgtctgcgtaggagcagaactttccatggcagtaagtgtccagctctgtttctggttctttccccaactccagccccgtccagttgttctcctgattgacccgactccactccaggaaggccatctgaccctgtgacaggcatagctcataaactacccctccctgggatcccgctcctcttcagcctccttccccatgaagctgggctaactttctaagtcattttgcttagaaattcagtgtggcccataccctttgtcctcccagcctggcatccaggcagggacaccctcacaccaccagccccagggagcttccctgctataaacacagacccccttgtctttgcctctgatttttacacagtgtagagtggccagcagtgaacaggttgaggatgtgcgggtagatagataactttgggtctggtttgtgtctgtgttcatgttcgtttaagggatatgtgtgactgtgggtggggacgtgtgcttgtggggcacaggtggcggcccctgctggagcccggctgggcgcagcgcctatgtaggacgggtgttctcagtgacctacctcccaggctcctctgcacctgcaaaggaacaggagtgagtcgtgactgacaggggtggttgagactagactaggtagagtagttaccaggagatgtgaatgtgcgtcaggtgatggatgggtttgtcaagggaatcgttaccgttttataccaaaggtattaacatgggcagcctttgacacatgtattccaaaaacgagtttatattttcaaacggtttttacagcttagactttgtacttactgccctgcctgtgacagttgtatgccttcattttgtatccaacagcaaagtctacaataaaactttaaaacaatcatg

SEQ ID NO: 14723 - protein, 310 aa, Homo sapiens
MSGESVVSSAVPAAATRTTSFKGTSPSSKYVKLNVGGALYYTTMQTLTKQDTMLKAMFSGRMEVLTDSEGWILIDRCGKHFGTILNYLRDGAVPLPESRREIEELLAEAKYYLVQGLVEECQAALQNKDTYEPFCKVPVITSSKEEQKLIATSNKPAVKLLYNRSNNKYSYTSNSDDNMLKNIELFDKLSLRFNGRVLFIKDVIGDEICCWSFYGQGRKIAEVCCTSIVYATEKKQTKVEFPEARIYEETLNILLYEAQDGRGPDNALLEATGGAAGRSHHLDEDEERERIERVRRIHIKRPDDRAHLHQ

SEQ ID NO: 14724 - DNA, 2469 bp, Homo sapiens
tattcaacatggaggcggaggtcgataagctggaactgatgttccagaaagctgagtctgatctggattacattcaatacaggctggaatatgaaatcaagactaatcatcctgattcagcaagtgagctgtcaccactgactaaagaagagaaaactgcggcagagcaattcaaatttcacatgccagatttatgaagtaatggacttggaaaggaaattctaacagagaagagcttaattccggagaaatttaggaagatgtcttgttaacccttgatgtctagagattgggggctggtgaagggggtttggcttcaatgactggataatgatatctttcatgagagagattataagaagaagggcagataacatatgaataaagttcagccaaaaggatcaaatgagaataaaacgatttaaatatatgtacacacgcatgcacacacacacttagtcttgtaatttcaggccagaaattctcaacactattttgcatctgttttctttttctaagtcatgataatatagatgttctggtctatcataaaagaatgtttatgtacatttcagtcattcggtatgtggctttgtaaattaaagtataggcaaaacatttgtgttatacatgatatataatttcattttgtaaatgttgattgcacatgtggtcacattattgttgagactgcttttatgtgacctgtagtctcccacagaacctaaagtaataagctggcttttctgtgatagccacgtttgcgtatttctttccctatttcccttgcctgctaatgttgaacagcatgaacttgctttctgatgctgttttagactgtccctgttgtatctcaataatatctttgttttccttcagcctttattactataattgttcattctacatgaaagctaggaaactgaaattagaagagcacttatctgctacttgccagttttgcgtgagtgtgttatatgtatgtgtcaatttccctttaaaataactatttattttaaaataactattggcaataaggaaactgttcaaagtagaggcagatcttgatagaaagatgttaatcacagggttgtttataatagcaatatacatacacatttggctagtactaggtgaataggaaaataaatcatgctgtatgtatacaataagaggtcaagttgccaataaattattactgttaatgttctgggaaatgctgaaactatgctaagtgggggagggggaaagcaggtattgcagttttgtagtgaagattgggctttggagtcatatctgagatgtaagtagcagcttttaaattctagctatgaccctgtgcagatcacttaacttttgagtgtcaggatgtttggaaggacaagacaggaaagtgttttaatacagggttcagtatttagtaagccttcaataagtgatattacatacatgtaataaaaactaagcattgaaaggactaggaaaaatgcatcaaatgttagttctgcaggttatagaattatacttttatgtaattttaaaatttcagttatgaacatgtttgtccattaacaaacttataatagctgaaaaacagggttgtgagaacagcttcagttaaaattgtcctgtctagtttgaatatttcaagaacagaaagccttttttttttttttttttttttttgagacggagtctcactctgttgcccaggctggaatgcagtggtacgctctcagctcactgcaacctccacctcccaggttcaagcagttctctgccccaccctcccgagtagctgggattacaggcgcccgccaccgcgcccggctatttttttgtatttttagtagagatggggcttcaccatcttgaccaggctggtctttaactcctgatggtgatccacccacctcggcctcccaaagtgctgggattacaggcatgagctaccgtgcctggcccccttttttttaattacagagaaataagttacaccttagtatcagatattaattttcttcagtgttcaggcaattaatatttagaaagctcttgtcatgagatggctctgggatgtgatgatgattgttgggattgaaaaaatggtagtatcatggagagatcataataaattcttagtattaaaagtggttttgctttcagttagggagagaaattagattgtactatttttcctctatgatttccttcagttatcttccaaatgttgttttttccccacagcccccttaacattgttctctatgcacttctcaatacattttcatttgtttctcaagcctctttgtggatgactcctaaatataacttcttccactagctctagatccttatttccaataaaatcccctacctgaatattcaagttaaacatgtccagaatacttactgattttattgttaatagccactattctgttgtctggaattaaaacctgtataact

SEQ ID NO: 14725 - DNA, 2497 bp, Homo sapiens
  CDS (404)..(1129)
cggctcctaccctgaaggtgcacctgcagtcctcgccgataagaggcagcagttcggaagccggttcctgagagatccggcgcgcgtcttccaccacaatgcctgggacaatgtggagtggtcggaagagcaagccgcggcggcggagagaaaagtccaggagaacagtatccagcgggtgtgccaggagaaacaagttgattatgagatcaatgcccacaaatactggaatgacttctacaaaatccacgaaaatgggtttttcaaggatagacattggctttttaccgaattccctgagctggcacctagccaaaatcaaaatcatttgaaggactggttcttggagaacaagagtgaagtacctgaatgtagaaacaatgaggatggacctggtttaataatggaagaacagcacaggtgttcttcgaagagccttgaacataaaacacagacacctcctgtggaggagaatgtaactcagaaaattagtgacctggaaatttgtgctgatgagtttcctggatcctcagccacctaccgaatactggaggttggctgtggtgtgggaaacacagtctttccaattttacaaacgaacaatgacccgggactctttgtttattgctgtgatttttcttccacagctatagaactggtccagacaaattcagaatatgatccttctcggtgttttgcctttgttcacgacctgtgtgatgaagagaagagttacccagtgcccaagggcagtcttgatattatcattctcatatttgttctttcagcaattgttccagacaagatgcagaaggctatcaacaggctgagcaggcttctgaaacctggcgggatgatgcttctgcgagattacggccgctatgacatggctcagcttcggtttaaaaaaggtcagtgtctatctggaaatttctacgtgagaggtgatggaaccagagtttacttcttcacacaagaggaactggacacgcttttcaccactgctggactggaaaaagttcagaacctggtggatcgccgactgcaggtgaaccgaggaaagcaactgacaatgtaccgggtttggattcagtgcaaatactgcaagccccttctgtccagcaccagctgagaggcacctgctgccaacacgatgcaagcccattgtgtttccgggcttttttaaaaaaaaaattgtagcactgggcgtggtgcatgcctgtaatcccagccactcaggaggctgaggcggggaggatccattgagcccagcagtccaacctgggcaaaatagtgagagaccctgtatctgaaagtaataataaaaataaaaaatataaatgaggtctcgttgatgttggacaattcaagaattcagacttgaaccttaaacctaggaaaagttactttgtatcaggattctaacaattatgcttcatatttgtgaagtcctttaaaacataattttctcaagttctttctttgagatctcaatctgtcttagcattttgtaactaataactgaaattttattcaaaggaattgtaaaccttaaaccaccaatttatttccatgtgaaaaagtgttacatatgacaagtgttttttgactgtaattgcgttaaatcttttgagaatgtaaatgccgggctaggcaattgcagttaatacatacagaggttagtgaagggcttattaagttgtaggggaagcaagctgggaagaatcagatcagatattttcctgacaaaaaaaaatgaccctacagagagcatcaaaatgtggtgttcttgttaagtaattgatcgtggtcttcgctttaatcttagttccgccaggcacggtggctcacacctgtaatcccagcactttgggaggccaaggcgggcggatcagctgaggtcaggagttggagaccagcgtggccaacatggtgaaaccccgtctctactaaagataaaaaaattagctgagtgtgttggtgggtgcctgtaatccagctacttgggagactgaggcaggagaattgcttgaacccaggaggcagaggttgcagtgagctgagattgtgccactgcactccagcctgggcaacaaagcaagactctgtctcaaaaaaaataaaaataaaaaaaaaaatcttagttccatggaattttaagcattgttccccctctaacctgtgtctaaagaattaaaagaatttggccgggtgcggcagctcatgcctgtaatcccaacactttgggaggctgaggcaggcggatcacgaggtcaggagatcgagaccatcctggccaacacggtgaaacctcgtctccactaaaaataccaaaaaattagctgggcatggtggcacacacctgtagtcccctgtagtcccagctactcgggaggctgaggcaggagaatcgtttgaacctgggaggtggaggttgcagtgagccaagatcatgtcactgcattccagcctgggcaacagaggaagactccgtctc

SEQ ID NO: 14726 - protein, 242 aa, Homo sapiens
MEEQHRCSSKSLEHKTQTPPVEENVTQKISDLEICADEFPGSSATYRILEVGCGVGNTVFPILQTNNDPGLFVYCCDFSSTAIELVQTNSEYDPSRCFAFVHDLCDEEKSYPVPKGSLDIIILIFVLSAIVPDKMQKAINRLSRLLKPGGMMLLRDYGRYDMAQLRFKKGQCLSGNFYVRGDGTRVYFFTQEELDTLFTTAGLEKVQNLVDRRLQVNRGKQLTMYRVWIQCKYCKPLLSSTS

SEQ ID NO: 14727 - DNA, 2684 bp, Homo sapiens
  CDS (60)..(1898)
ccgagaggagtagcctgattcccatctccggacatcgggcctctcccaatcctgtggccatggaaacccgaagtgacaacagaccgtctgttcccgttcagttccaatattttttgccaacttaccccccttctgcatacccactggcggcacatacctacaccccaatcaccagttccgtgtccactatccgacagtatccagtttcagctcaggctccaaactctgccatcacagctcagactggtgttggggtagcgtctaccgtccacctaaaccccatgcagttgatgacagtggatgcatcgcatgctcgacatattcaagggatccagccagcacccatcagtacccagggtatccagccggcccccattgggaccccagggatacagcctgcaccacttggcacacagggaattcactcagcaaccccaatcaacacacaagggcttcagcctgcacctatgggtactcagcagcctcagcctgaaggaaagacttcagcagtggtgttggcagatggagccacaattgtggccaaccctattagcaatccattcagtgctgctccagcagcaacaaccgtggtgcagacccacagccagagtgctagcaccaacgctcccgcccagggctcatcgccacggccaagcatactccggaagaaacctgccacagatggaatggcagttcggaaaaccctcattcctcctcagcctcctgatgttgctagtcctcgagtggaaagctctatgcggagtacgtctgggtcacctaggcctgcaggtgccaaacccaagtctgaaatccacgtgtctatggccactccggtcactgtgtccatggagactgtatccaatcaaaataatgatcagcctaccattgccgtccctccaactgcccagcagcccccaccgaccattccaactatgattgcagcagccagtcccccgtcacaaccagccgttgccctttcaaccattcctggagcggtccccatcactccacccatcaccaccattgcagctgcaccacctccatcagtcactgtgggtggcagtctttcctccgtcttgggccctcccgttcctgaaattaaagtgaaagaagaagtagaaccaatggatatcatgaggccagtttctgcagttcctccactggctaccaacactgtgtctccatctcttgcattgctggcaaacaacttgtccatgcctacaagtgacctaccacctggtgcctccccaaggaaaaagcctcgaaagcaacagcatgtgatctcaacagaagaaggtgacatgatggagacaaacagcactgatgatgagaagtccactgccaagagtcttctggtgaaggctgagaagcgcaagtctcctcccaaggagtatattgatgaggaaggtgtgagatatgtcccagtgcgtccaagaccccccattactttgcttcgtcactatcggaacccctggaaagctgcttaccaccactttcagaggtacagtgacgtccgggtcaaagaggagaagaaagctatgctgcaggaaatagctaatcagaaaggagtatcctgtcgtgctcaaggctggaaagtccacctctgtgctgcccagttactacagctgacgaatctagaacatgatgtctatgaaagacttactaacctgcaggaagggattatcccaaagaaaaaagcagcaacagatgatgatctccaccgaataaacgaactgatacagggaaatatgcagaggtgtaaacttgtgatggatcaaatcagtgaagccagagactccatgcttaaggttttagatcataaagaccgtgtcctgaagctgcttaacaagaacgggactgtcaaaaaagtgtccaaattgaagcgaaaggaaaaagtctagacccagaacaatcaggagattggaagcaaatttatgaagaatgatggtgggggtggggggagggttttggttttttccaaagtggaacattgaaataaaggaagtgttccttagttcccgtgtgaaagcagaggaacccatgacatccaagggcgtgaaaggatcagagctgactggacatagtgagctgccttcttgcgttcgggtgcacccctgttaaacctgatctgtgtcataagtgactccggatgcatcagtgtccaccagttggaagcaatgacaaggatggctggctggtgtttttcagccttccggtttatagactgtatttatctagtggattcctgcaggccccatactgagcctggactgaaagtatccactcggaccatctgttatctctctacactgaaaataaaacctcttccacccaccccattcggttcttctgcctgaccttcaaatgcccatgttggccttttacagcagtgccacggcaccaagcgagctgccacatctcacactctaaagggtttgaactattagttcttgtcattttttaaaaaaaaccattcccaagtgaaattgttatatcgtctgtcttgcgtgtgtcagaactgggtttttgtggaggttcagagcaggcaacaccataagttgctctcagatccttgttctgaagtacattcttggttatctgtacttctgtagctggtgtgatgctgttaattgtatgtaccacacatctccagacgttaataaaggactcaaagaggtttttgt

SEQ ID NO: 14728 - protein, 613 aa, Homo sapiens
METRSDNRPSVPVQFQYFLPTYPPSAYPLAAHTYTPITSSVSTIRQYPVSAQAPNSAITAQTGVGVASTVHLNPMQLMTVDASHARHIQGIQPAPISTQGIQPAPIGTPGIQPAPLGTQGIHSATPINTQGLQPAPMGTQQPQPEGKTSAVVLADGATIVANPISNPFSAAPAATTVVQTHSQSASTNAPAQGSSPRPSILRKKPATDGMAVRKTLIPPQPPDVASPRVESSMRSTSGSPRPAGAKPKSEIHVSMATPVTVSMETVSNQNNDQPTIAVPPTAQQPPPTIPTMIAAASPPSQPAVALSTIPGAVPITPPITTIAAAPPPSVTVGGSLSSVLGPPVPEIKVKEEVEPMDIMRPVSAVPPLATNTVSPSLALLANNLSMPTSDLPPGASPRKKPRKQQHVISTEEGDMMETNSTDDEKSTAKSLLVKAEKRKSPPKEYIDEEGVRYVPVRPRPPITLLRHYRNPWKAAYHHFQRYSDVRVKEEKKAMLQEIANQKGVSCRAQGWKVHLCAAQLLQLTNLEHDVYERLTNLQEGIIPKKKAATDDDLHRINELIQGNMQRCKLVMDQISEARDSMLKVLDHKDRVLKLLNKNGTVKKVSKLKRKEKV

SEQ ID NO: 14729 - DNA, 2802 bp, Homo sapiens
  CDS (899)..(2611)
cttgttggcctactggctctttttgacagcccccagtgcgaaaggctgccagcatgtcatcagtgagccccatccagatccccagtcgcctcccgctgctgctcacccacgagggcgtcctgctgcccggctccaccatgcgcaccagcgtggactcggcccgcaacctgcagctggtgcggagccgccttctgaagggcacgtcgctgcaaagcaccatcctgggcgtcatccccaacacgcctgaccccgccagcgacgcgcaggacctgccgccgctgcacaggattggcacagctgcactggccgttcaggttgtgggcagtaactggcccaagccccactacactctgttgattacaggcctatgccgtttccagattgtacaggtcttaaaagagaagccatatcccattgctgaagtggagcagttggaccgacttgaggagtttcccaacacctgtaaaatgagggaggagctaggagaactatcagagcagttttacaaatatgcagtacaattggttgaaatgttggatatgtctgtccctgcagttgctaaattgagacgtcttttagatagtcttccaagggaagctttaccagacatcttgacatcaattatccgaacaagcaacaaagagaaactccagattttagatgctgtgagcctagaggagcggttcaagatgactataccactgcttgtcagacaaattgaaggcctgaaattgcttcaaaaaaccagaaaacccaagcaagatgatgataagagggttatagcaatacgccctattaggagaattacacatatctcaggtactttagaagatgaagatgaagatgaagataatgatgacattgtcatgctagagaaaaaaaaatacgaacatctagtatgccagagcaggcccataaagtctgtgtcaaagagataaagagactcaaaaaaatgcctcagtcaatgccagaatatgctctgactagaaattatttggaacttatggtagaacttccttggaacaaaagtacaactgaccgcctggacattagggcagcccggattcttctggataatgaccattacgccatggaaaaattgaagaaaagagtactggaatacttggctgtcagacagctcaaaaataacctgaagggcccaatcctatgctttgttggccctcctggagttggtaaaacaagtgtgggaagatcagtggccaagactctaggtcgagagttccacaggattgcacttggaggagtatgtgatcagtctgacattcgaggacacaggcgcacctatgttggcagcatgcctggtcgcatcatcaacggcttgaagactgtgggagtgaacaacccagtgttcctattagatgaggttgacaaactgggaaaaagtctacagggtgatccagcagcagctctgcttgaggtgttggatcctgaacaaaaccataacttcacagatcattatctaaatgtggcctttgacctttctcaagttctttttatagctactgccaacaccactgctaccattccagctgccttgttggacagaatggagatcattcaggttccaggttatacacaggaggagaagatagagattgcccataggcacttgatccccaagcagctggaacaacatgggctgactccacagcagattcagataccccaggtcaccactcttgacatcatcaccaggtataccagagaggcaggggttcgttctctggatagaaaacttggggccatttgccgagctgtggccgtgaaggtggcagaaggacagcataaggaagccaagttggaccgttctgatgtgactgagagagaaggttgcagagaacacatcttagaagatgaaaaacctgaatctatcagtgacactactgacttggctctaccacctgaaatgccgattttgattgatttccatgctctgaaagacatccttgggcccccgatgtatgaaatggaggtatctcagcgtttgagtcagccaggagtagcaataggtttggcttggactcccttaggtggagaaatcatgttcgtggaggcgagtcgaatggatggcgagggccagttaactctggccggccagctcggggacgtgatgaaggagtccgcccacctcgctatcagctggctccgcagcaacgcaaagaagtaccagctgaccaatgcttttggaagttttgatcttcttgacaacacagacatccatctgcacttcccagctggagctgtcacaaaagatggaccatctgctggagttaccatagtaacctgtctcgcctcactttttagtgggcggctggtacgttcagatgtagccatgactggagaaattacactgagaggtcttgttcttccagtgggtggaattaaagacaaagtgctggcggcacacagagcgggactgaagcaagtcattattcctcggagaaatgaaaaagaccttgagggaatcccaggcaacgtacgacaggatttaagttttgtcacagcaagctgcctggatgaggttcttaatgcagcttttgatggtggctttactgtcaagaccagacctggtctgttaaatagcaaactgtaggtccaaatctcaattttttagaattttaagttatgaagtgctcaaaggtactgacacagttgattttattcacaccattaggggtatgcaagatgtccctgttttataaacataatcacaacagtaataaacctcaagtagtggctagtgtttagtatagaaatataagatgttgatttagtaaactg

SEQ ID NO: 14730 - protein, 571 aa, Homo sapiens [sequence omitted]

SEQ ID NO: 14731 - DNA, 2445 bp, Homo sapiens
aaaaatcagtcagcaaaagaagatgtaacagaaaggcaaagcaccaaacgatctcctcagcaaactgtaccatatgttgttcctctctctcctaagctccccaaaacaaaggagtatgcgtctgaaggagaaccattgtttgctgggggaagtgccattctcaaagaggagaatctttcagaagattctaagagctcatcactaaattcaggaaattatttgaatcctgcctgtagaaatcctatgtatattcatacttcagtctcccaggatttttctcgaagtgtgccaggcaccacaagttcaccactagttggggacatatcccccaagagcagtccccatgaagttaaattccaaatgcagaggaaaagtgaaggaaattgatgggaaggctctgttcctactcaagagtgatgtgatgatgaagtatatggggctgaagctggggccagcattaaagctgtgttactacattgaaaagcttaaagaaggaaaatacagttaaaaaaatgtgtaagtttagattggacataattctcaggtgtactgttaacattttaatttaaaagtatttctcttagcagtttttgttttgtagacagttcccataaaaatattttatcagaattgcagaactgtagtaacagttcagtcaactttgtttttttcctggagtcaccaaccagctttgggagacacagccgccactcccccagtctacttctttaaaaagcatttaacaggttagtattggcatattcaaattggcagttctttatgtctttttaaattttcattgtacagtttacaaatatacttaatgtagttaacagagaaaaacctttgattttggttaacctttatatctagaaccaaaacagctaaatcccaaaggggaaaatatcagggattgacaacttctataattaaatccatgagaatttttcctcactagagaatttaaaggtgcacctgtagatatcatcttttctcagatattttgtgtgatactctgtggtgttctgttcatgttctatcagtatatctagaaagggaatagccatataaattattttccttttattatttctctgtatgttgtatttgatcatatttaaaggaaaaaagcaagcttataagctttcatgaagtgttcttaccagtttttgataaattttttaaattataggatagaattgtcattttatgcaggagatatttatactacgagggttgtttggatggagtcagattaaattttttcagtgaaattcctattattttaaaactttccatattttcactacgcttggacatttaactaggcattcttttcttacatctctatatgaagatacctgtgtccaaaatttttgaagatatatattgtatgtgtttattcttcatatggtactttaccatatttatatattgttttatacctgtaggtttacacacaagtaaatcttttttttcttgaatttaatctggcactttgcactgccacagaggtgacgatgaactatgtatatagttagatgttttgatttcgtaaaaaatatatgtccatcgtttgctatcaccagtacctctcagcttactcttcaggggatatgaaacaatctgtagattggtttccatacagggaagttctctgtcctatgcaatgtttctaattaatttgcttagttctgagccatttattctgctacactttgaaagatatattagttctgacttattgtttggggctttattttatttttatttttttgagatggagtttcactcttgttgcccaggctggagtgcaatagctcgatctcggctcactgcaacctcgcctccctggttcaagcaattctcctgcctcagcgattacaggaatgcaccaccacgcccagctaattttgtagagatggggtttctccatgttggtcaggctggtctcaaactcctgacctcaggtgatccgcccacctcggccttgcaaaatgctgggattacaggcatgagccaccatgcccagccatgtttggggctttattttataagttagaactttgaagaggaaatggtgctatatgtttattgttattactttgtgtaactttgatgtaatgtttataagctatgagaatcagttataaaagtattagccatttgttgtaaatgccaataaaatattcaccaggggcaagaatgtacattttctttttagaaaaccaaatgtactttagacatgaatgcaactatttaaagaatagcttcatttatgttattccttacatgtcataagattcttacttaaacttggtcttctttcaagttgtttgtatgaagatgctgtacccacttgaacagtcctcaggtgtttacataaatactatgttttacagttttcatattttaaaatattaataaagttaatcgcaacgattc

SEQ ID NO: 14732 - DNA, 2517 bp, Homo sapiens
  CDS (274)..(687)
ttctacagggatctggacaactctcctctgtccccaccttcaccaaggaccaaaagcagaacgcatactcgggcactcaagaagttaagtgaggtgaacaagcgcctccaggatctccgttcctgtctgagccccaagccacctcagggtcaagagcaacagggccaagaggatgaagtggtcttggtggaagggcccaccctcccagagaccccccgactcttcccactcaaaatccgttgccgggctgacctggtcagattgcccctcaggatgtcggagcccctgcagagtgtggtggaccacatggccacccaccttggggtgtccccaagcaggatccttttgctttttggagagacagagctatcacctactgccactcccaggaccctaaagctcggagtggctgacatcattgactgtgtggtactaacaagttctccagaggccacagagacgtcccaacagctccagctccgggtgcagggaaaggagaaacaccagacactggaagtctcactgtctcgagattcccctctaaagacccttatgtcccactatgaggaggccatgggactgtcgggacggaagctctccttcttctttgatgggacaaagctttcaggcagggagctgccagctgacctgggcatggaatctggggacctcattgaggtctggggctgacaccccactccctgtttgacggcccagcctggacttggggagaatgactttcccttttttgccccataagggctagcataagctgaggtagaacttatctttaagctgcagcaaaatcaaggagtgacttttgtcccctctcctgttgaccctggtttagagccgttaaccacttggtgagttatgtgggtgttgttgccctgggtggcctgtggctccgtccacaagtcatgctgagttttgcagcctctgtgacttggagatgtcccttcacccctcccctttcaccaccatcctcttttcctcatggaaatgtctgctttatgaaactatgcacatattgaaagtgagttgaaacaaatgagggttgggtaggagcttccaggcctgggatttacaccacgcctagcccagcagaggccttagtcccatttggggcttgggagtgacatttgcttgaggcttatacactggtgtggttgcctggcttgcaggaaatgaccaagctcacacatgctggctgaagcgtaagcagacaactgaggtactcttttgaaggatgaaggtggtggattctcagccctgggggtcttcctcacctgaggacccttcagagccaccctttctagtttgcatttcctggtgcacacatttaaggcataacagcacattcatccctttggtttgggatctcaggaatacagtcccatgcaaagattctctggttttatggcttttttccctttctttacaccatcctctcccataagcacccatgtctttgaatatgaatgtatttgtaaaataccacgtttcatgtgtgaatatgtgcttttactgtacatagtgctattgtgcaataggtcttatgctgttttcactcaatgtgtgctaagatctagccccattgactcttctagaaatgcagtattgctttgacctgccatgtggcactccacaatgtcaattgcagtttacacacattgcctaaagtgggggacacctgggtgcccctgaccccttggcaccggatacaggccacgataaacatcctttcgtgtgttcccttctgtgcttgtgtggcatgtgtacccaggatgggcctataggtcacagaggtcagtttctctttggttttccagattttctttagaacggtgactgaccctcctacttgaggccgcccttttctccttatccttgccagcacttgtattgccagactacctaatttttgccagtctcatgggtagatagtggtgcagtgctttaacatacattcatctgatcagcattaatttggggaattttttcacttagcctttctggtttcccttcctgtgcattgcccattttctcatggagtttcttatcttttttggtttattctcaggagttgcttgtacattcttgggcaattgcagataattccaagaatgcatatttgggctgggtatggaggttcactggtaatcccagcactttgggaggcccaggcagaaggatcgctgcagcccaggagttcgagactagcctgggcaacatagcgagacctcgtctctacaaaaaaaaattaaaaagggggctttgggaggccaaggcgggcagatcatgagggcaggagattgagaccctcctggccaacatggtgaaaccccgtctctactaaaatacaaaaaattagctgggcatggtggcgcacacctgtagtcccagctactctggaggctgaggcaggggaatcgcttaaacccaggaggcggagattgcagtgagccaaggttccaccactgcactccagcctggcgacagagcaaggctccactc

SEQ ID NO: 14733 - protein, 138 aa, Homo sapiens
MSEPLQSVVDHMATHLGVSPSRILLLFGETELSPTATPRTLKLGVADIIDCVVLTSSPEATETSQQLQLRVQGKEKHQTLEVSLSRDSPLKTLMSHYEEAMGLSGRKLSFFFDGTKLSGRELPADLGMESGDLIEVWG

SEQ ID NO: 14734 - DNA, 2599 bp, Homo sapiens
aaaattggatggaaagaaattctgtgtgctcccaggattccagttccttaccggaggttggtgccgtctgagtctgaaaagctgccctcttgccgtgttcatgctttggtagaacaccttcagagccttggcaagctctcggtcagagccagcttgctgtgtgcacatttggctcatctccccggcggatggcagttgcacagtcatcccgctgatcttcagagtgttggaaggcttcggggctgaggtggaaaaaggtaacattgatttatgtatctctttctctgggcatctctatatttattttggtggcattctactgcatcagcatttatcaggcaccagtttggatccatccaagggaaaggggaaatctcacagggcagaagaaatgtccggcattttttgtttatgaaagaagatacgaattaactcatttaaaagtttgtttcttaaaagacaaatacacatcccaaatgtaggagtctagggataagctaaacagccaagactggagcagtctctcaccttgaccagaagcagttttcgcaagtgatgctttgagaagcacgttctcctctctcagggctctgttaatgttcctgagcggttccgtctcctgctctagcttgagcagcttcagataaagttctggtatctggtttgatgctgcctaccagaaaacatgtcagtttcgtcttttgttgtatcatctgcatatcctttgagactggcaatgtttgctaccatgggaaaatcaaatgggatgggagtgtgtgtatggtgagcagagtttaagcccctcagggtacacaggagtaaataaagaaaacgtttgttaagggggaaggaacgtcaagcagccgtcctcagagattttctagccacctgggatgcccactttagtgtcctatgtacacacctggcttatatccttcacagtggaaattttcttggtgtctaccaggatgtggccttcacctgtgaccatgaggcccagctgagagcagctcagctcggtgcagccttctgtaatggggagagacacagtcaaagaaagaaacatcccagtcgcccagctccagtgtcagcttcatgcagtaggccagcgactggagccagatgtgagctgagcccaagcggacgacctcgacaggatcccagaaagggtcgtcatctcgagccacagggccgtgatctccatctagaaagcgctggtaaagttcctgcattaggaatttcctattgatgaacttggcttttgaccatatccacacctggaaacacagaggggtccacacccagtgcacagcagatccaggacaacagcctgccgctgtcttcctcctcactgggtgaggacagggcctctgtcagtactggctctggagaggaaacaaacctgaagccacaggaggagggattccagagggattccagccgccctctccagctggaagaagtcgtaatcgaacctgctcaggtcctcactgccccactccgaaggaaaccccacgtacaggtgaggtcagaggagtgaagtgacttgcccaagaccacacagtgagtcaggagcaggcctgtccctccagcagtggtgccatgttgtccccaagccatggtggcagaggagctggtgtgaacgccccatcctgccacgtctgtgatgtgggcacctcacatgactgtcccctcccagctcttgggggggacctaggacattctgtgagcctgcaggaaagtttaccaaatgctgcagctttgtcctggtggtgatgggcaccccgttaacggcaaccttgcatttgctatgtggagtgaccgtcactttaccgtcggcatttgtgaaggaagcgtgtttatctgaaattctaagaagatgagagtcaaagacacccagcaaacggcggtttccgtgagcaggtaggctgacctttctcgtgtgcacaggagggaaggtctacagctgcggaggatggcaggtggcatctcggggcctcctgtgtgctgtggcccatgatgcatggggacagcagcgggcgcagaaggaccctgcccttggggagcacggagagctgggagacagcaggcaagggcttcattaacagaacgaacaccagctgagggcctagcactgcggggagccggccaaggccacactggagtcctcccgctcccaggccagcgggatggggtggtgggaagatggcagcaagcaagcttcagaagagacgctcaggaggcgactcttaacgagcctcacctactccggggttggagcccaggaagcaaaccagcactgcaccctagatttcagccagaggacgaaagccctgccctcagctttctcagaccagccctggagtaggtggcccggggagacctgggcagtgtccctgcttgtcctgcagactgtgtggctctgcagacctctagatggaggaggcacaattctctaatgctggacgaggacactgatcatggaaactcaccccaaaccttgaatcgtgatagcatttgaggcagcctgaccggtgccacatgaacctgaaaggaatcaagatataatttattttgaaaataaatcagacactttcag

SEQ ID NO: 14735 - DNA, 2446 bp, Homo sapiens
  CDS (658)..(1020)
tacacaggacaactccatgtggttgattttactggcatgtcttggtgacgaagagttggccaagtgaatgatgcatcttttacttggagctctccagcctttgtcatagttcccagaccttttttccttgtggtcatccaggaggtgatcaattacatgtgcacagtgctaggacgggaggcagagccggctcagagcaggtccaccagcccacctatagcaggaagcgtgtcggtgcttaggaaatctaggacttccagcttccctcatgtcagatagaaaaaaagtcaggaaaccagctcgtggacaggggctttggttccaaaacttggacaaacctgatgccttaaggaaaaggttaagatgagagggggcttccagagtcaatgaacgtcacccttcagccgacggataccgggagcgcttgggcaaaacagcagagaaagaaagactgtggtcggggaagtggaatgcttcgatgcaggccagagttcaaggctctggggctggcctcacaagaggcttcttccacggggcttgacaccagagcagcccccgcgtgaaatgagaaggcacgcttagcactgggaggaaaagctgagttaagaaaattctttatcatgtttgccttccctggggaaacattcaggcagtaaaatgacatccacgtgttcctgtcggacgcagcggcttcgggaacaagttagcgctgggggactatctgggctcgtctctctgtgcttcgtgaacccaccacaccagggcctgtctgctgtgctatttatttgccttccgtcttcccaacctcagctgcctgtactcatgccagaggtgcaaaggctgccagccagtgctgctgacagatgctttcagactgtagagctcagagaaagggagcggcagctagaggtagccagggagctggccaggctccccggggccttcctattatgtaaatcccagctggacagacagccctggagccaggtggccctgtcccctgtggagcacttggagcagtgatctgttgttccaggtgtaagtctcgacactgcagaaatgaggacgttattaggaaagaccagttcctactgcctgtgctgctactttaagagctgagaaaaacattccaatgagatatccatagctaacttgcttgctcagaaaaacataagtaacaaagttgagctttcatttttaaaaattatattttactttagaaaaatatcaccttttttcttcctcttccttacgtgtagatctttttttttttttcaaatggggtcagtacctgaaagcccgaaaccccataccaagcttatagttaggacctttgcatttgataaaaaaaaatatagtattttctgttgtccagaaaatcttcccagatagggaaactgaggcagagagtgccgtggagtggtttttgccaagtcatacaacatactgaatgcagggctacactgaacctccagaatcattttgtttgctttgaccctgtttcaccatctgggcaatcatttattttccttgagcatttataaaccagggcgagggttgttccaaaatgagtaattgaatgagatgaagaaatatgtcataattagaggagataaatctccttgttatcacaatagttaatgtgtcatgatcactgactaactgggaccttgaacaagtcagcatctctgcctttcaaaatgaaggaacattgttctctatcctcccctgaccccccacggccccatgctaggtgcaccgtcttcctccatttgactttttaatgctttacaacttcaggctaaagggaggggatgttgggaggagaaaccatcacaagattccctcggtgccacagctgtgctgaggaggccggggactgggaatcggagtgggcacctctgtgtttctctagggagtaacattcaacatttaattgaatcgtgtatcctgataggtggattaggaacaggattcattcctttaactttaacttttggctaaacgacatgccttggattgagtgtatatgtcttccccaaattcatatgttgaagcttaaatcctgaatgtgatggttcttggaattgggacctttggaaggttattaggtcttgagggcagagccctcacgaatgggattaaggcccttataagcagagacatggggccaggtgcagtggctcacacctgtaatcccaacattttgggaggccgagaagggtggatcatgaggtcaggagatggagaccatcctggccaacatggtgaaacctcatctctactaaaaatacaaaaattagctgggcgtggtggtgcgtgcctgtagttccagctacctgggaggctgaggcaggagaatcgcttgaaccaggcagtcggaacttgtagtgagccaagatcacgccactgcactccagctggagtgacagagccaaactccgtc

SEQ ID NO: 14736 - protein, 121 aa, Homo sapiens
MTSTCSCRTQRLREQVSAGGLSGLVSLCFVNPPHQGLSAVLFICLPSSQPQLPVLMPEVQRLPASAADRCFQTVELRERERQLEVARELARLPGAFLLCKSQLDRQPWSQVALSPVEHLEQ

SEQ ID NO: 14737 - DNA, 2324 bp, Homo sapiens
gcaccagggctgactgtagctgggggaagacattttactcatttgctctttcctttcatacagtcagctggtccctcttctcaggtgtagatcacctattataattttacctaattttgatactctgataaggaaagtcccaggacttatcagctgggataggcctcacttacaagacagctctgttcagtatttggaagaaagcctgacaggtttcttcggaaaagtggccatccatggaatgaatgaaatgttctctttctattccagggattgcagtggcaaagctaggctaggtcttggaggctggtgtaaggcgatgtgggtgaaggcaggaggctgatggaaagactggggggaagaaaagccgaaatggattcacggtgccttggatgaaggacgagaggggaactgcaagctccttcaactggttctgtccggtgagaagtgatcaagcttgggctgacaagaggctcagggagccctcacgttctttcgcttttttacctgccaaccaaactgctacaagacaacaccctgatctggcatggacatcgcgggtccaagcctgtagccccaaatcggataatctctgcagctgataacaagcaaaagagaagccaggcaacagccatattaaagaagaaaacaatcaactctgagatccaacttagaaataatgtttcattcaagataaggctcgtggcttaggagattgtgacctggcttgcatcattctaagacttctatcgtctgttttcaaaacccaaggaggacctccttttctgtgtgatagttcctcatgctttgccagccactgggtctttaaggaagcttgccaagagttcccggctgggaaggacagttcgagttcatcatagacaatgagctggcaccacagtttaagtgactcaccaacctggttgcccacttcaaaatgtcaagaaccacactatctaattgaaagaactgtgttttagcaaagtgtaattggatcgcctggcaagatcatctcaaactatgtctctgaccttgcctttcagtggctattttgagcacaagaggagaaaggaaatgattcctgaattatatcttgtttttaaaaattaagattaattaatacttggttttatgttcattccattgtaggaacttagtgattattacaaaacagtcaaaataggtcatagcaaaatgaacgtttaagattaggttaaaacattcctctgaaattttagtattcacttttgaagtgtcaattactatatttctgtaatttctcatttttttcttggcttagagtcaagatgaaaaatgatatttgaatcaaagacattgttttgttatatagccactcctttctaaaatgcaaatccaccctcccctcaccaatgctttattctttgtgcgcgcacacacacacacacacacacacacacacacacacacacacagacatacacagaaccagcacccaaatggtagaggaggtccttccaagacttctaggacctggatcatgtaagcagtagatgagaaaatgaagtaagagatatagagtaataacaataaaagtcaatgatttcattttacaaaaaagtcattgtgtagtactcagatatttttaagagcaggtattattatgactaaagtatattatacttctaaattattatgattctcatctaatttcaagccacacataggcgccatttgaaagcattttgtgttacaacctatcaacaaaaatcaactaatagttttataacgtgcataggtttaccccatggggaactaaaatttttatctgcaagtatttctgttgttgtgagactttaggacaagacaacatttggtgttaacatagaagaatattctatggcttttttagctttaaagttcattactctaaaataaagtacacgtggtatttttttcttcctagtgttctcttattatatgtagagtattttcggttgttgtttttaacgtatacattatttttattaagtcatttcataaaagataagatatatactaatagacccttggttttctcctaatttaattatttcaagtcaagcaaaattgggcaattttctttcaggaaaaaaaaatattgagcatgattttgaggtaaaactgattatttacagcatcttttctctaataggctaacatttatgatggatcttatttcaaagttgattattctcaaagaaaagtggagatattagaatttccgagtaaattgcattgttttaaaaagtactttaatgcattgttcacattgttgccagctattgaccaaaaaagagaagaag

SEQ ID NO: 14738 - DNA, 3050 bp, Homo sapiens
  CDS (101)..(2680)
tgagtgcccgtcgcgtcgcgccgcgtcgccccccgggccgcctccttgccgccagtggcgggctccgttctccctcgaagcactccccccagctccatgaatggaaatcggctccgcaggacccgctggggcccagcccctactcatggtgcccagaagacctggctatggcgccatgggcaaacccattaaactgctggctaactgttttcaagttgaaatcccaaagattgatgtctacctctatgaggtagatattaaaccagacaagtgtcctaggagagtgaacagggaggtggttgactcaatggttcagcattttaaagtaactatatttggagaccgtagaccagtttatgatggaaaaagaagtctttacaccgccaatccacttcctgtggcaactacaggggtagatttagacgttactttacctggggaaggtggaaaagatcgacctttcaaggtgtcaatcaaatttgtctctcgggtgagttggcacctactgcatgaagtactgacaggacggactttgcctgagccactggaattagacaagccaatcagcactaaccctgtccatgccgttgatgtggtgctacgacatctgccctccatgaaatacacacctgtggggcgttcatttttctccgctccagaaggatatgaccaccctctgggagggggcagggaagtgtggtttggattccatcagtctgttcggcctgccatgtggaaaatgatgcttaatatcgatgtttctgccactgccttctacaaagcacaacctgtaattcagttcatgtgtgaagttcttgatattcataatattgatgagcaaccaagacctctgactgattctcatcgggtaaaattcaccaaagagataaaaggtttgaaggttgaagtgactcattgtggaacaatgagacggaaataccgtgtttgtaatgtaacaaggaggcctgccagtcatcaaacctttcctttacagttagaaaacggccaaactgtggagagaacagtagcgcagtatttcagagaaaagtatactcttcagctgaagtacccgcaccttccctgtctgcaagtcgggcaggaacagaaacacacctacctgccactagaagtctgtaatattgtggcagggcaacgatgtatcaagaagctaacagacaatcagacttccactatgatcaaggcaacagcaagatctgcaccagatagacaagaggaaattagcagattggtaagaagtgcaaattatgaaacagatccatttgttcaggagtttcaatttaaagttcgggatgaaatggctcatgtaactggacgcgtacttccagcacctatgctccagtatggaggacggaatcggacagtagcaacaccgagccatggagtatgggacatgcgagggaaacaattccacacaggagttgaaatcaaaatgtgggctatcgcttgttttgccacacagaggcagtgcagagaagaaatattgaagggtttcacagaccagctgcgtaagatttctaaggatgcagggatgcccatccagggccagccatgcttctgcaaatatgcacagggggcagacagcgtagagcccatgttccggcatctcaagaacacatattctggcctacagcttattatcgtcatcctgccggggaagacaccagtgtatgcggaagtgaaacgtgtaggagacacacttttgggtatggctacacaatgtgttcaagtcaagaatgtaataaaaacatctcctcaaactctgtcaaacttgtgcctaaagataaatgttaaactcggagggatcaataatattcttgtacctcatcaaagaccttctgtgttccagcaaccagtgatctttttgggagccgatgtcactcatccacctgctggtgatggaaagaagccttctattgctgctgttgtaggtagtatggatgcacacccaagcagatactgtgccacagtaagagttcagagaccccgacaggagatcatccaggacttggcctccatggtccgggaacttcttattcaattttataagtcaactcggttcaagcctactcgtatcatcttttatcgggatggtgtttcagaggggcagtttaggcaggtattatattatgaactactagcaattcgagaagcctgcatcagtttggagaaagactatcaacctggaataacctacattgtagttcagaagagacatcacactcgattattttgtgctgataggacagaaagggttggaagaagtggcaatatcccagctggaacaacagttgatacagacattacacacccatatgagttcgatttttacctctgtagccatgctggaatacagggtaccagtcgtccttcacactatcatgttttatgggatgataactgctttactgcagatgaacttcagctgctaacttaccagctctgccacacttacgtacgctgtacacgatctgtttctatacctgcaccagcgtattatgctcacctggtagcatttagagccagatatcatcttgtggacaaagaacatgacagtgctgaaggaagtcacgtttcaggacaaagcaatgggcgagatccacaagctcttgccaaggctgtacagattcaccaagataccttacgcacaatgtacttcgcttaaatagtccaagtatattctctgagaggaagtactgaaagatgaattgacatacaacgtatgtttccagtgaagtcaattgagtaaggacacctccagccatacagaaaccaacactgtgtgggggccaaggtctgatccttatgttaacacaaggaagattgtttacttcatcaaggaacacagcatcattatgcaatatgaaaccagccaactgctttttgtgcggtctcctataggaagtatcgcaattgtcttgttttcatttcttgtagtctaacccttttaatgcctttacctcaagttgcttggcagcacaactatctttgcaaaaaaaagtaaagaaaaagtaaatgatggtttaaaaaat

SEQ ID NO: 14739 - protein, 860 aa, Homo sapiens [sequence omitted]

SEQ ID NO: 14740 - DNA, 2509 bp, Homo sapiens
  CDS (31)..(2064)
actcgctcgtccccggcttccgggcacagcatggcggtcaaggtgcagacaactaagcgaggggatcctcatgagttaagaaacatatttctacagtatgccagtactgaggttgatggagagcgttacatgaccccagaagactttgttcagcgctatcttggactgtataatgatccaaatagtaacccaaagatcgtgcagctcttggcaggagtagctgatcaaaccaaggatgggttgatctcctatcaagagtttttggcatttgaatctgttttatgtgctccagattccatgttcatagtggctttccagttgtttgacaagagtggaaatggagaggtgacatttgaaaatgtcaaagaaatttttggacagactattattcatcatcatatcccttttaactgggattgtgaatttatccgactgcattttgggcataaccggaagaagcatcttaactacacagaattcacgcagtttctccaggagctgcaattggaacatgcaagacaagcctttgcactcaaagacaaaagcaaaagtggcatgatttctggtctggatttcagtgacatcatggttaccattagatctcacatgcttactccttttgtggaggagaacttagtttcagcagctggaggaagtatctcacaccaggttagcttctcctacttcaatgcatttaactcgttactgaataacatggagcttgttcgtaagatatatagcactctagctggcacaaggaaagatgttgaagtcacaaaggaggaatttgcccagagtgccatacgctatggacaagtcacaccactagaaattgatattctatatcagcttgcagacttatataatgcttcagggcgcttgactttggcagatattgagagaatagccccattggctgagggggccttaccttacaacctggcagaacttcagagacagcagtctcctgggttaggcaggcctatctggctccagattgccgagtctgcttacagattcactctgggctcagttgctggagctgtgggagccactgcagtgtatcctatagatctggtgaagacccgaatgcaaaaccagcgtggctctggctctgttgttggggagctaatgtacaaaaacagctttgactgttttaagaaagtcttgcgttatgagggcttctttggactctacaggggtctgataccacaacttataggggttgctccagaaaagtccattaaactgactgttaatgattttgttcgggacaaatttaccagaagagatggctctgttccacttccagcagaagttcttgctggaggctgtgctggaggctctcaggtcatttttaccaacccattggagatagtgaagattcgtctgcaagtagctggagagatcaccacgggacccagagtcagcgccctgaatgtgctccgggacttgggaatttttggtctgtataagggtgccaaagcgtgtttcctccgagacattcccttctctgcaatctattttcctgtttatgctcattgcaaactacttctggctgatgaaaatggacacgtgggaggtttaaatcttcttgcagctggagccatggcaggtgtcccagctgcatctctggtgacccctgctgatgtcatcaagacaagactgcaggtggctgcccgcgctggccagacgacatacagtggtgtcatcgactgtttcaggaagattctccgggaagaagggccctcagcattttggaaagggactgcagctcgagtgtttcgatcctctccccagtttggtgttaccttggtcacttatgaacttctccagcggtggttttacattgattttggaggcctcaaacccgctggttcagaaccaacacctaagtcacgcattgcagaccttcctcctgccaaccctgatcacatcggtggatacagactcgccacagccacgtttgcaggcatcgaaaacaaatttggcctttatctcccgaaatttaagtctcctagtgttgctgtggttcagccaaaggcagcagtggcagccactcagtgatgagacaactgttgagtgtggcaaaatggcgccttgaagaaagaggcctaggagagcagccctgtaatgtatccagtcagctgcatggtactgactgagctgaggagtcaaactcttctttctgtatgacatatacatatacttgtttataaaataatcatttgcccagggaaaaaaccacaacgctgtttcaagctttagtcttatgtgttgaaatgtttttgtaagccttggcatgaattagtgttctagactctgctttgcacagcttgcacttacagtgattgtacatattgtacatctttgtacagagacatcttggcacctcatcccaacaaatcacatttgtagaaatgtaatgcggttctgagtggcttgaaatgtacagaatgttttgaaagtgttttattaagaatcacacaaaaataaatgtattaaaatt

SEQ ID NO: 14741 - protein, 678 aa, Homo sapiens [sequence omitted]

SEQ ID NO: 14742 - DNA, 2539 bp, Homo sapiens
  CDS (310)..(1347)
gagtgcggaacccgcgggagactttgagccaggcctgttaaaccaagttctcagcaggatgtgcacagagggcccaggaggagcctcaggagccggactgccgttggccaaccgagtccccagggagacacttaagggaaattaaactgcagagtgcaagagatgcctcagtcaagtcagccaaaaacacgcgggtcatccccaagccccagagaggctttgaattgaaggcgagtgcctcagaatttgcatccattgttctgtctttcctgggaagttattcatcctggtggccagcccaccgacaaaatggatttggatctactggacctgaatcccagaattattgctgcaattaagaaagccaaactgaaatcggtaaaggaggttttacacttttctggaccagacttgaagagactgaccaacctctccagccccgaggtctggcacttgctgagaacggcctccttacacttgcggggaagcagcatccttacagcactgcagctgcaccagcagaaggagcggttccccacgcagcaccagcgcctgagcctgggctgcccggtgctggacgcgctgctccgcggtggcctgcccctggacggcatcactgagctggccggacgcagctcggcagggaagacccagctggcgctgcagctctgcctggctgtgcagttcccgcggcagcacggaggcctggaggctggagccgtctacatctgcacggaagacgccttcccgcacaagcgcctgcagcagctcatggcccagcagccgcggctgcgcactgacgttccaggagagctgcttcagaagctccgatttggcagccagatcttcatcgagcacgtggccgatgtggacaccttgttggagtgtgtgaataagaaggtccccgtactgctgtctcggggcatggctcgcctggtggtcatcgactcggtggcagccccattccgctgtgaatttgacagccaggcctccgcccccagggccaggcatctgcagtccctgggggccacgctgcgtgagctgagcagtgccttccagagccctgtgctgtgcatcaaccaggtgacagaggccatggaggagcagggcgcagcacacgggccgctggggttctgggacgaacgtgtttccccagcccttggcataacctgggctaaccagctcctggtgagactgctggctgaccggctccgcgaggaagaggctgccctcggctgcccagcccggaccctgcgggtgctctctgccccccacctgcccccctcctcctgttcctacacgatcagtgccgaaggggtgcgagggacacctgggacccagtcccactgacacggtggcggctgcacaacagccctgcctgagaagccccgacacacggggctcgggcctttaaaacgcgtctgcctgggccgtggcacagctgggagcctggttcagacacagctcttccagggcagcggctccactttctcatccgaagatggtggccacagactgacccccatctgagctggggggatgttctgcctctccctgggtctggggacaggcccgcttgctgggtacctggtccccactgctgagctggcccttggggagaggtgattctcagggctggagcctggggtgtcctacagtgactccctgggagccgcctgcttcttctctccacatggaagcccaactggggttgcgtctgaggcctgccccctgggctggggcctcagaccccctcagccttgggaccgtgcccacgagggtctcccctcctgcacacagggcagtccttactcccccaccactcaggccacagtggggctgcaggcaggcggctcctcctcacccacctctgggtccttggctcccgggggccccacctcggcacacactgtgccccacaaaacttcagtgtggtacaaggtggagaaagcatatcccaccaacctccagtgtcagggtccaggagagcctgggggtggggggactgccttgtctctagtagtgtggcctgtgccagcaccacagccggtcagaggagcgcaggcagcgcagggctggcacgtgacaggctcgtcagccacctgggaacacagttctgggcaaagaggatccgaggttgagaggaaggagggtcccggtgtatcctggccctgggggtctgggcgtccagctcagccctggcctggctgggtggtattctggtagggatatggcaggactcctggcagggccacctgcaggaccctgtcctgcagtcccacactgtgcagacccagtcccacactgtggccaggccttacatctggctggaaagcagagcctcccgggaacacatctggctgcacaggctgaaatatccacccagcaggcagagtggcgtggcctccccatgggcacagtggtgacccccttgattcccaccgtacaaccccctccaccccccactcagtgcctccacatgctgcctggcacagaccaggcctttgacaaataaatgttcaatggatgcagttccagg

SEQ ID NO: 14743 - protein, 346 aa, Homo sapiens
MDLDLLDLNPRIIAAIKKAKLKSVKEVLHFSGPDLKRLTNLSSPEVWHLLRTASLHLRGSSILTALQLHQQKERFPTQHQRLSLGCPVLDALLRGGLPLDGITELAGRSSAGKTQLALQLCLAVQFPRQHGGLEAGAVYICTEDAFPHKRLQQLMAQQPRLRTDVPGELLQKLRFGSQIFIEHVADVDTLLECVNKKVPVLLSRGMARLVVIDSVAAPFRCEFDSQASAPRARHLQSLGATLRELSSAFQSPVLCINQVTEAMEEQGAAHGPLGFWDERVSPALGITWANQLLVRLLADRLREEEAALGCPARTLRVLSAPHLPPSSCSYTISAEGVRGTPGTQSH

SEQ ID NO: 14744 - DNA, 2863 bp, Homo sapiens
  CDS (24)..(581)
agtgtcgatccctcagccagggcatggagctctcctgccccggttcgcggtgcccggtgcaagagcagcgtgcccgctgggagcggaaacgcgcctgcaccgcccgggagctgctagagaccgagcggcgctaccaagaacagctggggctggtggccacgtactttttggggatcctgaaagccaaggggaccctgcgaccacctgagcgccaggccctgtttggctcctgggagctcatctacggcgccagccaggagctgcttccctacctggaaggaggatgctggggccaagggctggagggcttctgccgccacttggagctctataaccaatttgctgccaactcagagaggtcccagaccaccctgcaggagcagctaaagaaaaataaaggtttccggaggtttgtacggcttcaggaaggccgccctgggtttgggggccttcagctccaggacctgctccctctgcctctgcaacggctccagcagtatgagaatctcgtcgtagctttggctgaaaacacaggtcccaacagccctgaccatcaacagctcacacctgtccttccctcatgagaagctactgcttatgtccacagaccaggaggagctgtcacgctggtaccacagtctgacttgggctatcagcagccagaaaaactagaggaatcttatagattccagaactcaggatacctcagggataggtcacagccaagagtacaaaggaatcttcagtactgaacaaaacagaacccttcatgatttgacaaaggtcactttctgtttgcctggaccaagctactccagatcatctgaccaactcttaaaaatcacggccaggcacagtggctcatgcctgtaatcccagcactttgggaagcagaggtggcaggatcattccagcccaggagttcaagaccagcctgggcaacacagtgagtgagaccctgtctctatttaagaaaaaataattaagaaattttattaaaaaagaagaatcaggaaaccaagtccaacccaactaaacctcaaatgaaccagcccctaacacagatgaggggatttgggactgataagctctgtgctgtgtccatggcccgtcatttatcaaggctgcagctttgtaaatgtggctatttttatgttgtgtatagtttctatcatttatttttccactggatttgagtaaagtttttttttcttttttttgggaaagacccttctgtctcagttttgctatgagaaaagggatttttgggccctgaacgcgggcatgctggtggcctcaggaatacgaggaaaagagctggagctccctctatcttctctgctgtcacactggaaggcagcctctttttgtcctaataaggacagctcttcaagaaggcccagttgtccttaggcacctagtatgggtgtgtacaaccaactaggatcgaaaaaacacacaggagcactccatcatgaaaacagactttgttttagtcgaccttcagctgtcgtccctccttcccagccaaggctgtgactggggccctttgccacagcctggctgcaccttctccgtagtccccgccccacctcccaggaagtagctaggttccatgtctctgtgctccagtttgtgggctcctcccaggcctgactgtcaccaacctcctcctcgtcctcctttaaacagaagtcctcaggaagaggtctgctggcctctgtgtggggagagatcaggaatgttccagtttcagagactttgtctccacctccagcagactcgcctcccgagccttcacctggttctgaagcctccatatccttgtccggcttgctatcttgcagcagctcgtggatggtccatagcttcatgttcagaagctcctgctgggctccagccagagtagtcacactgaagaaatgtccactcagtggctcccaacctatgtccccattcctccctcctgccacaaattccccaaaaattcacagaatcattgctctcctcaccgctcaaaaagggggtccagctgggccatcaggttgttcaggtgctgctctgtctgggccagctgttgtgtcaactgggccagctgttgctctggggataagggaaaaaagggggcagaagtggttatgtatcttctgctgtcccctaaactcccccgacccagcacagacttctgctaaacccacctgactgcagtggctgctgcttgcttgcctcctcgtggagaaccgcagtttcatctttcccctgttgtggaagaaggaaagggcagtactgaagcaacaaggttctgctccatcacctcagtctccagagccagccaagagagagtgcaatttgagatggagacagtgattgggtttttacctcagagaatcacaatcctagtctatctagctcctcacccagcatatgaagcgacgtcctatgtcccacacatggtcagtttgctgaaacacctccaggaatgagcaactccctccggtttgaaaaaagctctggtggctgagtgctgtggctcacacctgtaatcccagcacttcgggaagccaagggcctcctcccaaggagaacatgagaccacttcatatctggaactctagaaacactggctgcagcaatcaacctcctgtgccaaggctggccccactcttgtagcatggacactgctagctgggttcaaatcccagctccagcagttgccagcgctgggtgacctcgagtaagtgactactcctcactggattgtgggagaactaaatgtgatagtcattatttacagttcaccacacgctcttcacatccgttacctccctggatcctcaaaataacctcataatattggaaggcc

SEQ ID NO: 14745 - protein, 186 aa, Homo sapiens
MELSCPGSRCPVQEQRARWERKRACTARELLETERRYQEQLGLVATYFLGILKAKGTLRPPERQALFGSWELIYGASQELLPYLEGGCWGQGLEGFCRHLELYNQFAANSERSQTTLQEQLKKNKGFRRFVRLQEGRPGFGGLQLQDLLPLPLQRLQQYENLVVALAENTGPNSPDHQQLTPVLPS

SEQ ID NO: 14746 - DNA, 2687 bp, Homo sapiens
  CDS (148)..(1884)
agtctccgcgctgctgaggcgcgcccggccgctcccacggcctcccctccgccctgcggtcccgccgcctccggggcctcctgggaccctggccctcgccgggcaggacgccgccagcgctgaaggcgcagcccggaggccgcgcggatgcagatctgtggatccagcgtagcatctgtagcagctgggacatcattccaggttttgggcccggtgtgttggcaacaactggatctgaagatggcagtcagggtgctttggggtggtctcagcctgctccgagtgctgtggtgtctccttccgcagacgggctatgtgcacccagatgagttcttccagtcccctgaggtgatggcagaggacatcctgggcgttcaggccgcgcggccctgggagttttaccccagcagctcctgccgctcggtgctcttccccctgctgatctctggttccaccttctggctgctcaggctctgggaggagctggggccgtggcctggcctggtgagcggctatgcgctgctggtggggcctcgactcctcctcactgccctttcctttgctctggacggggccgtgtaccacctggccccgccgatgggggcggatcgctggaacgccctggccctgctgtctggttcctacgtcaccctggtcttctacacaaggaccttctccaacaccattgagggactcctcttcacgtggctgctggtgctggtatcctcccatgtaacgtggggccctacacgcaaggagccggcgccgggtccacggtggcgcagctggcttcttggaggcattgtggctgctggcttcttcaaccggcccacctttctggcctttgctgtggtccccctctacctctggggcactcgtggagccacaaaccctggtttgaagtctctgacccgggaggccctggtgctgctccctggggcgaccctcacagcagcggtgtttgtggccacggacagctggtatttctccagccccgcgacatccaggaaccttgtcctgacacctgtcaacttcctgcactacaacctgaatccccaaaacctggcgagacatggcacgcacgcgcggctcactcacctggcagtcaacggcttcctgctcttcggggtgctgcatgcccaggccctgcaggctgcgtggcaacagctgcaagtcggcctccaggcctctgcacaaatgggcctcctgagggcactgggtgcccggagcctgctgtccagccccaggtcctatctccttctcctctacttcatgcctctggccctgctatctgcctttagccaccaggaggctcggttcctgattcccctcctggtccccctggtcctgctttgtagtccacagacgcagcctgtgccttggaagggcactgtggtcctcttcaacgccctcggtgccctcctcttcggctgcctgcatcaggggggcctggtgcctggcctggagtacctggagcaggtggtccatgcccctgtgctcccaagcacacccacccactacacactcctcttcactcacacctacatgcccccccggcacctcctacacctcccaggcctgggggcaccagtggaggtggtggacatgggggggactgaggactgggccctgtgccaaaccctgaaaagcttcaccagacaaccagcctgccaagtggctggtgggccatggctctgccgcctctttgtggtaacccctggcaccaccaggcgtgccgtggagaagtgcagcttccccttcaagaatgaaacacttttatttccccatctgaccctggaggatccaccagccctgtcctccttgctgagtggggcttggagggaccacctcagtcttcacattgtggagctgggggaagaaacctgacaatatgacagagcacccactgcccaagactcagccatagaagatgccgccccaccttctacttgggtagctgggctgggacgctgggacaggaccccgtcctccttcatgactcccactgctgcctctcctgggcatggctgttagctgttctgccttctgggtgagctggcactcttctccctgagaccaaagatttgacctgtcggtcttgatgtcaaggtccccaaagaccaggttaagtgacgacacctgtctgttcctgccctgttgcttccagccactgtgatgtttgaaatatgtgatagtacctggttgtgaaaaaagacaatgaactgctagtgacattcctcaatgacctctcccaaacctcccatgatgccttacccttgctgtcatgacaaccctctggcttcctaagacccatctgcctatcgaaatatgtgcaagtcagtgagacgaagtatagagaacaggtggcccagatccaggggacccaacttctggccccttggtctgtcacctcctcgctgtgtgatcttgagaaagctccttccactcacccaccccacttcccagtctgttgggatcagaggaactttgaggtgtctgccggctaacattgtgtcattcctggagtccacagtacacgtcccctgcctcaacaggcacagctctcacaaagctcttcaagcatggaagtgggagttgtgttgtacttcatggcactctgatgcctgctgtctcagtgtttggttattatgcaaacaagtaatgtttgaaatatataatagcactgg

SEQ ID NO: 14747 - protein, 579 aa, Homo sapiens
MQICGSSVASVAAGTSFQVLGPVCWQQLDLKMAVRVLWGGLSLLRVLWCLLPQTGYVHPDEFFQSPEVMAEDILGVQAARPWEFYPSSSCRSVLFPLLISGSTFWLLRLWEELGPWPGLVSGYALLVGPRLLLTALSFALDGAVYHLAPPMGADRWNALALLSGSYVTLVFYTRTFSNTIEGLLFTWLLVLVSSHVTWGPTRKEPAPGPRWRSWLLGGIVAAGFFNRPTFLAFAVVPLYLWGTRGATNPGLKSLTREALVLLPGATLTAAVFVATDSWYFSSPATSRNLVLTPVNFLHYNLNPQNLARHGTHARLTHLAVNGFLLFGVLHAQALQAAWQQLQVGLQASAQMGLLRALGARSLLSSPRSYLLLLYFMPLALLSAFSHQEARFLIPLLVPLVLLCSPQTQPVPWKGTVVLFNALGALLFGCLHQGGLVPGLEYLEQVVHAPVLPSTPTHYTLLFTHTYMPPRHLLHLPGLGAPVEVVDMGGTEDWALCQTLKSFTRQPACQVAGGPWLCRLFVVTPGTTRRAVEKCSFPFKNETLLFPHLTLEDPPALSSLLSGAWRDHLSLHIVELGEET

SEQ ID NO: 14748 - DNA, 2581 bp, Homo sapiens
  CDS (238)..(1629)
attgaagcctacaaccatgcaaagtgcagtgctgagaatgaggaagacaaaaaggtcatctcattacagttggataaagatcaccacgctttatatgtggcgttctctagctgcattatccgcatccccctcagtcgctgtgagcgttatggatcatgtaaaaagtcttgtattgcatctcgtgacccgtattgtggctggttaagccagggatcctgtggtggagtgaccccagggatgctgctgttaaccgaagacttctttgctttccataaccacagtgctgaaggatatgaacaagacacagaattcggcaacacagctcatctaggggactgccatggtgtacgatgggaagtccagtcgggagagtccaaccagatggtccacatgaatgtcctcatcacctgtgtctttgctgcttttgtttcgggggcattcattgcaggtgtggcagtatactgctatcgagacatgtttgttcggaaaaacagaaagatccataaagatgcagagtccgcccagtcatgcacagactccagtggaagttttgccaaactgaatggtctctttgacagccctgtcaaggaataccaacagaatattgattctcctaaactgtatagtaacctgctaaccagtcggaaagagctaccacccaatggagatactaaatccatggtaatggaccatcgagggcaacctccagagttggctgctcttcctactcctgagtctacacccgtgcttcaccagaagaccctgcaggccatgaagagccactcagaaaaggcccatggccatggagcttcaaggaaagaaacccctcagttttttccgtctagtccgccacctcattccccattaagtcatgggcatatccccagtgccattgttcttccaaatgctacccatgactacaacacgtctttctcaaactccaatgctcacaaagctgaaaagaagcttcaaaacattgatcaccctctcacaaagtcatccagtaagagagatcaccggcgttctgttgattccagaaataccctcaatgatctcctgaagcatctgaatgacccaaatagtaaccccaaagccatcatgggagacatccagatggcacaccagaacttaatgctggatcccatgggatcgatgtctgaggtcccacctaaagtccctaaccgggaggcatcgctatactcccctccttcaactctccccagaaatagcccaaccaagcgagtggatgtccccaccactcctggagtcccaatgacttctctggaaagacaaagaggttatcacaaaaattcctcccagaggcactctatatctgctatgcctaaaaacttaaactcaccaaatggtgttttgttatccagacagcctagtatgaaccgtggaggatatatgcccacccccactggggcgaaggtggactatattcagggaacaccagtgagtgttcatctgcagccttccctctccagacagagcagctacaccagtaatggcactcttcctaggacgggactaaagaggacgccgtccttaaaacctgacgtgccaccaaagccttcctttgttcctcaaaccccatctgtcagaccactgaacaaatacacatactaggcctcaagtgtgctattcccatgtggctttatcctgtccgtgttgttgagaggatgatgttgtaagggtaccttaaaacaagagactcgcttgtattttaagagaaccaagtggccaaagaaactctttctaactttggcaacatcagaacttgccacatgtagctactgcagcaaggcttctgtgtacttgcctgaaaacaaaggaaggtgctggtcattccatttcttttgtttgaagctaaagagatgtgtagctcacaggggctaccttaccagtataaagagctgataacagtactcagaagaatctgtgaacaaatacttgaaaatgggttcaatgtagactgccattatgtgtggtcttcccattaaatgtgaacattttaatatgtatgcattcaccttgcctcttgcacaaatgtcaaaaaaaagatggtaatatctcaaagaaatgaacttgtagattaccaagcagtttgctaaaaattcaatctttgacccaagctgtagcatttttttttcatgtgtggcatctttttcatgccaccaacaaacttgttgtgtgtgtgcgtgtgtgtgtgtgtgtgtgtgtgtgtgtgtgtgtgttctgtacccactaggatttgtttaggtgcccattgcatctttttgtgctatggagttgtttacattaagcatgaccgaacgagagacaatactatttcccacaggagtccattgggttcagctttgaaagaggaatagaatcgaggctcctttgaccatcaaaatgatgaactttacttatgtggtacccaatgccagaatgtaagagttgcaagtgattttgtgctgctattcattaaaacttgtattccagtcttgccagcttaaggagatcaagatattaagaggtatccttgatttattttccagtattcagtagtaaaattttcctgtccactgtg

SEQ ID NO: 14749 - protein, 464 aa, Homo sapiens [sequence omitted]

SEQ ID NO: 14750 - DNA, 3586 bp, Homo sapiens
  CDS (874)..(2601)
gcgcgtaatggcagcgccgtggcctcgcgtccatctttgccgttctctcggacctgtcacaaaggagtcgcgccgccgccgccgccccctccctccggtgggcccgggaggtagagaaagtcagtgccacagcccgaccgcgctgctctgagccctgggcacgcggaacgggagggagtctgagggttggggacgtctgtgagggaggggaacagccgctcgagcctggggcgggcggaccggactggggccggggtaggctctggaaagggcccgggagagaggtggcgttggtcagaacctgagaaacagccgagaggttttccaccgaggcccgcgcttgagggatctgaagaggttcctagaagagggtgttccctctttcgggggtcctcaccagaagaggtccttgggggtcgcccttctgaggaggctgcggctaacagggcccaggtgagaggcagctatctatctcctggggtggctcctggtaccgatggagtcctgacctactcaggggtgcccgggatagaaagggtagatgaagggacgctttaggagggttctttttgtggagtttacggtctaggtggcacggatgaggcatacctccccgaggagatttagaaacgccttgggatagaaagagaatggggctaggaagcaggagctagaactagcggaatgtcctactacggaagccggagctgaaaattggaactgccattggatgtccagaatcccctgtagttgataatgttgggaataagctctgcaactttctttggcattcagttgttaaaaacaaataggatgcaaattcctcaactccaggttatgaaaacagtacttggaaaactgaaaactacctaaatgatcgtctttggttgggccgtgttcttagcgagcagaagccttggccagggtctgttgttgactctcgaagagcacatagcccacttcctagggactggaggtgccgctactaccatgggtaattcctgtatctgccgagatgacagtggaacagatgacagtgttgacacccaacagcaacaggccgagaacagtgcagtacccactgctgacacaaggagccaaccacgggaccctgttcggccaccaaggaggggccgaggacctcatgagccaaggagaaagaaacaaaatgtggatgggctagtgttggacacactggcagtaatacggactcttgtagataatgatcaggaacctccctattcaatgataacattacacgaaatggcagaaacagatgaaggatggttggatgttgtccagtctttaattagagttattccactggaagatccactgggaccagctgttataacattgttactagatgaatgtccattgcccactaaagatgcactccagaaattgactgaaattctcaatttaaatggagaagtagcttgccaggactcaagccatcctgccaaacacaggaacacatctgcagtcctaggctgcttggccgagaaactagcaggtcctgcaagtataggtttacttagcccaggaatactggaatacttgctacagtgtctgaagttacagtcccaccccacagtcatgctttttgcacttatcgcactggaaaagtttgcacagacaagtgaaaataaattgactatttctgaatccagtattagtgaccggcttgtcacattggagtcctgggctaatgatcctgattatctgaaacgtcaagttggtttctgtgcccagtggagcttagacaatctctttttaaaagaaggtagacagctgacctatgagaaagtgaacttgagtagcattagggccatgctgaatagcaatgatgtcagcgagtacctgaagatctcacctcatggcttagaggctcgctgtgatgcctcctcttttgaaagtgtgcgttgcaccttttgtgtggatgccggggtatggtactatgaagtaacagtggtcacttctggcgtcatgcagattggctgggccactcgagacagcaaattcctcaatcttgaaggctacggcattggggatgatgaatactcctgtgcgtatgatggctgccggcagctgatttggtacaatgccagaagtaagcctcacatacacccatgctggaaagaaggagatacagtaggatttctgttagacttgaatgaaaagcaaatgatcttctttttaaatggcaaccagctgcctcctgaaaagcaagtcttttcatctactgtatctggattttttgctgcagctagtttcatgtcatatcaacaatgtgagttcaattttggagcaaaaccattcaaatacccaccatctatgaaatttagcacttttaatgactacgccttcctaacagctgaagaaaaaatcattttgccaaggcacaggcgtcttgctctgttgaagcaagtcagtatccgagaaaactgctgttccctttgttgtgatgaggtagcagacacacaattgaagccatgtggacacagtgacctgtgcatggattgtgccttgcagctggagacctgcccattgtgtcgtaaagaaatagtatctagaatcagacagatttctcatatttcatgacacatgtgaagaggcatcgtggacttttttctactcaattccagccaatgttgaaaagaaaaagaaaaaaaaaactctctaatcagttgtacacacattgaaacttatagccatggccagattttatgctaaaaatggtagtttgtcaaagacaaaattctcttagaatctaatccaacttgccagccctgagaaaatcccttttaaggccaaggaaagctgaatgctagcagccaggcctgtggtacttccatgagaaaccatagcagacaatgccctcccaagtactgaaatcacactggaatcccccttgttgggttcatttgattgtttaacacaggatgtgttgtgtcattctgaagtttttatttggggcagaagtctttatggagatgtaaatgacagcgtttctgggttatgcataacttctcactggtcagagacaccggtgtgtcaagcatggatattgcattgcaagacttgaatctataaaaattagaatcacacagtcagtactacaagcaaaacagagaacctggaagaaggtgcacagactgtaagaaaaaacccaagtttgtgatatttcagtgattccaaagaacattctaggttttttgtttgtttttttgttttttgggttttttttttttactgcagaaaattggtggtattttcacattcatagtgtttctatccaatttcagtacccacatttaatgaggaaaaaatgttttaccaatgaaggaggaattcttaaattagctgtaatgttaggttggagaaaatttggtatttagggtattttcaaggtaccatcaaatcagatttctgtttttttgttaaaaaaaatttttttaatcagtattgtttttacaagtaatatactttgaaactcttgaactaatagtctcaaaaactctagaggacagtctgagaacacgtatttctattgttctaaataaatacatgtttttgaatagtt

SEQ ID NO: 14751 - protein, 576 aa, Homo sapiens [sequence omitted]

SEQ ID NO: 14752 - DNA, 2973 bp, Homo sapiens
  CDS (178)..(618)
atatcagagaagatcctgctgcggctactcaagtacccagatgtcattcaggaactcaagtttgacgagcacaataagtactacgcccgccattacctgtacacccgaaataagccggccgactacttcatcctcatcctgcaggggaaggtggaggtggaggcagggaaggagaacatgaagtttgagacgggcgccttctcctactatgggactatggccctgacctcggtcccctctgaccgttccccagcacaccccaccccactcagccgctcagcctccctcagttacccagaccgcacagacgtctcaactgcagcaaccttggcaggcagcagcaaccagtttggcagctctgtcctgggccagtacatctctgacttcagcgtccgggcactcgtggacttgcagtacatcaagatcactcggcagcagtaccagaacgggctgctggcttctcgcatggagaacagccctcagtttcccatagacgggtgcaccacccacatggagaacttggccgagaagtctgagctgcctgtggtggacgagaccacaactcttctcaacgagcgtaactccttgctgcacaaagcctcccacgagaatgccatctgacaggagggcccggggccccctgcccaccctgcgggggcctccccagtgggcccacatgaagagagggaacctgttagtccagaaaggatacggatagatagcctgtctgactgaacagccagatggcccccagcctatgggggatctggcctctgccagggacctctgagtagctctgaggtggcactgtccagccctggatagggggggcagtgggccagctaccgtaagcaaaggctgttttttactgagagaatttctaaagtaggctcatcacttttttttaaatatcattttgggaagggaagacagggttaaggaactttatttaaaaaaaaaaatatttttttcctaaaaactataaaagaggaagggtttcttgtcccgggaagcaacggacataatctgttcccagccatggccttccagcttgtgtccctgattcagggagctctcccttcctcctcctcctcctcctccggaggtgggatcccagagcctgccagtggaggcttatctgttgggaggaagacagctcttcacagaagcaaagaacaaaatggcatggagatcagctgcctgagcacctgcgctgtagcttatctgacaacgctgaggccacgagctcctgggtagctgtgatcagggacatgataatctgagctatgcagaggagcacatctgttgtcaactgctgtacccagaaatctagaactctgccgacagcctctcctggtgagtcgggactcagctgaggacacatccccaccctgcctcccatctggccctttggacaactggccctttgtgacagggctgactcaagtgttaggcagggtctcaggcctttgattgctcacccctgctccccaggccctgccctcacttttaccaaaggttctccctcggcgggagggcatctgtgttggaggtgatttgtctgggttcttccttttggttccagaaggaactgtcagtcatcagcatctgcgttgttagcagtcagtaccacccccgccccacaatgacagtcaaggctgacttgttgactgaagcctttttcccagaccccttatttcgaatccccaagcttcagtccctcttgggggtggagacaagaggacatgtgggaagccacggaagcaggttctttatgtcctctcctctgtggctggcaaggctcacctggccttatccacccacttatggaacctcaggagaggagggctcctcctaaaggcatgcagcttgcagcccctctttctcacacgtgtgatcctagcgtgagaggtcatcctgcccttgctgaagttagtagtactgtactaagagctctgccctcatgtgaattcctgccctggcgcctcttccctggggctgaatcaggccctgctgcaaaactccaggcttcccagggttggggaggctgtgggaccaaggtccatgttggtccttccactgggtgcagcaggagctgggtcccgagagcctggcaggtgaaactctgcaggccttccgcctgattattatttattcactcctttcctcaccccaagtgccctgctctccaggtgcctagagtatcctaactcttaggaccagggattgtcttgcaccaagtatgcctacccctggccagtctgaggtctcctagccatagaactgactcctggaagcctggagagaaggtggtgacacccatgggttctcaactgtaaggaaaaaagacaccagacttttgttccctagtgggggaaagcccttagtcttgtacaggagcagcttgctcccaagtccttttggaagctggcagagctatattcctgacagccctgactgccaggtagagcaaaagacattggtgggggtatgtgaagcaaaaggggcaggtgcacacacctccacagtgacctctgtgcacacggttaccaccaactggctggccctcctcctcttccctggcccattgatcatcccttctcacagagggtcatcattatttccaaatattgtttgtctgatgacttcctcttcccagtgcaatttttcccttcctatttcaacctctggttcctgggatgagccataccctggaactggcccacccactgtgtcttccacgtaagggagacctttgcaaagggcatccaaatgggtaggcaggtgacagccgccgtatttattttgcataatattttaatttgtatatttttgtgatttattttggcgttatgagtttgactctcggggagttttgttgttatgactcttgtgtcttttgtcacaaaacaatgatatttgctaaacgatatatggaatttatttttgattggtaataaaaaatcaaatatg

SEQ ID NO: 14753 - protein, 147 aa, Homo sapiens
MKFETGAFSYYGTMALTSVPSDRSPAHPTPLSRSASLSYPDRTDVSTAATLAGSSNQFGSSVLGQYISDFSVRALVDLQYIKITRQQYQNGLLASRMENSPQFPIDGCTTHMENLAEKSELPVVDETTTLLNERNSLLHKASHENAI

SEQ ID NO: 14754 - DNA, 3006 bp, Homo sapiens
tgggaacagaagaggattgacaaattgatgatagagacagttgaccctgacaataggtctaaatttggagtgaacattatactgggaatctcttttgctgtttgtaaggctggagctgccgaaaagggattctccctgctgtcacagaattgtgaatttgctggcaattctgaaggcatcctgctagttccagctttcactgtgaccggcaatggttctcaatctggcaataagctggcagtataggagttcataatcttccccgtcagcaaacttcagggaagccatgctcgttagagccaaggcttagcacacttgagccgtgtcatcaaagagaaatgtgagaaagctgctgccaatgtgggggattgtggtaggctgcataatgtctcctaaagatgtccatgtcctaatccctggaacttgtgaatatactactttacttggccaaagggatttgcagatatgattaaggttatgaaccttaaaacggggacattatcctgtattatccagaagggtccagtgtaatcttatgagtccttaaaagcagagaagaaagccttttatgtctgtggtcagagaggtcagaagttatgatattgctggctttgaagatggaagagggggccatgagccaaggagagtgatgaccttgcagctgagtacggcccttggccaacaatgagcaaggaaatggatttcagtcacataaccacaaggaactgagttctatgagtatcccaaatgagcaaggaaacaaatcctcccctagagccaagaaaggaaggcagctctgtggataccttggttttggcctggtgctgcccatgtcatacttttgacatacagaactgtaagatagcaagtgtatgttgactaagctgctaaattggtggtgattgcttatggcagcaatagaaagctatatatcctagagaataaagaaggctagagctgctgtggaatgcacttgggaaagctggctacattgataatatgtaactgccatgggcatagttgcctttgtattcttccaggtctgggaagtacaacttagacttcagatctcgtaatgacccaggaggcatataaacctgagcagctagtggccctgtacaagtccttcatcagggaaaaacattgagtattccctgattaaggacttgtacagaggactctgttttccctggtgtttctggtgtgtctcaaaaattgtttgactgtgatgacagggaagtttggaagaagttcactgctaatgcatgtctccaggaagcagggaatgatctcacagtgacacttgaggcacattgctgaggccgtcgatgagaattcatgtaactttctccagcttacagtggactagattgacatgcaagctgatccagtccaattggtagggcatcatggtttctcattactcactgacttaaaatacttttattgccatcctggtgaagcactgcactgggtagataacacaggggcaccttgctgatcagagcccttggccaggtacaaagagctcagtttctaaaactctgtcatttcaataatgttataaattgaatcatacagtatgtaattttatgggattcgctttttttctgttgatctctttttttctgagtcatctcagctgttgtgtgtatcaatagttcatttccttttactgttttgtttggtttaactcattgacctattgaaggatatctgggctcattccagtctgtgaataatgctgctgtggacattcatgtgcaagtttttgtgtgaacattaagttttcatttctttaagataaatgcccaggagtgaaactgatgggttgtatgtagttacaaactgccaagctgttttccagagttggcggtaccattctaatttcccatgacaattttttgaagagtccaagctagttgctttagagtgcctcacctacattttttaattgtctgactttttcctaatgacatcacttaatttgttcctcaatctcctgaatttcctatagactggaggttaggtctggtggtttgattagattttttaaaaaaatatgacttcatctgtgatgctgtgtactttatgttgcataacatgaaccctaagaacagagtgagctgctggacagcaagtttcatggggtgcagtaattaacacaccacatagtataaatctgaaataatgacaaatgtgttaagggccttgggatattgggccatgtactctgaggagcacaaggtgaggtgcaggttcctgcccctaaagaactctatcttttgagattagcaactaacagtgtgagcccactaataggatgtgaaagttgtcaaaatcaagttctggtcattgtgttaaaaatcctaacaaatagagctggggaaggccgtgaaaggacgattttcatgcacagatgtctgataatgaggactatcattaaaagactgcacaaaaccacaccttgcacaaaggccatcacaacctgacacacacaaaaaatacttctatgaggacatttgcccagcaactccctgtccaatgtccaactggcaacatccttgttattgatccttgtagccaaggataattctctcaaaacaatcatttttgctttaaaaaccgttgtcttccttgacctccctgtatatgcacatagtttactgtggcacttgtattcttattgcaatgcctactcctgaataaacatcattttctttcagagagtctccctctctgttatttaggctgacaaggatatgccaagaagtagcttggatatagcagttaactctgcctttaggatatgtgtatggggatataagagttaactaaaagctgacctttgagttggtccttgaataaaagaagaatagattccaaaaataagaggaataaataatgatcctgagctaggagagtacattttgcagacctttggtttccatattaagaaattcagatttttatgtacaataaagaagttctggaattcaaaaaaac

SEQ ID NO: 14755 - DNA, 1994 bp, Homo sapiens
  CDS (1129)..(1455)
accgagcaggaatccgtatctgggaacaggtgagagaggatgtgtgctgggccttggaggaagggggccgagaccgggccttacttctgtaacgatactgtgaggcatcggaaggccagcctgttgtgtccgttttgaaggtcggtgggctagactggctggccttctaggggtgtggagacttcccaactctgcccttgtgctttcctggaatccccaatatgcccggaccccggtttactcctttgctgcgagcccttctctcccgtccagagttgctccgagcctatctgctcagtcctagcgattcctgtggggcttgggacgcgcggttcaagcaccccggaccatatggatgcagcacccatgggttctcgctccaatgcttctttcctccttggggcgtaactcagaccctgggcacccctctccactgcccaggggagacctgggttctagatttggctctgcctctactatcttcctacctcctagagcctcagtttggcttgtgtaaaataggatgacttaagggtcctttcagcccctaatcctggggtactttactctgtaccgcctccttacccagccttgtgcacgccatcttgaaggcactgagttctagcctgtttattgtaagtggtgattagttgggtctcagtcacccagccatacttttttgttccctgcgtatccttcctgtaattgtccccaagcacattccacaagagggaggggcactctgggctaaggctggggtgggagttatctggggagctgccaccatgcctctgcctttggtgcttgcccctgcagggagtgcttagtgccccctccctatgccactcccaggatgcccctgtcccgctggttgagatctgtgggggtcttcctgctgccagccccctactgggcaccccgggagaggtggctgggttccctacggcggccctccctggtgcacgggtacccagtcctggcctggcacagtgcccgctgctggtgccaagcgtggacagaggaacctcggtgagtgtggttggggtgaggggccttggggaggggagcagctgatcaggtttctgacttgtttttcttctacttagagccctttgctcctccctcagaatgaacggagaccagaattcagatgtttatgcccaagaaaagcaggatttcgttcagcacttctcccagatcgttagggtgctgactgaggatgagatggggcacccagagataggagatgctattgcccggctcaaggaggtcctggagtacaatgccattggaggcaagtataaccggggtttgacggtggtagtagcattccgggagctggtggagccaaggaaacaggatgctgatagtctccaacgggcctggactgtgggctggtgtgtggaactggtgagaggggtagggcaagggagaagaagtttcctgcaatggtggtgacttgggtgggaaggggagggatgggcctgaaacttatttctgggttgtgtttgtgtttctttgtctctagtgtgctacggccaaatttagagtgaatcactccaagggttaactaatgtggggagcctcttttggcattaggtatgaagatggctgtagatagttgtagacagtgtggactggggcctcgagactgggcagagaggtgtcagctctttcctctgagcagaggatggctataaaagtgacagaggaggccgggcatggtggctgacacctgcaatcccagcactttgggaggccaagggggaggatcatctgagttctggagttcgagaccagcctgaccaacatggagaaaccccatctctactcaaaatacaaagttagctggatgtggtggcacatgcctgtaatcccagctactcgggaggctgaggtaggagaatcgcttgaacctgggaggcagaggttgcgatgagctgagattgcaccattgcactccagcctgggcaacaacagcgaaactccatctc

SEQ ID NO: 14756 - protein, 109 aa, Homo sapiens
MNGDQNSDVYAQEKQDFVQHFSQIVRVLTEDEMGHPEIGDAIARLKEVLEYNAIGGKYNRGLTVVVAFRELVEPRKQDADSLQRAWTVGWCVELVRGVGQGRRSFLQWW

SEQ ID NO: 14757 - DNA, 2891 bp, Homo sapiens
atagggaaaatattgccagcgttttcagtcattctgtgcatgctgctttaagcaagagatttatatttgttgagaggaaatattgctacttcctgcacttccaccctctgcagccggcaccgtccctactgttgccattaattggagctgtccttaagatggtcaccatattcttattcaggctgttgtcattttccccagagatggtttgtttaacgaatgataggctctgtgcctggggatgttagcagactctggggtttgtacagtgatgccttctccctggcccagagctgaatattcatctagaattaaagttggatttgatataacaaatttctttctatacaggttttacataagagagacagtaataatgtcaaggatagcctgtgtgggcagaaattggtagtcgtgcttttgaatgtcagctgtagagccaactctgattatctagccattgatcatacaaattgatagaaacattagtcagtaattttagcttcttgccaaattgttcacaacatctaaatgtaatgtgatgtgatgaagataagtagtacaaagagaccaaaataatttgggagaattaggaatgatgacaattttttttaacaacttacctctaatagggttacttggatgagccaactcagcttccttcccatggataggaagggactctgtgtattattcaggtttattggcacgaagatacttgttttaagttccttgagaacccatgatggacagttgacagaatgcttaaacctgtcaaaagatgagtgattttgtgtgggaaaagccttcccaggcgtctgtaccgaaaggagcagcaaacaaggggctaatccatgagcagtgttctgtaggctctgtgacatctttggtttataggattttggagccttttatgatctggaactatttgaggggtttcattataggccttggttctctccaggggccagatgagtttattgtggaatctttgaaaggacaaggcctctgtgaatgaatcagtcccagggaagcatttggtggtggcggcagtggaggattgcccggtgaacctataaatcagcagtctcttgggcagaggagcaagcccctcgaacatgatttcaaacaagcaggtcctcttctctcatctcacgtccttagtctctgttaatgaacatactggatgtggagtttaataaattacctactatcatctggccacttagattattatcacaccactgtggactgttcctggggggagaagaacagaccgatttgaaagattcaagggagaaagattaaggatcaggattgcatgaaagaagaaaatccttcaatatttaaaatgtttcttacaatacccacggagcacttttatggttccagccgagcgttcctgaaatgaactgaccattaacagcgcctctttgataggttaccctgatgctgctaaagtaaagccttaagtgtgtttttgggacaacgtgctgcttattccacctcagccacatatgtgtttgtgtttaggatattgtaaatctttgctaagtagtgttttccttggtgaatgaagtcattgttgtcttcaagtgtaccatctgcctagcaaaaaattgctacaaactttctcttatgcaatagtccttggtacttctaatatttttagcaagagacaattttctgtactagaatcttccactgccagaaaacacagtgccagtaaggttctacataccactgaccatctgcttaatagacatgtatttcctttgagtaggacattagcttttgattataaagctcaactagtataagcaaaaatataacatctagaagcacagttttagccaggatgtttaaaaattacagttttgtgagacttaagggtctttttaacctaggtaagtttatatgacctaacttaattgtagccatattctggtaccttccattttgaaaagtagaggttgcttaagcaagcaatggataataagagacttttcctgaggcacctgtttggaatctggttttctcagcggcagcttgacatgtgcacccttttgtattaaacactgcaagggtgatgcaggggagcaggaaagccatcctaaactcactactgagtacgattcagtatgttcctgtggatgtctgctgtgactaatataaatttcttgcagaatcagctacacttaattatgttgctgatagacaagcatccacgcttcagctggcactaagtgttttcattgtaggatcagcagcaggttaaagactgaacggttagtgaagacaaatgtcttaagaggctgcgatgtctaggttgggcttgtgacttcttagtggcctagccttcttgatggcaccttgaaagtgaacttctagaaatctacatttaaaaggcaaagctttaaaagcagagctagtctattctagttactgatgcaactaaaattctgtatttcttaagatggagccactgacgagatgtcacagtatagagcctgcagtctcaactcattgtgatcctaatggtctgggtgattggatggtttgagttgttagggattttgagtttttcattttattgcatatctgggttggatgttagactaaaggaaacccaggaatatttacctggtgttacatttaatatttaatgtaactggtctagcaacattaagggggatttctgaagccaactccggaggctgtgggctgcacattttgcactgtttttatatacttgtattcatatcctcttatcacctcagactcagacacaaggccttttacatggaaattttacaaattacttccatttatgtaaaataacgtcctgtgaccaagttgtttaaatggaaaataaagtgctttctttaagg

SEQ ID NO: 14758 - DNA, 2568 bp, Homo sapiens
  CDS (267)..(2363)
gtgtgaggggctcttcacgtggggaaggaacagcaggcgcggaggagggggcaagcgtgtgtgagattcagtggtccatgcgtgcgtttgtcgtgtaagggtcattcctggggtttggagtgggggaacaaatcaatgtggctgtttttccgtggaaagaattcccactgcagtgtcccggagcctgcgtgtggtgggcaagctcctcaaatggtatctcacagggaataggggagtcttgaaaacgcagcttcggcagtaggaacatgaacctcttacctaaaagttccagggagtttggctccgttgactattgggagaagttcttccagcagcgaggaaagaaagctttcgagtggtatggaacctacctggaactgtgcggggtgctacataaatatatcaagcccagggaaaaggtgctggtgattgggtgtggcaactcagaactgagtgagcaactgtatgatgtgggctatcgggatatagtgaacatcgacatcagtgaggttgtcatcaagcaaatgaaggaatgtaatgccacccgacggccccagatgagcttcttgaagatggacatgacgcagatggagtttcctgatgcctcgttccaggtggtgttggacaagggcaccctggatgctgtcctgacagatgaggaagagaagaccttacaacaggtggacaggatgctggctgaggttggccgtgtcctgcaggtgggcggtcgctatctctgcatctccctggctcaggctcacatcctgaagaaagcagtgggccacttctcccgggaggggtggatggtgagggtgcaccaagtggccaacagccaggaccaggtgttggaagcagagcctcagttctccttgcctgtctttgccttcatcatgaccaagttcaggccagtccctggctctgcccttcagatctttgagctgtgtgctcaggagcagcgcaagcctgtgcggctggagagtgccgagcggctggccgaggcggtgcaggagcgacagcagtatgcctggctgtgcagccagctgcgccgcaaggccaggctggggagtgtgtctctggacttgtgcgatggggacacgggggagccacgctacaccctccacgtggtggacagccccactgtgaaaccatcgcgggacaatcattttgcgattttcatcatccctcagggccgggagaccgagtggctctttggcatggatgagggccggaaacagctggcggccagtgctggcttcaggaggttgattacagtggcccttcaccgaggtcagcagtatgaaagcatggaccacatccaagctgagctgtcggctagagtcatggagctggccccagctgggatgcccacccagcagcaggtcccctttctgtctgtgggtggggacattggggtccggaccgttcagcaccaagactgcagccccttgagcggtgactatgtcattgaggatgtgcaaggggatgacaagcgatacttccgtcgactgatcttcctcagcaacaggaatgtggtgcagtccgaagccaggttgctgaaggatgtgtctcacaaagcccagaagaagcggaaaaaggacaggaagaagcagcggcctgctgatgcggaggacctccctgcagccccggggcagtccattgataagagttacctgtgttgtgaacaccacaaagccatgatcgctggccttgccctgctgagaaacccagagctactcctagagatcccactggcattgttggtggtaggcctgggcgggggcagcctccccctctttgtccacgatcaatttccaaagtcctgcattgatgctgtggagatcgatccctccatgttggaagtggccacccagtggtttggcttctcccagagtgaccgaatgaaggtccacattgcagatggcctggactatatcgccagcttggcaggaggaggagaagcacggccttgctacgatgtcataatgtttgatgttgacagtaaggacccaactctgggaatgagttgtccgcccccagcatttgtggagcaatcttttctacagaaggttaaaagcatcttgactcctgaaggtgtttttattctcaaccttgtgtgccgagacttggggctaaaagactcagtgctggctgggctcaaggcagtgttccccctcctatatgtctggcgaattgagggtgaagtgaatgagatcctgttctgtcagctgcaccctgagcaaaaacttgccacaccagagctcctagaaacagcccaggctttggagcggaccctggggaagcctgggaggggttgggatgacacgtatgtcttgtcagatatgctcaagacggtgaaaattgtgtgactgcttaggccaagcagccctcctgcctagactgaccttggactcccagcctgccagagaatgaagaaatacaacgcacagtacttttgaagcttcgtatttttcttggtttcacactcagctacatgtgacctccagcttggtgaggttgcctgaagattagggaaaataaaaatgtccttcccatcttgtcctcttcagt

SEQ ID NO: 14759 - protein, 699 aa, Homo sapiens [sequence omitted]

SEQ ID NO: 14760 - DNA, 2187 bp, Homo sapiens
  CDS (11)..(1831)
gcgctccaagatggcggcgaacgtgttcccgttccgcgacgcccgtgccgcaccggacccagtgctggaggccggcccggtggcacacgggccactgccggtaccgctggtgctggacaacgggtcgttccaagtccgcgctggctgggcgtgtcccgggcaggacccaggtcccgagccgcgcctgcagttccgcgcggtgtgcgcccgcggtcgtggcggggcacggggcgcgtcgggcccgcaggtggggaacgctctgggcagcctggagccactgcgctggatgctgcgctcgcccttcgaccgcaacgtgccggtcaacctggagcttcaggagttgctgctggactacagcttccagcacctgggtgtctcctcacagggctgtgttgatcatcccatagttttgacagaagctgtgtgcaacccactgtattcacggcaaatgatgtctgagcttctttttgagtgctacgggattcccaaggttgcctatggaatagacagcctcttcagcttctaccacaataagccaaagaactcgatgtgcagtgggctaatcatttcatctggataccagtgtacgcatgttttacccatcttagaagggagattagatgctaaaaactgcaagcgcatcaatcttggaggaagccaagcagctggttacctccagcgtctcctccagctgaagtaccctgggcacctggcagccatcaccctcagccgcatggaggagattctgcatgagcacagctacatcgctgaggattatgtggaagaattacacaaatggcggtgtcctgattattatgagaataatgtccacaagatgcagctcccattttccagcaagctcctgggcagcactctgacctctgaggagaaacaagaaaggcggcagcagcaattgcggcggctgcaggagctcaatgcccggcggcgggaggagaagctgcagctggatcaggagcgtctggaccgactgctatatgtgcaggaacttctagaggatggccagatggatcagtttcacaaagctctgatagagctgaatatggactccccagaagagctgcagtcctacatccagaagctcagtatagcagtggagcaggctaagcagaaaatcctccaagcggaagtcaacctcgaggtggatgtggtagacagcaagccagagacccctgacctggagcagctggagccgtctttggaagatgtggaaagcatgaatgattttgatcccttgttttcagaggaaacacctggagtggagaagccggtcaccactgttcagcccgtgtttaacttggcagcatatcatcagctatttgttgggacagaaagaattcgagctccagagattattttccagccatctctcataggagaagaacaggctgggattgcagagactcttcagtacattctggacaggtacccagaggacattcaggaaatgctggttcagaacgttttcctcactggcggcaacacgatgtatcctggcatgaaagccagaatggagaaggaactgttggagatgagacccttccggtcttcttttcaggttcaacttgcctcgaaccctgtgctggatgcctggtacggtgctcgtgactgggccttgaaccacctagatgataatgaagtttggatcaccaggaaagagtatgaagaaaagggaggagagtacctcaaggagcactgtgcttccaacatctatgtccccatccgcctgccgaagcaggcctcccgctcctcagatgcccaggcatccagcaagggctccgctgctggtggaggtggtgctggtgagcaggcatagcagaggccctccagagagactgccctgcacgccatgccttgggccacgttggcagtgtgacaggactgtgattgtgctagatgtacctgcccaagtctgctggtcacatttggcagcaaaatggatttctcctggggagaacaaagttaagggacactgagacctgcccttcagaattcggttcacttgggggcttctgtggtagagactaactggccttctgatgtctttgttcaactgtggccagctgtggcatcagcttcctggagcagtaaatgaagacagagtggaggacacaaatgtacaaaatgcacaagactgatttcttaccacattttagtctttcttgtttt

SEQ ID NO: 14761 - protein, 607 aa, Homo sapiens
MAANVFPFRDARAAPDPVLEAGPVAHGPLPVPLVLDNGSFQVRAGWACPGQDPGPEPRLQFRAVCARGRGGARGASGPQVGNALGSLEPLRWMLRSPFDRNVPVNLELQELLLDYSFQHLGVSSQGCVDHPIVLTEAVCNPLYSRQMMSELLFECYGIPKVAYGIDSLFSFYHNKPKNSMCSGLIISSGYQCTHVLPILEGRLDAKNCKRINLGGSQAAGYLQRLLQLKYPGHLAAITLSRMEEILHEHSYIAEDYVEELHKWRCPDYYENNVHKMQLPFSSKLLGSTLTSEEKQERRQQQLRRLQELNARRREEKLQLDQERLDRLLYVQELLEDGQMDQFHKALIELNMDSPEELQSYIQKLSIAVEQAKQKILQAEVNLEVDVVDSKPETPDLEQLEPSLEDVESMNDFDPLFSEETPGVEKPVTTVQPVFNLAAYHQLFVGTERIRAPEIIFQPSLIGEEQAGIAETLQYILDRYPEDIQEMLVQNVFLTGGNTMYPGMKARMEKELLEMRPFRSSFQVQLASNPVLDAWYGARDWALNHLDDNEVWITRKEYEEKGGEYLKEHCASNIYVPIRLPKQASRSSDAQASSKGSAAGGGGAGEQA

SEQ ID NO: 14762 - DNA, 2519 bp, Homo sapiens
  CDS (1606)..(1956)
tttaaaatgataaacctgggtcagaggatatttaggaagaggcattgtcattaagtccaagacaagatggtcagatttgttatcctagtgggttacaatccaaaatactctggagcatgctgagattaaggtggttgccaagggaacagaaaacagccatgagtaaataaatcaagactttaaaggatttagatcgggtctatggccagttgcagagtgggcaggatcttaagacccgataggtgcagaacccatctggacacggagaccaggaatggagttccatggaggcctggctggcactgcacccgggcatgaggacacatccagtaagaagacctgcctcaagaggtgcactgcggtgaccagtggaggtgactggttggagcctggaattggaagcagattccaagctctggtggacaaactctccaggcctggtgggaatcacagctggggcagacctcatcctggctgcctggccacaggcccccactctctgccactggtggtaggacgatgcctgtgtggagagctggcttctctgctcccgcctggtccaccacttggctagagttcagagacaggaagtgattggtctaagctaacacagcaagttggtggcagacctggttctagaggcaaaaccttcttccagatgtgaatgaaacctgcaggcttcattttcctttctgagcagtgcttcttagctctttggagacacgaagcccttggaaaatctgatgaaggttacggaccttccctaggaaaacagataactgacgtagactcaaaaaccccaagcaatttcaggagccactggactccctgaatgaaacccatccctggactccaggctaagaacctcagccctggggacttcacctgctgccctttccttacctgtcacacactgagccccgagtcaaggccactgtacaagtagtgcccctccctccccctggccaagcctccttcccttgttcaggaataaagaattccgaggagccctttttagtcattcccttctcccagacctaacgaatggtgcgtcaggtttctggagcctcatttcccttccccagacattggcagaggtcccttgggctagattttctcttctggttttgtttcttgttctgcctgactggccgctggcttccacaaaggagccctttgctcctggcctgggctctgatttcactgtgtggtctcaggggaagctggactgctgtggacgctggtgggagcttgagtctggtctgagtctgccccaggaagaaagaatcctgcttccaccaaccaagcccagtcagcggttcctcccaactggccaagtgttcagcccagtgggctggggaggaagaggatgagggcctcgctcctggtgcctgtggctctgggcagggtgagaggtcggtggaggatctttctgtgtgttctctgagtatgcagcagtgcagttgaagggaacagggcccaggcaggcagcaggacgaggactcctcccatcttcacacctgaaccagtcagcctggaagctacaagttctcacctgcctccccagaatgaacatcagaaaaggcaaaactgaccagggctgggatgggtttgggtcagcgtggttggagggcagcctgtggatccctgcactggagtcttgctgtcttcgatgcaggttggatcatacattgttacctcctactgtatgcctcaccctggaatagcagaatgctcagggggagatccgagaacgagaaggtgctcccagccccaggagcttccagtctggctctgatccttggccgacctagaggaaacctccacacacgccccttttgtgctaatggtgcagtttgtgtccccctctgcccatcactgtgctgtgcttgttcctgcctctgtgccttcccctatactgctcggacatgtcccctttcctctcctctacccagctaagcccttctgatccacggggcccggcttcccaaaccacccagcccacattcctccttcctgctccgaacaggtcccgtgtgagcccctgcccccgaattgcgtgctgtcccatggacgctccagtctcttccgtgtgtgtcttgagtccctaactagacagttagctccctgagggcaagggactgtcatttcctcttgagtcctaccagggtctagcacaggactgggctcctaactctcaggaaacacttgtcggctgactggtgcctcaagcgctggagcttgtcggtggccggtaatgggcagtgcacgtggggagagggtatgtgagttaactcaagggtgccttttcttgggctgtgggctggctcccctgggtcaaaagtggatgtcggaggcctcaggctcttacctccttggggcagtgggagcatcagggacccccacccccaccccggctctgcaggagtgcacggaagtggtcgtccagcctggatatttctacaggttgctgactcctgcgggagctgactgagtggaataaatgttctctcaacatc

SEQ ID NO: 14763 - protein, 117 aa, Homo sapiens; identical to SEQ ID NO: 14649

SEQ ID NO: 14764 - DNA, 2647 bp, Homo sapiens
  CDS (386)..(1981)
atataaactcgacagcgagggcaccccctgcgagtataaaacccccttcaggaggaacaccacgtggcaccgggtgcccactcctgccctgcagcccctctctagagcttcccccatccccggcacgcccgaccggctgccgtgccaacagctgctccagcaggcccaggctgccattcctcgaagcacctccttcgaccggaagctgcccgatggcacgagaagctcacccagcaaccagtcatcctccagcgaccctggacccggcgggagcggaccctggagaccacaagtgggctacgacgggtgccagtcccctctactgctcgaacaccagggctcaggccctttggaatgtgacggagccagggagagggaagacaccatggaagcaagcaggcacccggaaaccaaatggcatggcccaccttccaaagtcctgggttcctataaagaaagagctctgcagaaagatggaagttgcaaagattcccccaataagctttctcacattggggataaaagttgctccagtcactccagcagcaacacgctctccagcaacacctccagcaacagtgacgacaagcactttgggtctggcgacctgatggaccccgaattactggggctgacctacatcaaaggggcctccaccgacagtggcatcgacacggccccctgcatgcctgccaccatcctcggccctgtgcacctggcaggcagcaggcccctgatccacagccgggccgagcagtgggctgatgctgccgacgtctctgggcctgacgtcgagccagccaagttatattctgtgcatggctacgcgtccaccatctccgccggcagtgctgcggaaggcagcatgggcgatctcagtgagatatcctctcattccagtggttctcaccattcaggaagcccttcagctcactgttcaaaaagtagtgggtctctggattcatccaaagtctacatcgtgtctcacagcagcggacaacaggttcccgggtccatgtccaagccctaccacagacaaggggcagtgaacaaatatgtcatcggctggaagaaatcggagggcagcccaccgcccgaggagcctgaagtgactgaatgtcccgggatgtatagtgagatggatgtcatgtccacagcaactcagcatcagacagtggtgggagatgctgttgcagagactcaacatgttctgtctaaagaagattttctgaaattgatgcttcctgacagccccttagtggaggaggggcgaagaaagttttcgttctatgggaacctgtctccaaggaggtcgctttaccgcacgctgtctgacgagagcatctgcagcaacaggagggggtcctcctttggcagttcccggagttccgtgcttgaccaggccctgcccaacgacattctgttcagcaccaccccaccctaccacagcacgctgcctccgcgggcccaccccgcacccagcatggggagcctgagaaatgagttctggttctccgatgggtccttatcagataagtccaagtgcgcagatcctggcctgatgcccctcccggacacagccacagggttagattggacccacctcgtggatgctgcacgggcatttgaagaccagagggtggcatccttctgcaccctgacagatatgcagcatgggcaggacctggaaggggcccaagagctgcccttatgtgtagatccaggcagtggcaaagagttcatggacacaactggggagcgttctccatcaccactgaccgggaaagtcaatcagctggaattaattcttcgacaactccagaccgaccttcggaaggaaaaacaagacaaggccgttctccaagcagaagtgcagcacctgagacaggacaacatgagactgcaggaggagtcccagatcgcgacagctcagctgcggaaattcacagaatggtttttcaccaccatcgacaaaaaatcttagccaatccgcacctcatcaagggaccactgggaaatgccccttgtccctttgaagtcacaaacatgtggtttttctgtgtgctttcaaccaatcgtaaatgtttttgctgttccattctgtgtagcaccattcaccacagcaggatagggagcctcgactctttctcggtaaccacggcagagagcagcgccgatgtgaagatgaatgaatgtaactcctggtgtgaagatgaatgtaaaccctggcgacagttgagacctttttcttttagactctgctaaaacagtgctctggcttgggcttacctcaagagggaagatagttgagttttatttcctgtatatcaggtgacctggtagagatgtagagcaatttaccatagtttgggctttagtattgtaaaataaacatgagaacaaataatcagacatatactttaatgttaaaggtgctctatttttttggatgtacagtagttttatttccacagccacattaccatagcaataagaaaggaggcatagtacatagttggaaaagctttgtggggggattaaaaaaaaaaaaaagcactgttgtgtttaacactagttcagatgcagttaccttagagacttatttatttgcaggaacaaatggtgcctgaatattaacagtgttctg

SEQ ID NO: 14765 - protein, 532 aa, Homo sapiens [sequence omitted]

SEQ ID NO: 14766 - DNA, 2657 bp, Homo sapiens
  CDS (431)..(1297)
gtatcccgtgctgtttccctggcagacacacaggcgctcacgagtctctccttgccagcctgcagggcggcgacccccaaaacccagccccgggtcccaacctaggcaagaagctgcttctctgccaacagctcctcttcggcctccgtcacagccacctggaccctaccctttcgcgactgctgctgctgctgcccggacgtggaagcagcaagaggcgcttggtcaagacacactgacggtacctacagaatactggacatacggattcagaatccataaggctttatcaccttgaatcaaggatttatttgatatcatcctcggtctttacttcctatcaagtaacattgttttgaaaaatagagttaacacatttgccataagggagttttttttttttttttttaaatacttcgcatactctccaatgcccaaaaatagcaaggtggtaaaaagagaattagatgatgatgttactgagtctgtcaaagaccttctttccaatgaagacgcagctgatgatgcttttaagacaagtgaactaattgttgatggccaggaagagaaagatacagatgttgaagaaggatctgaagtcgaagatgaaagaccagcttggaacagtaaactacaatacatcctggcccaagttggattttctgtaggtttaggaaatgtgtggcgatttccatacctatgtcagaagaatgggggcggtgcatatcttttaccatatttaatactacttatggtaataggtattcccctttttttcttggaactctctgtgggtcaaagaattcggcgaggcagcattggtgtatggaattacataagccctaaactgggcgggattggatttgcaagttgtgtagtgtgctattttgtagctctctactacaacgtcatcattggctggagtttgttttatttttctcagtcttttcagcaacccctgccttgggatcagtgtcctttggtgaaaaatgcttcacacacttttgtagaaccagaatgtgaacaaagttctgccaccacctattactggtacagggaagcactgaatatttcaagttccatttctgaaagtgggggcttaaactggaagatgaccatctgcttgttggctgcctgggtcatggtttgcttggctatgatcaaaggcattcagtcttctggaaaagttagtatgttagagcccttcctcattctgctaatcaccatttctggattcatccctctctcaaattctgttacagatttctgtgggcaaatcacacataacacttcattctaggtagttaaatattagtgaaaagtgacacttcaaaagtgtgcttacatttttaaaaagacaaataaaaacagtgttttatagtgaaatctaaggttaattataatctttccttatttcaacaagatctttaaaatttttgtgaatacttaaaagtcctttctttttgccctttattcaattagtcctaatgtttcagttctctaattaccaattagttaaattatggaaattggggaaagtggtaaaatgagtaattcattcattttgtttgtttgatatcatttgtttctctctgctgtaggtgttctaaggaatagctgcataagacattttgaaataatgtaatgtgaagtgtttcttaaagctctgaacatcattaagtagttaataataattccaacaaggaattcagagtaatgtaaaagactaaatatcattccttctgaggcaaattgaagattagaatggttgtggtttaaaaagacattaagtgaattctaggtagcttgtttgttattatttttaaaggacgctctaggaaagtaattgctattcactattttgctttcgtattacttttttttttttttttcattatcacagccattgttctaaagctctccacatctcttggctggatcatagcaagaatttactgttggctcttctctctgccgtttaactgtccagctgtgctattttccttttcaaagtataactgatttcaggctaacttattaccactcatcatcatatactagcaggaatggcaatagtagtagtagtagcagcagcaatagtagaagtagtcataataacaataataataaatgatgataaagatgtttctgacaagaattagggtaagaacagtaattgaagccaattatttattacaaatgtattttgctttgggtactgtgataactactttttatactttatcccatttaattataaaaaccactcttgagaagtaatttttattttcagaaccattttacagatttaaaataaacaggtttgaggaattagtttaacttatccaaagtttcgtggctattaagttctagtatttggagtcaaatgcaagtctgtctaaatctagagcccatgttctttaactgcaacactataatgtctcaccccgtcctagtcccaccaattagtcaactcttttagggcagaagtctgtctaattcatctttgcttcctgttactttatatttaattaaaaattttagtgactttttaacttgtaaattgtagctgattttacatttatcttcctgaaggaaactctgtatcattttgtcttttgaatttgtgaatatacttgttaacacatctaaatatc

SEQ ID NO: 14767 - protein, 289 aa, Homo sapiens
MPKNSKVVKRELDDDVTESVKDLLSNEDAADDAFKTSELIVDGQEEKDTDVEEGSEVEDERPAWNSKLQYILAQVGFSVGLGNVWRFPYLCQKNGGGAYLLPYLILLMVIGIPLFFLELSVGQRIRRGSIGVWNYISPKLGGIGFASCVVCYFVALYYNVIIGWSLFYFSQSFQQPLPWDQCPLVKNASHTFVEPECEQSSATTYYWYREALNISSSISESGGLNWKMTICLLAAWVMVCLAMIKGIQSSGKVSMLEPFLILLITISGFIPLSNSVTDFCGQITHNTSF

SEQ ID NO: 14768 - DNA, 2622 bp, Homo sapiens
  CDS (155)..(790)
tgaaaatgacctcgggaagggccctgagccagagtccgtcatcggttactccggagaagatttacccagtgcccctaggcgtttccgagtccggcagcccaacctggagacaatcaacctggaatgggatcatcctgagcatccaaatgggatcatgattggatacactctcaaatatgtggcctttaacgggaccaaagtaggaaagcagatagtggaaaacttctctcccaatcagaccaagttcacggtgcaaagaacggaccccgtgtcacgctaccgctttaccctcagcgccaggacgcaggtgggctctggggaagccgtcacagaggagtcaccagcacccccgaatgaggcttacaccaacaaccaagcagacatcgccacccagggctggttcattgggcttatgtgcgccatcgccctcctggtgctgatcctgctcatcgtctgtttcatcaagaggagtcgcggcggcaagtacccagtacgagaaaagaaggatgttccccttggccctgaagaccccaaggaagaggatggctcatttgactatagtgatgaggacaacaagcccctgcagggcagtcagacatctctggacggcaccatcaagcagcaggagagtgacgacagcctggtggactatggcgagggtggcgagggtcagttcaatgaagacggctccttcatcggccagtacacggtcaaaaaggacaaggaggaaacagagggcaacgaaagctcagaggccacgtcacctgtcaatgctatctactctctggcctaacggagcccacccaggcacagccaccactttgcaagtgggaggaggggagaaggggagacaaaaccactgcagacctaccacgaagccaccaccaccttcagtaacaagggtacgatatgggggtctgccaagctgtgaggaccagtagccaccaagccacccacaagccccctcccaatgaccccccttcagccccgggtgccaccagtgtgggagagctggagccgtggctgagctcagctggagggagcctggccccttgcccggtctcgcagccaccccgagcgttccaccacactgtccgcccttggcctcggcacacgctcaccttttctgttggttacgggacttctcattgtcttaatttcgctttgtgcatcttcccctccagacccaatgtctctgttttcttttccttttgaaaaagagtccctggaaaagaaagaataagtggattctcccccaggagaatcctttttgcaaagataggcaaaaaggattgaatccataccagaacacgtagacaggctgtaatattcaaaccacctctgggccaatgcatttccaaaggatgcctttctcgccatatgcctcccctggcccccagcccctctgcctcggccttgtcagttgctgagctgggcttggctcctttctggaaaatgacagtatttttggcagggggaaggtgcgcaggcctccttgctgctctctggtttggttgggaggtgtgtttacctcttgctcctcattcctcccctgcccttttctctggaatatctaagatgtgagctgcattgactctgaagacgtttgaggaacaggagtgggcactgatagaaaggacttcaacgccagtgactgtgtacctccagcagaagaaaatcaggtgtctggtcttgggggcactgtgctcacctctagagagaagaaaaaggctgggtttggacttcatgcctcctcactggtgaaacccaggatgtagatagagggccacacccaccctgtccagagtagagggcacctgtccacgtggccagggcccatgctgccaccctcgaggagatggaaccctgtgatgcaaaagctttgctggtgtgtttggggcataaggcactgctccccttccatctctagcagatatcatcttctcagccaattctgtaggacactgaggctcttgtttgacatggtgtgtggatggggacttgccccaagactgagcaggtctgccctttcattggggtgtatacatatcaggggaccctgaggtggcaccgtactcagtgttgtgatgcccccacctagggaggactcaatgctctttgtatgccttatgcagcgctgatctgtccctggagttcccaggttcccagctccccccctgcaagccttgaagcctccagcaacgtctatctccaggagagcagggcagcctatgcaagtgttccggcaggaccagaagtggccactcaacacacgtcctcaccagtcaccccaaatggagacactcgcagacctgcagttctcagaccgaaggtgctgccttcatcctccccacctaatgcatttttgaaaccaaaggtacctagcctcagagacagagaaggagagggggagatcttgagtctaagaggaaccctttagctgtttctgcagctgaggtcagtttcaggagggtgaagctgatccccaggaatggatcagctgccatgggcacagcctccgatttgagcctctccggctgccagccagggggcctgggccagaccagggctctgtccttccgtgactttattaaagcaacatttgccacatgtttaagccgc

SEQ ID NO: 14769 - protein, 212 aa, Homo sapiens
MIGYTLKYVAFNGTKVGKQIVENFSPNQTKFTVQRTDPVSRYRFTLSARTQVGSGEAVTEESPAPPNEAYTNNQADIATQGWFIGLMCAIALLVLILLIVCFIKRSRGGKYPVREKKDVPLGPEDPKEEDGSFDYSDEDNKPLQGSQTSLDGTIKQQESDDSLVDYGEGGEGQFNEDGSFIGQYTVKKDKEETEGNESSEATSPVNAIYSLA

SEQ ID NO: 14770 - DNA, 2510 bp, Homo sapiens
  CDS (23)..(1900)
caaaaaggaaattcagaagaaaatggataagaagatgaagaaagctagaaagaaagcaaaattacattctagcaaaggagaggaggaagatcctgaggttaatgttgaaatgagtctgcaagatgaaatccagcgggtgactaatataaaaacttctgccaaaatcaagtcctttgacttgattcattcacctcacggagagttaaaggctgtcttcctgctgcagaacaacctggtggaattgtattcactgaatccatccttgcctactcctcagcctgtcaggacaagcagaatcactattgggggtcatcgcagtgatgtgcggactttgtcattcagctcagacaatattgctgttctttcagctgcagctgattccattaaaatatggaacaggtctacactgcagtgtattcgcacaatgacctgtgaatatgcactttgctcattctttgtacctggtgatagacaggtagtcataggaacaaagacagggaagctgcagctttatgacttggcttcagggaatctgctggagacaatagatgcacatgatggagctttgtggtccatgtccctctctccagatcagcgtggctttgtgacaggtggtgcagataaatctgtcaaattctgggattttgagttagtgaaagatgaaaatagtacccaaaagagactttctgtgaagcaaacccgaactttgcaactagatgaagatgttctgtgtgtcagttactctcccaatcaaaagctattggctgtgtctttgctggactgtactgtgaaaattttctacgttgatactttaaagttttttctgtcactgtatggacacaaactgcctgttatatgcatggacatctctcatgatggagcactcatagcaactggctccgctgataggaatgtgaaaatctggggtttggactttggggactgccacaagtctctctttgcacatgatgacagtgtgatgtacctacagtttgtacccaagtctcacctcttcttcactgccggaaaagatcataagattaaacagtgggatgcagacaaatttgaacacatacagactctggagggtcatcaccaggaaatatggtgtttggctgtaagccccagtggagactatgttgtatcatcgtcccatgacaaatctctgagactttgggagagaacaagggagcctcttattcttgaggaagaaagggagatggaaagagaagcagaatatgaggagagtgtggccaaagaagaccaaccagcagttccaggagagactcaaggtgacagttactttactggaaagaaaactattgaaacagtgaaagcagctgagaggattatggaggctattgagttgtaccgagaagaaactgcaaaaatgaaggaacacaaagccatttgtaaagctgcagggaaagaggttccacttcccagcaaccccatcctaatggcttatggcagtatctcaccttcagcttatgtattagagatttttaaagggatcaagtcgagtgagctggaagaatctctacttgtgctgcctttctcttatgtcccagacattcttaaactctttaacgaattcattcagctgggctctgatgttgaacttatatgccggtgcctcttcttcctccttaggattcactttggacagatcactagcaatcaaatgcttgtgccagtgatagaaaaattaagggaaacaactatttcaaaagtcagccaagtccgggatgttatcggcttcaatatggctggtcttgattatctcaagagggaatgcgaggcaaaaagtgaagttatgttttttgctgatgctactagccacttggaagagaagaagaggaagaggaaaaagagggagaagttgattctaacgttgacttagaactgaaatgtggtatcttttttttttcaactttttcctttaaaggactcctaaactaagcacagaagagttggcgtcatcttaaaaataccaaataacagaagatcgcattgcagatgatatcaggatgtggtttccagctttgcctgagggaattccaacatgagattatgggctggctccatttcttggacttaaaatgcattattagtttaaaaatctttctgtgctctcaaagcttgagccttgcagctcaagcttgttgttccctttatattctagcagggaataaataattgttttaattaggtatttgtttcattggagttgaaattaacatttcaaaagtttttcgtatttttttatggcagatgatttgtcatttatttatattaggttttactgcctattgagacaaccaggtgcataattgattgccctttggccataaaaatgcagtgtcatggatcttagagctaaaaaggactgtaaaaattacccagaacagcgtcctcagacttaaccttctgcaagttatgtctgtatataagaagattctaattgctaactgtttatacttttctgaataaaatagttgtttctaatt

SEQ ID NO: 14771 - protein, 626 aa, Homo sapiens
MDKKMKKARKKAKLHSSKGEEEDPEVNVEMSLQDEIQRVTNIKTSAKIKSFDLIHSPHGELKAVFLLQNNLVELYSLNPSLPTPQPVRTSRITIGGHRSDVRTLSFSSDNIAVLSAAADSIKIWNRSTLQCIRTMTCEYALCSFFVPGDRQVVIGTKTGKLQLYDLASGNLLETIDAHDGALWSMSLSPDQRGFVTGGADKSVKFWDFELVKDENSTQKRLSVKQTRTLQLDEDVLCVSYSPNQKLLAVSLLDCTVKIFYVDTLKFFLSLYGHKLPVICMDISHDGALIATGSADRNVKIWGLDFGDCHKSLFAHDDSVMYLQFVPKSHLFFTAGKDHKIKQWDADKFEHIQTLEGHHQEIWCLAVSPSGDYVVSSSHDKSLRLWERTREPLILEEEREMEREAEYEESVAKEDQPAVPGETQGDSYFTGKKTIETVKAAERIMEAIELYREETAKMKEHKAICKAAGKEVPLPSNPILMAYGSISPSAYVLEIFKGIKSSELEESLLVLPFSYVPDILKLFNEFIQLGSDVELICRCLFFLLRIHFGQITSNQMLVPVIEKLRETTISKVSQVRDVIGFNMAGLDYLKRECEAKSEVMFFADATSHLEEKKRKRKKREKLILTLT

SEQ ID NO: 14772 - DNA, 1682 bp, Homo sapiens
  CDS (70)..(1095)
gtttgctgccggagcggagtctccggccggcgtccagtttgagtctaggttggagttggaaccgtggagatgcggaaggaaaccccaccccccctagtgcccccggcggcccgggagtggaatcttcccccaaatgcgcccgcctgcatggaacggcagttggaggctgcgcggtaccggtccgatggggcgcttctcctcggggcctccagcctgagtgggcgctgctgggccggctccctctggctttttaaggacccctgtgccgcccccaacgaaggcttctgctccgccggagtccaaacggaggctggagtggctgacctcacttgggttggggagagaggtattctagtggcctccgattcaggtgctgttgaattgtgggaactagatgagaatgagacacttattgtcagcaagttctgcaagtatgagcatgatgacattgtgtctacagtcagtgtcttgagctctggcacacaagctgtcagtggtagcaaagacatctgcatcaaggtttgggaccttgctcagcaggtggtactgagttcataccgagctcatgctgctcaggtcacttgtgttgctgcctctcctcacaaggactctgtgtttctttcatgcagcgaggacaatagaattttactctgggatacccgctgtcccaagccagcatcacagattggctgcagtgcgcctggctaccttcctacctcgctggcttggcatcctcagcaaagtgaagtctttgtctttggtgatgagaatgggacagtctcccttgtggacaccaagagtacaagctgtgtcctgagctcagctgtacactcccagtgtgtcactgggctggtgttctccccacacagtgttcccttcctggcctctctcagtgaagactgctcacttgctgtgctggactcaagcctttctgagttgtttagaagccaagcccacagagactttgtgagagatgcgacttggtccccgctcaatcactccctgcttaccacagtgggctgggaccatcaggtcgtccaccacgttgtgcccacagaacctctcccagcccctggacctgcaagtgttactgagtagattggatttaagacaaaaagcaagtcccccatgagtgtccacttctttgccctgccctctcagcttgtgagacaacacaggagccttctatagtatgttgatatgctagatctgtgccgttaataggcatcgtctctcagcctgagggaggctggattctgggttcctgtagtcacagggaggaaaagctttcttaaaaatggacatgtatgtgcgtgtgagtgtgtgtgtagatttatagtttttggtagtggcaggaataaaaaaaatccatcctacatcttccctaagcactgcctctctctcaccccccaaaacaagttgacgaaagggttttatgtagctgtctatgaggaattggccgtgtctgggtgggttatgggatgtgggcatccctgggttcttggaagcagctcttatgctactcatagagatgggattgactttatttttttatagtgcttaattcaccattatgagaaatgcttccagtcacaaaaatgcagcccagctcactctgaggaagaagcaggacttggtacggttttacacaactccttaccattaaactgaatcagaaatcc

SEQ ID NO: 14773 - protein, 342 aa, Homo sapiens
MRKETPPPLVPPAAREWNLPPNAPACMERQLEAARYRSDGALLLGASSLSGRCWAGSLWLFKDPCAAPNEGFCSAGVQTEAGVADLTWVGERGILVASDSGAVELWELDENETLIVSKFCKYEHDDIVSTVSVLSSGTQAVSGSKDICIKVWDLAQQVVLSSYRAHAAQVTCVAASPHKDSVFLSCSEDNRILLWDTRCPKPASQIGCSAPGYLPTSLAWHPQQSEVFVFGDENGTVSLVDTKSTSCVLSSAVHSQCVTGLVFSPHSVPFLASLSEDCSLAVLDSSLSELFRSQAHRDFVRDATWSPLNHSLLTTVGWDHQVVHHVVPTEPLPAPGPASVTE

SEQ ID NO: 14774 - DNA, 1385 bp, Homo sapiens
  CDS (39)..(794)
acttagtatgcttacccgcagagtggaggactagctgtatgcccagttccaaaatgaaggagatgagctcgttatttccagaagactggtaccaatttgttctaaggcagttggaatgttatcattcagaagagaaggcctcaaatgtactggaagaaattgccaaggacaaagttttaaaagacttttatgttcatacagtaatgacttgttattttagtttatttggaatagacaatatggctcctagtcctggtcatatattgagagtttacggtggtgttttgccttggtctgttgctttggactggctcacagaaaagccagaactgtttcaactagcactgaaagcattcaggtatactctgaaactaatgattgataaagcaagtttaggtccaatagaagactttagagaactgattaagtaccttgaagaatatgaacgtgactggtacattggtttggtatctgatgaaaagtggaaggaagcaattttacaagaaaagccatacttgttttctctggggtatgattctaatatgggaatttacactgggagagtgcttagccttcaagaattattgatccaagtgggaaagttaaatcctgaagctgttagaggtcagtgggccaatctttcatgggaattactttatgccacaaacgatgatgaagaacgttatagtatacaagctcatccactacttttaagaaatcttacggtacaagcagcagaacctcccctgggatatccgatttattcttcaaaacctctccacatacatttgtattagagctcattttgactgtaatgtcatcaaatgcaatgtttttattttttcatcctaaaaaagtaactgtgattcttgtaacttgaggacttctccacacccccattcagatgcctgagaacagctaagctccgtaaagttggttctcttagccatcttaatggttctaaaaaacagcaaaaacatctttatgtctaagataaaagaactatttggccaatatttgtgccctctggactttagtaggctttggtaaatgtgagaaaacttttgtagaattatcatataatgaattttgtaatgctttcttaaatgtgttataggtgaattgccatacaaagttaacagctatgtaatttttacatacttaagagataaacatatcagtgttctaagtagtgataatggatcctgttgaaggttaacataatgtgtatatatttgtttgaaatataatttatagtattttcaaatgtgctgatttattttgacatctaatatctgaatgtttttgtatcaagtagtttgttttcatagacttcaattcataaactttaaaaaacttttaataaaatattttccttccttttc

SEQ ID NO: 14775 - protein, 252 aa, Homo sapiens
MPSSKMKEMSSLFPEDWYQFVLRQLECYHSEEKASNVLEEIAKDKVLKDFYVHTVMTCYFSLFGIDNMAPSPGHILRVYGGVLPWSVALDWLTEKPELFQLALKAFRYTLKLMIDKASLGPIEDFRELIKYLEEYERDWYIGLVSDEKWKEAILQEKPYLFSLGYDSNMGIYTGRVLSLQELLIQVGKLNPEAVRGQWANLSWELLYATNDDEERYSIQAHPLLLRNLTVQAAEPPLGYPIYSSKPLHIHLY

SEQ ID NO: 14776 - DNA, 1782 bp, Homo sapiens
  CDS (110)..(1510)
atgttggagcagcggaggcggcgcagaggcgcgtcttgggtccccgcggcggcgccggtgccaagcgctggtttgcggatacccaggcagatctgcagtgcctaatgccatgagtgtggtggttcagcatgtggaggaaaaagctgtgcactcctggtcgcgcatctccacggcagggaagaaggccctggaagaggcactgcttgtctttaacccaatgagccaggatctcagtgccacagaggcccagcttgtggccttcctgcagggcctgcgagatgatggcttccaacctaccatcctgcgcagtggtgatgtctatggctatagttcatgcacagctaatcccccaagccagacgaaactgcaagctcgtgcccctaacccaactgccacatcacctccagccagtgctccccgaactgccatgcggttgcctgcaggtcgggccacactgcttcccatgccgctatctggcagactggccaaagcatccacaccagcccttgccaagcatgctaccaccaacctgctgctgagctctctgaagcaatcaagtgccagccatgcccggggtgcagcagtgggcttccccacccacctttatccaggtgtctaccctgccatgcggctctctgttgtccttgaggccctggttccacttaagactcccatgccctgcttgggtgccaagcacaaggcacagtcactgcagctctcacttgcagactctcctctgaaactgcggaaaagttcagggaagggtccggggaaccctcggcccaaagctcccagaaaaaccacaagcaagggccccaagtgtctgactcgcaaaggccctggggctggaccccgacgaggctctgggcaccagagcaaaaccaacagagccactgggtcccccagtgtccggcgaatgaaagggggctctgccctgggcaccaaaacagcccaggccaaggtagctcgaacactggccaaagctgctcgtgcccaagccaaggtggctcgaacacaggccaaggctgctaaggcccgggccaaggccaaggcagcacaggtcaaggctaaggccaaagctaaggcagcacaggtcaaggccaaggccaaagtcatggcagcatgggccaaggccaaggctaaagccaaggcagtacgggccaaggccaaggtggctcggacccagcccaggggcagaggcaggccaaagggatctgctaaggccagaactacaaggaagggccagaaaaaccgccctgagactgttgggcagaagaggaaaagggctgaggaggcaaaagatcttcctcccaagaagagaacacggcttgggccccgatctcctaaggcatggctagggcctggaacagcaaagctgctgaagttccgtgccataaaggtagataggcggtcctcggatgatgaggtgcggcagcgggctcagcggatcctccgcgtgaacctgtcacctgtaatacggctccagccattgctgccatattcagcagtctgattccttcacacggcaatgtttggggaaactaagcccagctgtctgtgtggctagtggcacagtgtgctatgtccgtggactccacaatcttgaggactccaggtgcctctctagggccctggtgaccaccagcctcctttcagaaaccagagtgggtggggtacggtggggtgggtgggcgggaggggtgttttcatggcgcgatgcactgtgacttgttattcaagttgtatgtctactgttccatctatcacgttttatacctttcc

SEQ ID NO: 14777 - protein, 467 aa, Homo sapiens
MSVVVQHVEEKAVHSWSRISTAGKKALEEALLVFNPMSQDLSATEAQLVAFLQGLRDDGFQPTILRSGDVYGYSSCTANPPSQTKLQARAPNPTATSPPASAPRTAMRLPAGRATLLPMPLSGRLAKASTPALAKHATTNLLLSSLKQSSASHARGAAVGFPTHLYPGVYPAMRLSVVLEALVPLKTPMPCLGAKHKAQSLQLSLADSPLKLRKSSGKGPGNPRPKAPRKTTSKGPKCLTRKGPGAGPRRGSGHQSKTNRATGSPSVRRMKGGSALGTKTAQAKVARTLAKAARAQAKVARTQAKAAKARAKAKAAQVKAKAKAKAAQVKAKAKVMAAWAKAKAKAKAVRAKAKVARTQPRGRGRPKGSAKARTTRKGQKNRPETVGQKRKRAEEAKDLPPKKRTRLGPRSPKAWLGPGTAKLLKFRAIKVDRRSSDDEVRQRAQRILRVNLSPVIRLQPLLPYSAV

SEQ ID NO: 14778 - DNA, 3514 bp, Homo sapiens
  CDS (133)..(2700)
attttgagccgctgccgccattggagtgggccccccccctttccccctccgcctcctgacaggaaaggtttaagggggacagagccctgggaggccgggccgggctcgggggccaccccgggggcccgggccatggatgtgcgccgtctgaaggtgaacgaacttcgcgaggagctgcagcgccgcggcctggacactcgaggcctcaaggccgagcttgctgagcggctgcaggcggcgttggaggccgaggagcctgacgacgagcgggagctcgacgccgacgacgaaccggggcgacccgggcacatcaacgaggaggtcgagaccgaggggggctccgagctggaggggaccgcgcagccaccgccgcccgggctgcagccgcacgcggagcccggcggctactcggggccggacggacattatgccatggacaatattaccaggcagaaccaattctacgatacccaagtcatcaaacaagaaaacgagtcaggctacgagaggagaccactggaaatggagcagcagcaggcctatcgtccagaaatgaagacagagatgaagcaaggagcacccaccagcttcctcccgcctgaagcttctcaactcaagccagacaggcagcaattccagagtcgaaagaggccttatgaagaaaaccggggacgggggtactttgagcaccgagaggataggaggggccgctctcctcagcctcctgctgaagaggatgaagatgactttgatgatacccttgttgctattgacacctataactgcgacctccacttcaaggtggcccgagatcggagtagtggctatccgctcacaattgagggctttgcatacctgtggtcaggagcccgtgccagctatggggtcagaaggggccgtgtatgcttcgagatgaagatcaatgaggaaatctccgtgaagcaccttccgtctacagagcctgacccccacgtggtccgtatcggctggtccctggactcctgcagcacccagctaggcgaagagcctttctcctatggctatggaggcactgggaagaagtccaccaatagccggtttgaaaactacggagacaagtttgcagagaacgatgtgattggctgctttgcggattttgaatgtggaaatgacgtggaactgtcttttaccaagaatggaaagtggatgggcattgctttccgaatccagaaggaagccttggggggtcaggccctctatcctcatgtcctggtgaagaattgcgcagtggagttcaacttcggacagagagcagagccctactgttctgtcctcccggggtttaccttcatccagcaccttccccttagtgagcgtatccggggcaccgttggaccaaagagcaaggcagaatgtgagattctgatgatggtgggcctgcctgctgctggcaagaccacatgggccatcaaacatgcagcctccaacccttccaagaagtacaacatcctgggtaccaatgccatcatggataagatgcgggtgatgggcctacgccggcagcggaactatgctggccgctgggatgtcctgatccagcaggccacccagtgcctcaaccgcctcatccagattgctgcccgcaagaaacgcaactatatcctagatcagacaaatgtttatgggtcagcccagagacgaaaaatgagaccatttgaaggcttccagcgcaaagctattgtaatttgtcccactgacgaggacctaaaagaccgaacaataaagcgaaccgacgaggaagggaaggatgtcccagatcatgcggtcttagaaatgaaagccaacttcacgttgccagatgttggggacttcctggatgaggttctgttcattgagctgcagcgggaggaagcggacaagctagtgaggcagtacaacgaggaaggccgcaaggctgggccaccccctgaaaagcgctttgacaaccgaggtggtggtggcttccggggccgcgggggtggtggtggcttccagcgctatgaaaaccgaggaccccctggaggcaaccgtggcggcttccagaaccgagggggaggcagcggtggaggaggcaactaccgaggaggtttcaaccgcagcggaggtggtggctatagccagaaccgctggggtaacaacaaccgggataacaacaactccaacaacagaggcagctacaaccgggctccccagcaacagccgccaccacagcagcctccgccaccacagccaccaccccagcagccaccgccaccacccagctacagccctgctcggaaccccccaggggccagcacctacaataagaacagcaacatccctggctcaagcgccaataccagcacccccaccgtcagcagctacagccctccacagccgagttacagccagccaccctacaaccagggaggttacagccagggctacacagccccaccgcctccacctccaccaccacctgcctacaactatgggagctacggcggttacaacccggccccctataccccaccgccaccccccaccgcacagacctaccctcagcccagctataaccagtatcagcagtatgcccagcagtggaaccagtactatcagaaccagggccagtggccgccatactacgggaactacgactacgggagctactccgggaacacacagggtggcacaagtacacagtagccagtgtgacccagaggctcccggaggcccctgccggcttcctccaccagcgcctgcctcggcccctcctctgcccccgccagatcccgtggtgctggggatggggtcatcccagggctgcctccctccagcccactgcctcccctctgaggggcttccttcccctccatagggccaggcatttttttctggattcaaacaggcaacaatgaccttttattttctgtttgtccccacctccccagccttccacctcctgctcttcctaccttcttcctttttgactaaataatccccacctcccttgatcatacagtgaggctacagtgactgaggggagaatcccctcctgttcactctcccaaccctgctccagcccctcagcttcccagaccctcatgcagttggttgtaaattctcccaggagctgttttactgtctacttttcaggattaaaaaaaaaatcaaaacttaaaaaaaaaaaagtttaaaaagcaaaatggggagggggaggaagcagtgacttttttttggtaattatgcgcttttttttaatttttagaatttgtctttttactgtgggtgggctgttgatatttcatcaagataagcatttctttcctgagttcaggtgactgaggaagagccacaaaacaaaacacaacaaaaccaaaccacagaatcatctttaacccaactttttatacgatgccccagttccccataactttgcacacaagcttctgtgttcagttgaattgtaactgctttttgtatttggagagagtgactattgaacttgaaacctttt

SEQ ID NO: 14779 - protein, 856 aa, Homo sapiens
MDVRRLKVNELREELQRRGLDTRGLKAELAERLQAALEAEEPDDERELDADDEPGRPGHINEEVETEGGSELEGTAQPPPPGLQPHAEPGGYSGPDGHYAMDNITRQNQFYDTQVIKQENESGYERRPLEMEQQQAYRPEMKTEMKQGAPTSFLPPEASQLKPDRQQFQSRKRPYEENRGRGYFEHREDRRGRSPQPPAEEDEDDFDDTLVAIDTYNCDLHFKVARDRSSGYPLTIEGFAYLWSGARASYGVRRGRVCFEMKINEEISVKHLPSTEPDPHVVRIGWSLDSCSTQLGEEPFSYGYGGTGKKSTNSRFENYGDKFAENDVIGCFADFECGNDVELSFTKNGKWMGIAFRIQKEALGGQALYPHVLVKNCAVEFNFGQRAEPYCSVLPGFTFIQHLPLSERIRGTVGPKSKAECEILMMVGLPAAGKTTWAIKHAASNPSKKYNILGTNAIMDKMRVMGLRRQRNYAGRWDVLIQQATQCLNRLIQIAARKKRNYILDQTNVYGSAQRRKMRPFEGFQRKAIVICPTDEDLKDRTIKRTDEEGKDVPDHAVLEMKANFTLPDVGDFLDEVLFIELQREEADKLVRQYNEEGRKAGPPPEKRFDNRGGGGFRGRGGGGGFQRYENRGPPGGNRGGFQNRGGGSGGGGNYRGGFNRSGGGGYSQNRWGNNNRDNNNSNNRGSYNRAPQQQPPPQQPPPPQPPPQQPPPPPSYSPARNPPGASTYNKNSNIPGSSANTSTPTVSSYSPPQPSYSQPPYNQGGYSQGYTAPPPPPPPPPAYNYGSYGGYNPAPYTPPPPPTAQTYPQPSYNQYQQYAQQWNQYYQNQGQWPPYYGNYDYGSYSGNTQGGTSTQ

SEQ ID NO: 14780 - DNA, 2392 bp, Homo sapiens
  CDS (274)..(2040)
gaggaagcggtggctgctgcggatgtcggtgtgagcgagcggcgcctgaacacacggcggctgccgagcgcctgacccgggcctgcgccagagcctgcaccgagctccggggccccacacccgctacggtggccctgcgcccgttgctactgaggcggcgtgctctgcattcttcgctgtccaggcctgccggctctggtgtctgctggctcctccttgctcgcctgctccctcctgcttgcctgagtcatcgccgccgccgccgccacagccatggccgagagtggtgaaagcggcggtcctccgggctcccaggatagcgccgccggagccgaaggtgctggcgcccccgcggccgctgcctccgcggagcccaaaatcatgaaagtcaccgtgaagaccccgaaggaaaaggaggaattcgccgtgcccgagaatagctccgtccagcagtttaaggaagaaatctctaaacgttttaaatcacatactgaccaacttgtgttgatatttgctggaaaaattttgaaagatcaagataccttgagtcagcatggaattcatgatggacttactgttcaccttgtcattaaaacacaaaacaggcctcaggatcattcagctcagcaaacaaatacagctggaagcaatgttactacatcatcaactcctaatagtaactctacatctggttctgctactagcaacccttttggtttaggtggccttgggggacttgcaggtctgagtagcttgggtttgaatactaccaacttctctgaactacagagtcagatgcagcgacaacttttgtctaaccctgaaatgatggtccagatcatggaaaatccccttgttcagagcatgctctcaaatcctgacctgatgagacagttaattatggccaatccacaaatgcagcagttgatacagagaaatccagaaattagtcatatgttgaataatccagatataatgagacaaacgttggaacttgccaggaatccagcaatgatgcaggagatgatgaggaaccaggaccgagctttgagcaacctagaaagcatcccagggggatataatgctttaaggcgcatgtacacagatattcaggaaccaatgctgagtgctgcacaagagcagtttggtggtaatccatttgcttccttggtgagcaatacatcctctggtgaaggtagtcaaccttcccgtacagaaaatagagatccactacccaatccatgggctccacagacttcccagagttcatcagcttccagcggcactgccagcactgtgggtggcactactggtagtactgccagtggcacttctgggcagagtactactgcgccaaatttggtgcctggagtaggagctagtatgttcaacacaccaggaatgcagagcttgttgcaacaaataactgaaaacccacaacttatgcaaaacatgttgtctgccccctacatgagaagcatgatgcagtcactaagccagaatcctgaccttgctgcacagatgatgctgaataatcccctatttgctggaaatcctcagcttcaagaacaaatgagacaacagctcccaactttcctccaacaaatgcagaatcctgatacactatcagcaatgtcaaaccctagagcaatgcaggccttgttacagattcagcagggtttacagacattagcaacggaagccccgggcctcatcccagggtttactcctggcttgggggcattaggaagcactggaggctcttcgggaactaatggatctaacgccacacctagtgaaaacacaagtcccacagcaggaaccactgaacctggccatcagcagtttattcagcagatgctgcaggctcttgctggagtaaatcctcagctacagaatccagaagtcagatttcagcaacaactggaacaactcagtgcaatgggatttttgaaccgtgaagcaaacttgcaagctctaatagcaacaggaggtgatatcaatgcagctattgaaaggttactgggctcccagccatcatagcagcatttctgtatcttgaaaaaatgtaatttatttttgataacggctcttaaactttaaaatacctgctttatttcattttgactcttggaattctgtgctgttataaacaaacccaatatgatgcattttaaggtggagtacagtaagatgtgtgggtttttctgttttttcttttctggaacagtgggaattaaggctactgcatgcatcacttctgcatttattgtaattttttaaaaacatcaccttttatagttgggtgaccagattttgtcctgcatctgtccagtttatttgctttttaaacattagcctatggtagtaatttatgtagaataaaagcatt

SEQ ID NO: 14781 - protein, 589 aa, Homo sapiens [sequence omitted]

SEQ ID NO: 14782 - DNA, 2901 bp, Homo sapiens
  CDS (91)..(1974)
gcatttgcggccggcgccagggtggagagttgtgcgccggtccctgggcctgagctccggctccggctggggcgcctgcgatgtctcaagatggcggagctgggcgaattaaagcacatggtgatgagtttccgggtgtctgagctccaggtgcttcttggctttgctggccggaacaagagtggacggaagcacgagctcctggccaaggctctgcacctcctgaagtccagctgtgcccctagtgtccagatgaagatcaaagagctttaccgacgacgctttccccggaagaccctggggccctctgatctctcccttctctctttgccccctggcacctctcctgtaggctcccctggtcctctagctcccattcccccaacgctgttggcccctggcaccctgctgggccccaagcgtgaggtggacatgcacccccctctgccccagcctgtgcaccctgatgtcaccatgaaaccattgcccttctatgaagtctatggggagctcatccggcccaccacccttgcatccacttctagccagcggtttgaggaagcgcactttacctttgccctcacaccccagcaagtgcagcagattcttacatccagagaggttctgccaggagccaaatgtgattataccatacaggtgcagctaaggttctgtctctgtgagaccagctgcccccaggaagattattttccccccaacctctttgtcaaggtcaatgggaaactgtgccccctgccgggttaccttcccccaaccaagaatggggccgagcccaagaggcccagccgccccatcaacatcacacccccggctcgactctcagccactgttcccaacaccattgtggtcaattggtcatctgagttcggacggaattactccttgtctgtgtacctggtgaggcagttgactgcaggaacccttctacaaaaactcagagcaaagggtatccggaacccagaccactcgcgggcactgatcaaggagaaattgactgctgaccctgacagtgaggtggccactacaagtctccgggtgtcactcatgtgcccgctagggaagatgcgcctgactgtcccttgtcgtgccctcacctgcgcccacctgcagagcttcgatgctgccctttatctacagatgaatgagaagaagcctacatggacatgtcctgtgtgtgacaagaaggctccctatgaatctcttatcattgatggtttatttatggagattcttagttcctgttcagattgtgatgagatccaattcatggaagatggatcctggtgcccaatgaaacccaagaaggaggcatctgaggtttgccccccgccagggtatgggctggatggcctccagtacagcccagtccaggggggagatccatcagagaataagaagaaggtcgaagttattgacttgacaatagaaagctcatcagatgaggaggatctgccccctaccaagaagcactgttctgtcacctcagctgccatcccggccctacctggaagcaaaggagtcctgacatctggccaccagccatcctcggtgctaaggagccctgctatgggcacgttgggtggggatttcctgtccagtctcccactacatgagtacccacctgccttcccactgggagccgacatccaaggtttagatttattttcatttcttcagacagagagtcagcactatggcccctctgtcatcacctcactagatgaacaggatgcccttggccacttcttccagtaccgagggaccccttctcactttctgggcccactggcccccacgctggggagctcccactgcagcgccactccggcgccccctcctggccgtgtcagcagcattgtggcccctgggggggccttgagggaggggcatggaggacccctgccctcaggtccctctttgactggctgtcggtcagacatcatttccctggactgagttccctggattatggaaacttcgctgtcccccaacactgagcaagtatgctgtggagtcccaaccccagctactctgatccctctgggggctctggccaagggccagacagaccttcacagatgcctacttttggcctcatctctgcctgacaaggccagcacccaaagggttaatatttaacctctttttaaggacactggggtctgtttctggaaatgttctttagatggtggcacattcctttgggtatgttaacctaggcagtgggaggcaaatgggatggtatgtgagctaggagaagggctgaaccctcagccttgactatgtctagagcctcttggggaaggggcacctctcttgaaccccaaatgctctctcttcttattacccaaacccatggctctatttcttcttcacatccattgtctcttcatgtctattccattcccttcggccaaacagacaggtggaaaaactgagacaggcagtttcagagatggacagagaactttattttggattgtggatgtggacttttttgtacataaataagaaaaaccaaaatactccaaagatgacttcccctgcctcctactccagtatgacagaggaggatgtaaggccttagccatgatctgcaggggtctgggagtcaggcccggcctattgcttgggtctctctctatttatatatctaagttcacagtgtttcttattcccccctaagcttctagaggctcatggccctgtagttaggcctggctcattctgcacctttccagggaggtggaaggaccctgtgccctccttcccaatcttctttttcaggctcgccaaggcctaggacctatgttgtaattttactttttatttctaaagttgtagtgaagctctcacccataataaaggttgtgaatgttc

SEQ ID NO: 14783 - protein, 628 aa, Homo sapiens [sequence omitted]

SEQ ID NO: 14784 - DNA, 2364 bp, Homo sapiens
  CDS (178)..(1047)
aaaaaaaaaactaaaagattgtatatcaacaaagccaatatctggaatagtgccttagatgcattcagaaatcgaaactttaatccttcatatgcaattgaagtagcatatgttattgaaaatgataattttggaagtgagcatcctggatcaaagcaagaatttctgagtctcttaatgcaacatcttgagaactcatcattgtttgaagggtccttgtcaaagaacttgtctctaaattctcaagctctgaaagagaatctttactatgaagctggcaaaatgcttgccatttctttagttcacggtggtccttcacctggtttcttttctaaaaccttgtttaactgccttgtttatggaccagaaaatacccagccaattttagatgatgtttcagactttgatgtggcacagattataatcaggataaatactgcaacaactgtagctgacttaaagtcaataataaatgaatgctataactaccttgagttaattggatgtctcagacttataacgacattaagtgataaatatatgttagtaaaagacatacttggctaccatgtaattcagagagtccacacaccctttgaaagttttaagcagggtctgaaaacccttggtgttttggagaaaattcaggcttatccagaagcattttgtagcatcctgtgtcataaacctgagagtctttctgcaaaaatccttagtgagctttttacagtacacacattacctgatgtgaaagctttggggttttggaacagttacttacaggctgttgaagatggtaaatctacagcaacaatggaagacattctcatttttgcaactggttgcagttccattcctccagctggatttaaacccactccttcaattgagtgtctgcatgtggattttcctgttggaaacaagtgtaataactgtttagcaattcccatcaccaatacatataaagagtttcaagaaaatatggacttcaccataagaaacactctaagactagaaaaggaagaaagttctcattacattggacattaaaatgtttccttgaacaaagagaagcttctttaaaagctgctattgataactctcttttatttcactaaccttttcatcatcactttgaacaaactagttagcttcttgacctaataaaatttatgatatgaatataaaggaatattatagccacttaggctaaaaaaaggtttttttgttaaagcatactagtcaaaattggtgataatttctcattttcttgatatagatacttcataaacctcaatataaatactctcaaaatggttgtatggattttatttaggtatggtagcatggttaataaaagtaaaaactgttttactcacattttttgtaaattaggattacatatagaatgccacaatttctctaggtttattcaattttcaaattattcctcattttattttaaagcattaaatagaaaagctaattggttaaattttgttatataaatcagagtcatatattctgggatttgtgttactatgcatacttttctaggatgtcaccaaattagttgtttaaaatgtttttagattactgatttatattaagatgacccacactgcaattagattatgcctagtgggaagtattatataaaaagcagaattaagctgggcacatgtgcttgtaatctcagttataagggaggctgaggtgggagaatcgagatactcagccagcctggcaatgtagcaaagactccatctcaaaaaaaaaaaacagaattgcacaaattttctggaatctatggacattccatgagcttaaacacttttgaggtggataacatttagttgaaaatacctaagaaagtgtgtcttctttaaagccttggctttaatcatgggaaattgttgttgttgttgttgttgtttgtatcctatgtttggtattctgtatgtctgatccataatcattttagatatttgaatgatctctgtggattggtaggtttggccatttgaccattatttattatcaagttggttgtatgctaaggtaagttgacgccatagcattatacagttatcttcattgctcttgaatgatatctgttatataagcaatgtataaataaagtaaaaaggatagaatgaaaaacccattctaatgtcaccactcagagataagtaccgtatttctgtgtatccttctataaactctttacttctgtttcctttattttttaactttaataatgctactaaaagacaatacctaaaagtaactgtactaacaaagtgctaacaatgtgaaaatatatagtcccatagtcatgtccccatatttatactcccacag

SEQ ID NO: 14785 - protein, 290 aa, Homo sapiens [sequence omitted]

SEQ ID NO: 14786 - DNA, 2485 bp, Homo sapiens
  CDS (158)..(1075)
ggcaaatgggcttgggcggctcctcggcgggtggcggtggtggccgtagcggttcctcctggccctgttaatgtcggggccaggccgggggaggatggcgccctagaacccggccttgctggggtaggggcgggaggggacggggtggggaccggccatgtcggaggtgacccggagtctgctgcagcgctggggcgccagttttaggagaggcgccgacttcgactcttggggccagctggtggaggcgatagacgagtatcagatattagcaagacatctacaaaaggaggcccaagctcaacacaataattctgaattcacagaagaacaaaagaaaaccataggcaaaattgcaacatgcttggaattgcgaagtgcagctttacagtccacacagtctcaagaagaatttaaactggaggacctgaagaagctagaaccaatcctaaagaatattcttacatataataaagaattcccatttgatgttcagcctgtcccattaagaagaattttggcacctggtgaagaagagaatttgggatttgaagaagatgaagaagagggtggtgctggagcagggtctcctgattcttttcctgctagagttcccggtactttattaccaaggttgccatcggaaccaggaatgacattactcactatcagaattgagaaaattggtttgaaagatgctgggcagtgcatcgatccctatattacagttagtgtaaaggatctgaatggcatagacttaactcctgtgcaagatactcctgtggcttcaagaaaagaagatacatatgttcattttaatgtggacattgagctccagaagcatgttgaaaaattaaccaaaggtgcagctatcttctttgaattcaaacactacaagcctaaaaaaaggtttaccagcaccaagtgttttgctttcatggagatggatgaaattaaacctgggccaattgtaatagaactatacaagaaacccactgactttaaaagaaagaaattgcaattattgaccaagaaaccactttatcttcatctacatcaaactttgcacaaggaatgatcctgacatgatgaacctggaacttctgtgaattttaccactcagtagaaaccatcatagctctgtgtagcatattcacccttcaacaggcaggaagcaagccgtacccagaccagtaggccggacggagtccaatgcaaagctgtaccacagaattcagagtccagcacatcacactgacgtataggactccttgggatacaggtttattgtagattttgaaacatgtttttacttttctattaattgtgcaattaatagtctattttctaatttaccactactcctaccctgcttcctggaacaatactgttgtgggtaggatgtgctcatcttcagacttaatacagcaataagaatgtgctagagtttacacatctgttcacttttgctccaatatgctcttttgacttaacgtcaagctttgggttgatgtgggtagggtagtgtcaaactgctttgagaggaatgggaccagttctgctgcctaagaaggtctgtctggatgtttataggcagcacctctgaagtggcctaaattcaccctgatctgatagttttcctgcttagaaagtgtgccttggccagatcagtatcccacatgggagtgttccctaggttgtagctgtgattgtttccagatgaccagattgtttttctgaaaatgagcatatttttagtcatgtcgattagctgttcttctacatcacattgttactctttctgatgatgattctagggttaacattggaaccatctcaaaataattacaaagttttagatgggtttacaatgtcttctaaacaatgtaatctaaaaataattgagtcagatgctaacgagatactgcaggcataactgctgtttttctgacaactgattgtgaaaccttaaaacctgcatacctcttcttacagtgaggagtatgcaaaatctggaaagatattctattttttttatataggtagataggatcgccatttatttcctatttagatatactgacattcatccatatgaaaatatgcaggtcattagcttactataatttacttttgacttaatggggcataaataaaactttcatagtacacatgaggtggatatttgatacacagaacatttgcggtgggctttctgtgggttagatgtaaagcccacatattttaatattcactattttaaatgagcaatgcatgaggggaatgcagtgtcagtacctggcctatttttaaactagtgtaatcaccctagtcataccattcagtatgtttgctttttaaaataagtaaccacaattaagttgttgtagcccttgcacttcaagagatctagtctttactttcagttgtctgttaggtccattctgtttactagacggatgttaataaaaactatgcgagcctg

SEQ ID NO: 14787 - protein, 306 aa, Homo sapiens
MSEVTRSLLQRWGASFRRGADFDSWGQLVEAIDEYQILARHLQKEAQAQHNNSEFTEEQKKTIGKIATCLELRSAALQSTQSQEEFKLEDLKKLEPILKNILTYNKEFPFDVQPVPLRRILAPGEEENLGFEEDEEEGGAGAGSPDSFPARVPGTLLPRLPSEPGMTLLTIRIEKIGLKDAGQCIDPYITVSVKDLNGIDLTPVQDTPVASRKEDTYVHFNVDIELQKHVEKLTKGAAIFFEFKHYKPKKRFTSTKCFAFMEMDEIKPGPIVIELYKKPTDFKRKKLQLLTKKPLYLHLHQTLHKE

SEQ ID NO: 14788 - DNA, 3338 bp, Homo sapiens
  CDS (260)..(3337)
ccagtctgggcaccggagcctgtgaccgcttcgttagtggagaggtagctggcagtccgcttcggcgggcctgtgccccgcgccgttctcggggcctccctgctgagctcgcggctcacgctgagagggacacgcagtgacgagcggccgaagcagctttgcggtgagagcacgctgggccgggggccgggcgggagcctggtggcgggtaacgccggactcgagggttttgtagtgcatccctgagcatgagcacagaatgaagcggcgtttggatgaccaggagtcaccggtgtatgcagcccagcagcgtcggatccctggcagcacagaggcttttcctcaccagcaccgggtgcttgcccctgcccctcctgtgtatgaagcagtgtctgagaccatgcagtcagctacgggaattcagtactctgtaacacccagctaccaggtttcagccatgccacagagctccggcagtcatgggcccgctatagcagcagttcatagcagccatcatcacccaacagcggtgcagccccacggaggccaggtggtccagagtcatgctcatccagccccaccagttgcaccagtgcagggacagcagcaatttcagaggctgaaggtggaggatgcgctatcttatcttgaccaggtgaagctgcagtttggtagtcagcctcaggtctacaatgatttccttgacatcatgaaggaatttaaatctcagagcatcgacaccccaggagtgattagtcgtgtgtcccagctattcaaaggccaccccgatctgataatgggattcaacaccttcttgccccctggctacaaaattgaggtgcaaaccaatgacatggtgaatgtgacaactcctggccaggttcatcagattcccacccatggcatccagccacagcctcaaccaccaccccaacatccttcccagccttcagcccagtcagccccagctcctgcccagccagctcctcagcccccacctgccaaagtcagcaagccctcccaactgcaagcacatactccggccagtcagcagactcccccacttccaccgtatgcatccccacgttctccgccggtccagcctcacacaccagtgacaatctcgttgggaacggccccatccttgcagaacaatcaacctgtggagtttaatcatgccatcaactatgttaataagatcaagaacagatttcagggccaaccagacatctacaaagcattcctggagattttgcacacatatcagaaagagcagagaaatgccaaggaagctggaggaaactacactccagcattgacagagcaggaggtgtatgcccaggttgctcgtctctttaaaaaccaggaagatttgttgtcagagtttggacaattcctaccagatgccaacagctccgtgcttttaagcaaaacaactgctgagaaggttgattctgtgagaaatgatcatggaggcactgtcaagaagccccaactgaacaacaagccgcagaggcccagccagaatggctgccagatccgcagacatcctacaggaaccacccctccagttaagaagaaacccaaactgctcaatctgaaggattcttctatggcagatgccagcaaacatggtggtggaacagaatcgttattttttgataaggtccgaaaggctcttcggagtgcagaagcctacgaaaatttcctacgctgtcttgttatttttaaccaggaggtgatctctcgtgctgagcttgtgcaactagtctctcctttcctggggaaattccctgagttgtttaattggtttaaaaactttctgggctataaggagtctgtacatctggaaacttatccaaaggagcgagccacagagggcattgctatggagatagattatgcttcttgtaaacgattgggctccagctatcgagccttaccaaagagttaccagcagcccaagtgtacaggacggactcctctctgtaaagaggttttaaatgatacctgggtttccttcccttcgtggtctgaggactctacctttgtgagttccaagaagactcaatatgaagaacatatttatcgttgtgaagatgaacgctttgagcttgatgtagttttagagaccaatctggcaacaatccgggttctggaagcaatacagaagaagctttcccgcttgtctgctgaagaacaagccaaatttcgcttggacaacacccttgggggcacatcagaagtcatccatagaaaagcactccagaggatatatgctgataaagcagctgacatcattgatggtctgagaaagaatccctccattgctgttccaattgtccttaaaaggttgaagatgaaagaggaagaatggcgagaagctcagagaggctttaacaaagtatggcgagaacaaaatgagaaatactacttgaagtctctggaccaccaggggatcaactttaaacagaatgacaccaaggtcctgaggtctaagagcttactcaatgagattgagagtatctatgatgagaggcaagagcaggctacggaggagaatgctggtgtacctgttggcccacacctctcacttgcgtatgaagacaaacaaatactggaagatgctgctgctctgattatccaccatgtgaagaggcagacaggcattcagaaggaggacaaatataagataaaacaaatcatgcatcattttattccagatttgctctttgcccaaagaggtgatctctcagatgtggaggaagaggaagaagaagagatggatgtagatgaagccacaggggcagttaagaagcacaatggtgttgggggcagtccccctaagtccaagttactgtttagtaacacagcagctcaaaaattaagaggaatggatgaagtatacaacctcttctatgtcaacaacaactggtatatttttatgcgactgcaccagattctctgcctgaggctgctacggatttgttcccaagccgaacggcaaattgaagaagaaaaccgagagagagaatgggaacgggaagtgctgggcataaagcgagacaagagtgacagccctgccattcagctacgtctcaaagaacctatggatgttgatgtagaagattattacccagctttcctggacatggtgcggagcctgctggatggcaacatagactcatcacagtatgaagattcactgagagagatgttcaccattcatgcctacattgcctttaccatggacaaactgatccagagcattgtcagacagctgcagcatatcgtgagtgatgagatctgtgtgcaggtgactgacctttacctggcag

SEQ ID NO: 14789 - protein, 1026 aa, Homo sapiens
MKRRLDDQESPVYAAQQRRIPGSTEAFPHQHRVLAPAPPVYEAVSETMQSATGIQYSVTPSYQVSAMPQSSGSHGPAIAAVHSSHHHPTAVQPHGGQVVQSHAHPAPPVAPVQGQQQFQRLKVEDALSYLDQVKLQFGSQPQVYNDFLDIMKEFKSQSIDTPGVISRVSQLFKGHPDLIMGFNTFLPPGYKIEVQTNDMVNVTTPGQVHQIPTHGIQPQPQPPPQHPSQPSAQSAPAPAQPAPQPPPAKVSKPSQLQAHTPASQQTPPLPPYASPRSPPVQPHTPVTISLGTAPSLQNNQPVEFNHAINYVNKIKNRFQGQPDIYKAFLEILHTYQKEQRNAKEAGGNYTPALTEQEVYAQVARLFKNQEDLLSEFGQFLPDANSSVLLSKTTAEKVDSVRNDHGGTVKKPQLNNKPQRPSQNGCQIRRHPTGTTPPVKKKPKLLNLKDSSMADASKHGGGTESLFFDKVRKALRSAEAYENFLRCLVIFNQEVISRAELVQLVSPFLGKFPELFNWFKNFLGYKESVHLETYPKERATEGIAMEIDYASCKRLGSSYRALPKSYQQPKCTGRTPLCKEVLNDTWVSFPSWSEDSTFVSSKKTQYEEHIYRCEDERFELDVVLETNLATIRVLEAIQKKLSRLSAEEQAKFRLDNTLGGTSEVIHRKALQRIYADKAADIIDGLRKNPSIAVPIVLKRLKMKEEEWREAQRGFNKVWREQNEKYYLKSLDHQGINFKQNDTKVLRSKSLLNEIESIYDERQEQATEENAGVPVGPHLSLAYEDKQILEDAAALIIHHVKRQTGIQKEDKYKIKQIMHHFIPDLLFAQRGDLSDVEEEEEEEMDVDEATGAVKKHNGVGGSPPKSKLLFSNTAAQKLRGMDEVYNLFYVNNNWYIFMRLHQILCLRLLRICSQAERQIEEENREREWEREVLGIKRDKSDSPAIQLRLKEPMDVDVEDYYPAFLDMVRSLLDGNIDSSQYEDSLREMFTIHAYIAFTMDKLIQSIVRQLQHIVSDEICVQVTDLYLA

SEQ ID NO: 14790 - DNA, 2950 bp, Homo sapiens
  CDS (261)..(2717)
ggtgcttctaggaagtagaacgccggctcgcatgcctgcccgcccgccagcctgccgggtacggccttttccgccggggcttccaggtcaaagaattcgcctttgccgctaccgctttcttaccctccgcacccgttaagttctccggtcgggcggcagtctctgaacacttagccgcgccatccggggtcacaccgcctggaaggaggtgacgggggcggcgcggggcgcggacactccccgctgagagtccgcctgccatggactcggaatattacagcggcgaccagtcagatgatggtggtgctaccccagtacaggatgaacgggattcagggtcagacggtgaggatgatgtaaatgagcaacactccggatcagacactggaagtgtagaacgtcattcagagaatgaaactagtgatcgagaagatggcctccccaaaggacatcatgtgacagactctgagaacgatgagcccttaaatcttaatgctagtgactctgaaagtgaggagcttcacaggcaaaaggacagcgactctgaatctgaggaacgtgcagagcctcctgcaagcgattctgaaaatgaggatgtcaatcagcatgggagcgactctgagagtgaagagaccaggaaattacctggtagtgactctgaaaatgaggaacttcttaatgggcatgcaagtgactcagaaaacgaagatgttgggaagcatcccgccagtgattctgagattgaggagctccagaagagtcctgctagtgactctgaaacagaagatgctctaaaacctcaaatcagtgactctgagagtgaggaacccccaaggcaccaagccagtgactccgaaaatgaggagcctcccaaacctcgaatgagtgattctgaaagtgaggagcttcctaaacctcaggtcagtgattcagaaagtgaggaacccccaaggcaccaggccagtgactctgaaaatgaggagcttcccagacctcgtatcagtgactcagaaagtgaggaccctccgaggcaccaggccagtgactcagaaaatgaagagcttcccaaaccccgaatcagtgattcggaaagtgaggatcccccaaggaaccaggccagtgattcggaaaatgaggagctacccaaaccccgagtcagtgactctgagagtgaggggcctcagaaggggcctgccagtgactcagaaactgaggatgcgtccagacacaaacagaagccagagtcagatgatgacagcgacagggagaataagggagaggatacagaaatgcagaatgactccttccattcagacagccatatggacagaaaaaagtttcacagttctgatagtgaggaggaagaacacaaaaagcaaaaaatggacagtgatgaagatgaaaaagagggtgaggaggagaaagtagcgaagagaaaagctgctgtgctttctgatagtgaagatgaagagaaagcatcagcaaagaagagtcgtgttgtctctgatgcagatgactctgacagtgatgctgtatcagacaagtcaggcaaaagagagaagaccatagcatctgacagtgaggaagaagctgggaaagaattgtctgataagaaaaatgaagagaaggatctgtttgggagtgacagtgagtcaggcaatgaagaagaaaatcttattgcagacatatttggagaatctggtgatgaagaggaagaagaatttacaggttttaaccaagaagatctggaagaagaaaaaggtgaaacacaggtaaaagaagcagaagattcagattctgatgataacataaagagaggaaaacatatggactttctgtcagattttgagatgatgttgcagcgaaaaaagagcatgagtggcaagcgcagacggaaccgcgatggtggcacctttattagtgatgcagacgacgacgtgagtgccatgatcgtcaagatgaatgaagctgctgaggaagacagacagttgaacaatcaaaaaaagccagcactgaaaaaattaactttactgcctgctgtagttatgcaccttaagaagcaggaccttaaagaaacattcattgacagtggtgtgatgtctgccatcaaagaatggctctcacctctaccagataggagtttgcctgcactcaagatccgggaggagctgctgaagatcctgcaagagctgcctagtgtgagccaggagaccctgaagcatagtgggattggacgagcagtgatgtatctctataaacaccccaaggagtcaaggtctaacaaggacatggcagggaaattaatcaatgagtggtctaggcctatatttggtcttacctcaaactacaaaggaatgacaagagaagaaagggagcagagagatctagaacagatgcctcaacgacgaagaatgaacagcactggtggtcagacacccagaagagacctggaaaaggtgctgacaggagaggagaaggctcttagacctggagatcctggattctgtgcccgtgcaagggtcccaatgccttcaaacaaggactatgttgtcaggcccaaatggaatgtggaaatggagtcatccaggtttcaggcgacctccaagaagggtatcggtcgactggataaacagatgagaaagttcacagatataaggaaaaaaagcagatctgcacacgcagtgaaaatcagcattgagggcaacaaaatgccattgtgaccttgcctggaatgtgtccccatctctactctaagaaatgcgcaatggactctttggagaaagaagatattttaaaacatttttagtgtgtctgtaaatggttcagcgtgtatcagatgttgtcataggactcacatttctctcagttatatttaaaaccgttgtgtactttgtacaaaggaatactagtcatacttctataaactttacacaataaaatttcattctgg

SEQ ID NO: 14791 - protein, 819 aa, Homo sapiens
MDSEYYSGDQSDDGGATPVQDERDSGSDGEDDVNEQHSGSDTGSVERHSENETSDREDGLPKGHHVTDSENDEPLNLNASDSESEELHRQKDSDSESEERAEPPASDSENEDVNQHGSDSESEETRKLPGSDSENEELLNGHASDSENEDVGKHPASDSEIEELQKSPASDSETEDALKPQISDSESEEPPRHQASDSENEEPPKPRMSDSESEELPKPQVSDSESEEPPRHQASDSENEELPRPRISDSESEDPPRHQASDSENEELPKPRISDSESEDPPRNQASDSENEELPKPRVSDSESEGPQKGPASDSETEDASRHKQKPESDDDSDRENKGEDTEMQNDSFHSDSHMDRKKFHSSDSEEEEHKKQKMDSDEDEKEGEEEKVAKRKAAVLSDSEDEEKASAKKSRVVSDADDSDSDAVSDKSGKREKTIASDSEEEAGKELSDKKNEEKDLFGSDSESGNEEENLIADIFGESGDEEEEEFTGFNQEDLEEEKGETQVKEAEDSDSDDNIKRGKHMDFLSDFEMMLQRKKSMSGKRRRNRDGGTFISDADDDVSAMIVKMNEAAEEDRQLNNQKKPALKKLTLLPAVVMHLKKQDLKETFIDSGVMSAIKEWLSPLPDRSLPALKIREELLKILQELPSVSQETLKHSGIGRAVMYLYKHPKESRSNKDMAGKLINEWSRPIFGLTSNYKGMTREEREQRDLEQMPQRRRMNSTGGQTPRRDLEKVLTGEEKALRPGDPGFCARARVPMPSNKDYVVRPKWNVEMESSRFQATSKKGIGRLDKQMRKFTDIRKKSRSAHAVKISIEGNKMPL

SEQ ID NO: 14792 - DNA, 2282 bp, Homo sapiens
  CDS (279)..(893)
gcggtgccgggggcggggcgcggcggctgtcagctgactgtggcggcggcggcctcgaggtgacaactgtctccgtcgcaggctccggcgggggcgcaggaggtcgcccggcgcgtcactgtcgggtcggcgagccacgggggccgccgcagcaccatggcgaccaccgtcagctggacgcccaggcggcccagcagctgcagtacggaggcgcagtgggcaccgtgggccgactgaacatcacggtggtacaggcaaagttggccaagaattacggcatgacccgcatggacccctactgccgactgcgcctgggctacgcggtgtacgagacgcccacggcacacaatggcgccaagaatccccgctggaataaggtcatccactgcacggtgcccccaggcgtggactctttctatctcgagatcttcgatgagagagccttctccatggacgaccgcattgcctggacccacatcaccatcccggagtccctgaggcagggcaaggtggaggacgagtggtacagcctgagcgggaggcagggggacgacaaggagggcatgatcaacctcgtcatgtcctacgcgctgcttccagctgccatggtgatgccaccccagcccgtggtcctgatgccaacagtgtaccagcagggcgttggctatgtgcccatcacagggatgcccgctgtctgtagccccggcatggtgcccgtggccctgcccccggccgccgtgaacgcccagccccgctgtagcgaggaggacctgaaagccatccaggacatgttccccaacatggaccaggaggtgatccgctccgtgctggaagcccagcgagggaacaaggatgccgccatcaactccctgctgcagatgggggaggagccatagagcctctgcctcgatgccgttttgcccccgctctttggacacgccgacccggcgctccccaaggaatgctgtcccaacaagattcccgtgaaagagcacccgtgtcgccccctcccgtggacttctgtgccgccccgtccacacctgttcttgggtgcatgtgggttttcggttcctggcggtccaggacggggcgggggctcccctcccatctcgtgctgggaggtctcagcgcgctctcctgtccctgggacgtgcgtctctccttctcatgccgttctggaaaatgctcttgctgtagagagcagctgcttctgccagggtgttggaggtggtggagcgccttccgattccattcatggcattttgtgatgtgatgtaattggaatagagctgttgatttaaggcacacacaatccctcacactgtgggttttttttagaacttcccagacgaaaactcacgcccttgccctaacgcgctttgctgtgagcctggcccctgcccagggcttgggtctggtgagctgagcagcttcctgtggatggtgtggggccggcctctggcctggttcacctggccactgtccagccagccttgtgacagactccggcctgaaggcagaatgaacccacacctggagtgaggaagggggcctggcacggttggccaggctctgcctgattgccagccagcgggcatctgaagccgggtccttcgcccgccggaggctgccgtccgtctctcttgctgcgctcgtgccagctccgtgggtgtcctcccagggagcttctcttctcaacaggccttgcgaggctggggtgagaggtgatagaggcagcactgtgcatgattccgagagggtgtggtggcactgccagccgactgctgacagcttgggagctgctgtgcccaggacgtgggttcagcgtgggcgaggaaagcctggcgagcgtggccctgtaaaagctttctgaggcgggaggcgctcacttacctctgactgcctgggcgctgcgtgtagcatcttggcctacaggacagattttaggtgacacctggttatgacagtcagaaatttgagaagcttctcacaagtgatgcactttaaataatctgcatgccattgagacacctgcatgtctggtgtttgtggttcaagtgtcttgccgccggccttcggatgtaaacccactgataacggacagaaagagaatgcccacaagtgggtcttctgtggaagatgcagaaggaggaagttagtgcttacattttagtctttttctccctcaaaaaaataggttaagtttcagtgccagctagaaaatactgctttctgccatcgattgggggtggtttttgtcaaatatactgttgataaatatt

SEQ ID NO: 14793 - protein, 205 aa, Homo sapiens [sequence omitted]

SEQ ID NO: 14794 - DNA, 1757 bp, Homo sapiens
  CDS (2)..(1045)
aatggcattgaaacgaatgggaattgtaagcgactatgagaaaatccgtacctttgccgtagcaatagtaggtgttggtggagtaggtagtgtgactgctgaaatgctgacaagatgtggcattggtaagttgctactctttgattatgacaaggtggaactagccaatatgaatagacttttcttccaacctcatcaagcaggattaagtaaagttcaagcagcagaacatactctgaggaacattaatcctgatgttctttttgaagtacacaactataatataaccacagtggaaaactttcaacatttcatggatagaataagtaatggtgggttagaagaaggaaaacctgttgatctagttcttagctgtgtggacaattttgaagctcgaatgacaataaatacagcttgtaatgaacttggacaaacatggatggaatctggggtcagtgaaaatgcagtttcagggcatatacagcttataattcctggagaatctgcttgttttgcgtgtgctccaccacttgtagttgctgcaaatattgatgaaaagactctgaaacgagaaggtgtttgtgcagccagtcttcctaccactatgggtgtggttgctgggatcttagtacaaaacgtgttaaagtttctgttaaattttggtactgttagtttttaccttggatacaatgcaatgcaggatttttttcctactatgtccatgaagccaaatcctcagtgtgatgacagaaattgcaggaagcagcaggaggaatataagaaaaaggtagcagcactgcctaaacaagaggttatacaagaagaggaagagataatccatgaagataatgaatggggtattgagctggtatctgaggtttcagaagaggaactgaaaaatttttcaggtccagttccagacttacctgaaggaattacagtggcatacacaattccaaaaaagcaagaagattctgtcactgagttaacagtggaagattctggtgaaagcttggaagacctcatggccaaaatgaagagtatgtagataatggactgggatatattgtatttctcatgttaaagcctcttcccttgaaattaaaaaaaaattttaactgataaaacttagagcaacattaattaatgtatattcttacctgaattgttatactttttgaaaatcctgtgacttgcctgtttctccccgctccaacgaaatcattaactctcctaaaatgtgtttcattctagtaagaaaacctcaaaggatattgtaggatataaatcttacttgaaaacatagctgttgaaatgttttggccttttggagtgggggaaggacaaatctgatcctgtaatctttttctttccagtaatcccttgtgtctgttgcatgaggacatggacaataaagtagtatatgatcctcagatacagggagaaggacaaggcatacagcttattgattagagctggcaagcatcttctcattatgtttggaattgctttctataagaaaattgcccactactactaacttgatcaacaatgaattcaaaatagttaacctatgaaataacatcctctcaaatgtttgctgatgaagtacaagttgaaatgtagttattggaaaagtctgtaacctgtggatcatatatattcaaagtgagacaaaggcaaataaaaagcagctattttcatgaatagaaaaaaaaaaaaaaaaaaaaaaaaaaaaaaaaaaaaaaaaaaaaccc

SEQ ID NO: 14795 - protein, 348 aa, Homo sapiens [sequence omitted]

SEQ ID NO: 14796 - DNA, 3016 bp, Homo sapiens
  CDS (108)..(1436)
cagcccacctcttgcatcgtcacctacaggtatctaagcaatggatccaagccctggaggttggtgagagccatgtattacccctagatgaaattggacaagagaccatgaccgtaaccctcctcgatgccaatcactgtcctggttctgtcatgtttctctttgaaggatattttggaaccatcctctacacaggtgattttcgatacacaccatccatgctaaaggagccagccctgacactggggaaacagatccatactttatacctagacaacaccaattgcaatccagccctggttcttccttcccgacaagaagctgcccaccagattgtccagctcattcgaaaacacccacaacataacataaagattggactctacagcctgggaaaggaatcactgctggagcagctggccctggagtttcagacctgggtggtattgagtcctcggcgcctggagttggtacagctactgggcctggcagatgtgttcacagtggaggagaaggctggccgcatccatgcagtagaccatatggagacctgccattccaacatgctgcgttggaaccagacccaccctacgattgctatccttcccacaagccgaaaaatccacagctcccaccctgatatccacgtcatcccttactctgaccattcctcttactccgagcttcgtgcctttgtcgcagcactgaagccttgccaggtggtgcccattgtaagtcggcggccctgtggaggctttcaggacagtctgagccccaggatctccgtgcccctgattccggactctgtacagcaatacatgagttcttcctctagaaaaccaagccttctctggctgttagaaaggaggctaaagaggccgagaacccaaggtgttgtgtttgaatcccctgaggaaagtgctgatcaatctcaagctgacagagactcaaagaaggccaagaaagagaaactttctccctggcctgcggaccttgaaaagcagccttcccaccatcctttgcggatcaagaagcagttgttcccagatctctatagcaaagaatggaacaaggcagtgcctttctgtgagtctcaaaagagggtgactatgttgacggccccactgggattttcagtgcacttaaggtctacagatgaggagtttatttctcaaaaaaccagggaggaaattggtttagggtcccccttggtacccatgggagatgatgatggaggtccagaagccacagggaatcagagtgcctggatgggccatggttctcccctgtcccacagcagcaagggcacccctcttctagctactgaattcaggggtctagcactcaaatatcttctgactccagtgaactttttccaggcagggtattcttccaggagatttgaccagcaagtggaaaaataccataaaccctgctgaagacaggagagtacagaatgacaacattgagcccacactgcagttttgaagatagtaactgatggctggtgggaaagagtttgtttttggggcctacttttctatctttacaagactcttatgggcccaccgtggagcagcacttcccaaaacttgttcactggggtcctcgtgcctatggaatccttctttttataactaagtttaagaaatactttttttataaaatctttggagtatgcgtgagcaaattaaaagttctttgaagtcctacagtaacttaatctgtttaaccttgtttaacccagtatttctcaaacttttgtgaacatgcaatcatcttatgtgggtacagaaagaggtaaagagtctgaatcaaaaaggaccaggttattgctgttgctgttttgtggtgtcatgagccattctccatgtccccttctccctcttctcagatcaaaatccctagggagttctatttttaaaattatgaactatggcgctgcatgcttcaatcctgaacgtcactgacttgctgtgaccatccaaataattttcctgtctctgcctctgggagggaacaggaagcgatgaagaggtcttggaacagtagtgaaaattctacctctatgtccttcatgaggatgtgcagtatcccagtatcactgggatccatgtggaacagagccagctggggggttgggcagctctctccaaggcagtacctagagcccagctgaacaacaaggctttgggtgtgaagggactccccagcctggagaccctatttggctgaaacagttacaaaatatcaaatgtgttgtcagatattcctccaattgttcacatagctgggatatttgttgctcccctcaccccttggattatgtagggagccagtgcacacagcctgtttgttttagtatccaaggaagagaccaaggagccagctggcgggaaggggtgggggtgtgcagtctgccctgtccttctgctcataacctgacaaaatgccaaactagtaagcaggatagctgataccacggctatgagggagtaggctccgagagggcacagacttgtggagctgggcgtctggatcaaaactgctttgggatggaacctcgagccctagcagtgaagaagattccatttcttgtccaggggatttaaaagagttttctgctttgagagagaaatagagagtttagaaagcaattgctcttgggaaagctatacacagctctgttttgtcaatgacctttgttgtaagtctcccaacgtcctattaggagccacagcaggtgaggcatttggtgcagcaggaaacatggggactgcctaggctcgaatctgtggcaccctgagcaattacttaaattgtggagcctagttcctcatctgtaagatggacttgagattcctacctctcatgattactatggagattgaataattggtaaaattctcctagctcagtgactgccacaggatgggtctttcagattttggttctctttagcttctggttcttgaaagaaattgatctgtatataacataagaaactttgaaagtc

SEQ ID NO: 14797 - protein, 443 aa, Homo sapiens [sequence omitted]

SEQ ID NO: 14798 - DNA, 2797 bp, Homo sapiens
  CDS (4)..(2358)
aagatggcggaccttgattcgcctccgaagctgtcaggggtgcagcagccgtctgagggggtgggaggtggccgctgctccgaaatctccgctgagctcattcgctccctgacagagctgcaggagctggaggctgtatacgaacggctctgcggcgaggagaaagtggtggagagagagctggatgctcttttggaacagcaaaacaccattgaaagtaagatggtcactctccaccgaatgggtcctaatctgcagctgattgagggagatgcaaagcagctggctggaatgatcacctttacctgcaacctggctgagaatgtgtccagcaaagttcgtcagcttgacctggccaagaaccgcctctatcaggccattcagagagctgatgacatcttggacctgaagttctgcatggatggagttcagactgctttgaggagtgaagattatgagcaggctgcagcacatattcatcgctacttgtgcctggacaagtcggtcattgagctcagccgacagggcaaaggggggagcatgattgatgccaacctgaaattgctgcaggaagctgagcaacgtctcaaagccattgtggcagagaagtttgccattgccaccaaggaaggtgatttgccccaggtggagcgcttcttcaagatcttcccactgctgggtttgcatgaggagggattaagaaggttctcggagtacctttgcaagcaggtggccagtaaagctgaggagaatctgctcatggtgctggggacagacatgagtgatcggagagctgcagtcatctttgcagatacacttactcttctgtttgaagggattgcccgcattgtggaggcccaccagccaatagtggagacctattatgggccagggagactctataccctgatcaaatatctgcaggtggaatgtgacagacaggtggagaaggtggtagacaagttcatcaagcaaagggactaccaccagcagttccggcatgttcagaacaacctgatgagaaattctacaacagaaaaaatcgaaccaagagaactggaccccatcctgactgaggtcaccctgatgaacgcccgcagtgagctatacttacgcttcctcaagaagaggattagctctgattttgaggtgggagactccatggcctcagaggaagtaaagcaagagcaccagaagtgtctggacaaactcctcaataactgccttttgagctgtaccatgcaggagctaattggcttatatgttaccatggaggagtacttcatgagggagactgtcaataaggctgtggctctggacacctatgagaagggccagctgacatccagcatggtggatgatgtcttctacattgttaagaagtgcattgggcgggctctgtccagctccagcattgactgtctctgtgccatgatcaacctcgccaccacagagctggagtctgacttcagggatgttctgtgtaataagctgcggatgggctttcctgccaccaccttccaggacatccagcgcggggtgacaagtgccgtgaacatcatgcacagcagcctccagcaaggcaaatttgacacaaaaggcatcgagagtactgacgaggcgaagatgtccttcctggtgactctgaacaacgtggaagtctgcagtgaaaacatctccactctgaagaagacactggagagtgactgcaccaagctcttcagccagggcattggaggggagcaggcccaggccaagtttgacggctgcctttctgacttggccgccgtgtccaacaaattccgagacctcttgcaggaagggctgacggagctcaacagcacagccatcaagccacaggtgcagccttggatcaacagctttttctccgtctcccacaacatcgaggaggaagaattcaatgactatgaggccaacgacccttgggtacaacagttcatccttaacctggagcagcaaatggcagagttcaaggccagcctgtccccggtcatctacgacagcctaaccggcctcatgactagccttgttgccgtcgagttggagaaagtggtgctgaaatccacctttaaccggctgggtggtctgcagtttgacaaggagctgaggtcgctcattgcctaccttaccacggtgaccacctggaccatccgagacaagtttgcccggctctcccagatggccaccatcctcaatctggagcgggtgaccgagatcctcgattactggggacccaattccggcccattgacgtggcgcctcacccctgctgaagtgcgccaggtgctggccctgcggatagacttccgcagtgaagatatcaagaggctgcgcctgtagctgcctggatgagcacacctggctcatcacacttgcaggcctgttccctaaggggccccagccaaggagctgagcgaggctgtctggcttgggggagatctgacagcccagacctttctacggctggcagcagagaaacaaagtctggacccactccatgctctgccctcagacctggccaggtgatgctctgggggcagcatctccccaccgagagaagcgggctcctaatgaggtgggaaagccacggcaggcagcgagcagcccaggccagctttctgcatggatggtcagtctcttgccctcaaacactacagcaaacaagctacccctgccagtcctagacaacttgggtacatctggggacctagcagttaggcttgactttgaggagaggctgtgatgtttatgatccctgaataaagctactccttgg

SEQ ID NO: 14799 - protein, 785 aa, Homo sapiens
MADLDSPPKLSGVQQPSEGVGGGRCSEISAELIRSLTELQELEAVYERLCGEEKVVERELDALLEQQNTIESKMVTLHRMGPNLQLIEGDAKQLAGMITFTCNLAENVSSKVRQLDLAKNRLYQAIQRADDILDLKFCMDGVQTALRSEDYEQAAAHIHRYLCLDKSVIELSRQGKGGSMIDANLKLLQEAEQRLKAIVAEKFAIATKEGDLPQVERFFKIFPLLGLHEEGLRRFSEYLCKQVASKAEENLLMVLGTDMSDRRAAVIFADTLTLLFEGIARIVEAHQPIVETYYGPGRLYTLIKYLQVECDRQVEKVVDKFIKQRDYHQQFRHVQNNLMRNSTTEKIEPRELDPILTEVTLMNARSELYLRFLKKRISSDFEVGDSMASEEVKQEHQKCLDKLLNNCLLSCTMQELIGLYVTMEEYFMRETVNKAVALDTYEKGQLTSSMVDDVFYIVKKCIGRALSSSSIDCLCAMINLATTELESDFRDVLCNKLRMGFPATTFQDIQRGVTSAVNIMHSSLQQGKFDTKGIESTDEAKMSFLVTLNNVEVCSENISTLKKTLESDCTKLFSQGIGGEQAQAKFDGCLSDLAAVSNKFRDLLQEGLTELNSTAIKPQVQPWINSFFSVSHNIEEEEFNDYEANDPWVQQFILNLEQQMAEFKASLSPVIYDSLTGLMTSLVAVELEKVVLKSTFNRLGGLQFDKELRSLIAYLTTVTTWTIRDKFARLSQMATILNLERVTEILDYWGPNSGPLTWRLTPAEVRQVLALRIDFRSEDIKRLRL

SEQ ID NO: 14800 - DNA, 2596 bp, Homo sapiens
  CDS (129)..(1742)
ctccgagcaggacactgctacttaacaaggtggtttgagccaaactgtggcacgtttcaggcaggattcctccttcattcaaactgcatcacccaggagtctgcaaattccccaaagtaggaggaaaaatgaccacattcaaggaggcagtgaccttcaaggatgtggctgtggtcttcactgaggaggagctggggctgctggaccctgcccagaggaagctgtaccgagatgtgatgctggagaacttcaggaacctgctctcagtggggcatcaaccgttccaccaagatacttgccacttcctaagggaagaaaagttttggatgatggggacagcaacccaaagagaagggaattcaggaggcaagatccaaactgagttggagtctgttccagaagcaggagcacatgaagagtggtcctgccagcaaatctgggaacaaattgcaaaagacttaaccaggtctcaggactctatcataaataactctcagttctttgaaaatggtgatgtcccctcccaggttgaagcaggactacccacaattcatacaggacagaaaccttcccagggtgggaagtgtaaacagtccttcagtaatgttcccatctttgatcttcctcagcagttatactcagaagagaagtcttatacatgtgatgagtgtggaaaaagcatctgttacatctcagctcttcatgttcatcagagagtccacgtgggagagaaactctttatgtgtgatgtgtgtggcaaggaatttagtcaaagctcacatctgcaaactcatcagagagtccacactggagagaaaccattcaaatgtgagcaatgtgggaaaggtttcagtcgtagatcagcacttaatgttcatcataaattacacacaggagagaaaccttacatttgtgaggcatgtgggaaggccttcattcatgattcccagcttaaggaacataagagaatccatactggggagaaaccattcaaatgtgatatatgtggtaagaccttctattttaggtcaagacttaagagccattccatggttcacacaggagaaaaaccatttaggtgtgatacatgtgataagagctttcatcagagatcagcacttaataggcattgcatggtccacacaggagagaaaccgtacagatgtgagcagtgtggaaaaggctttattggtaggctagatttttataagcatcaggtggtccacacaggagagaaaccatataattgtaaagaatgtgggaagagcttcagatggtcctcatgccttttgaaccatcagcgagtccacagtggagaaaaaagcttcaaatgtgaagaatgtgggaagggattttatacaaattcacaactgtcttcccatcagagatcccacagtggtgaaaagccatataaatgtgaggagtgtgggaagggctatgttactaagtttaatcttgacttgcaccagagggtccacacgggagagagaccttataattgtaaggaatgtgggaagaactttagccgggcctcaagtattttgaatcataagagactccactgccagaaaaaaccattcaaatgtgaggactgtggaaagaggcttgtacacaggacataccgtaaagaccagccgagagactatagtggggaaaacccatccaaatgtgaggattgtgggagacgctacaagaggcgcttgaatctggatatacttttatcattatttctaaatgacacataactgttcatatttatggggtacaacgtgctattttaatgtgtgcatacaatttatagtgatccaatcagtgtaattggtgtatctgttacctcaaacatttaccatttctttgtgttggaaaattcaaaatccatttgagaggagttggtagacagcaagggaagggtccctggagacccccagccaaaggggtcagtgtctcatccccacataacacaaaaagcagcctggggaagacaatcaagctacaggcactgataagggaactagcacaggggattgtgcctggagacatgcccatgcctgcacaggtagaagaacctccagcccattcaggtaaaaactcgcacaaacctccggctcactcagttaagggaacaagaccagacacagaaatgcctttgtcctttgtataatcagcaggctccgaggaaaaagtttcttcttttgtgggcatgaacacagtgggcttcagtaggttcaggttggcactttcttttgtggaaaaggaaaagcccagcctctgtaaatcatcacttcagctcctgattggtcccaggccaagctgaatagcccttaggaataatcacttcaactcctgattggtcccgggccaagctgaatagcccttatgaatcatcacttcggttcctgattggtcccgggccaaggtcccagaccaagctgaatcacgctttctccaagacagcccgcaggctaagtgcattccttccccttcccagtccataaaaaccccggaccccagcctcatactgggcaacttatttggatccccatctccactgtggagagcttttttctttcacttattaaacttttactccaatttc

SEQ ID NO: 14801 - protein, 538 aa, Homo sapiens
MTTFKEAVTFKDVAVVFTEEELGLLDPAQRKLYRDVMLENFRNLLSVGHQPFHQDTCHFLREEKFWMMGTATQREGNSGGKIQTELESVPEAGAHEEWSCQQIWEQIAKDLTRSQDSIINNSQFFENGDVPSQVEAGLPTIHTGQKPSQGGKCKQSFSNVPIFDLPQQLYSEEKSYTCDECGKSICYISALHVHQRVHVGEKLFMCDVCGKEFSQSSHLQTHQRVHTGEKPFKCEQCGKGFSRRSALNVHHKLHTGEKPYICEACGKAFIHDSQLKEHKRIHTGEKPFKCDICGKTFYFRSRLKSHSMVHTGEKPFRCDTCDKSFHQRSALNRHCMVHTGEKPYRCEQCGKGFIGRLDFYKHQVVHTGEKPYNCKECGKSFRWSSCLLNHQRVHSGEKSFKCEECGKGFYTNSQLSSHQRSHSGEKPYKCEECGKGYVTKFNLDLHQRVHTGERPYNCKECGKNFSRASSILNHKRLHCQKKPFKCEDCGKRLVHRTYRKDQPRDYSGENPSKCEDCGRRYKRRLNLDILLSLFLNDT

SEQ ID NO: 14802 - DNA, 1809 bp, Homo sapiens
  CDS (407)..(1345)
agtgacgtcgcggccaaaacaagcccgggcttggaggcctgtactgaagctggcctcagatgggaaggcccgactcgctgtctgctgtcgtcggtggtcgcgagaccttgcactctcaccgggtcggcctccagcccctgtgcccgggatccgctcgccgcggatgagcgagagtttcttcctgggacttttcgggcacagctggccggtggcgacataacggactttctttcctgcaagagtctcccctccagcgggagacagcgggctcctgtctcgggacgctgggacacctgtcgcctatttttaaatatccagattccaagaacacactggatactgctcttacaaaaccaagaggaaatcatgaagaaatgttttagttattgaaactacagttgaaatcatggatacatcaacaaatctggatattggagcccagcttatcgtggaagagtgtcccagcacttatagcctaactggcatgccagacattaaaatagaacatccactggacccaaattcagaagaagggtcagctcagggtgttgccatgggaatgaaattcatattgcctaaccgatttgatatgaatgtgtgttctcgatttgtgaagtccttaaatgaagaagatagtaaaaatattcaagatcaggttaactctgacctggaggtggcatctgtcctatttaaagctgaatgcaatatccatacatctccttctccgggaattcaagtaaggcatgtctacaccccctctacaacaaagcatttctcacccataaaacagtcaaccactttaaccaacaaacacagaggaaatgaggtctctaccacacctctgttagcaaattctttgtctgttcaccagttggctgctcagggagagatgctctatctggctactcgtatcgaacaagaaaatgttatcaatcacacggatgaagaaggatttactcctctgatgtgggctgcagcacacgggcaaatagctgtggtagagttcctacttcagaatggtgctgatccccaacttttaggaaaaggtcgagaaagtgcactgtcgttggcctgtagtaaaggctacacagatattgtcaaaatgctgcttgattgtggagttgatgtaaatgaatatgattggaatggaggaacacctctgctttatgctgtacatggaaatcatgtgaaatgtgtaaagatgctcttagaaagtggggctgatccaacaattgaaactgactctggatataattctatggatctagctgtagccctaggctatagaagtgttcaacaggttattgagtcacatttgttgaagctgcttcaaaatatcaaggagtagacacagtcatcagaaaatgtctgcccttttgtttacttcttggtccttataaatgatagttttgtttacttataaatttttacctcagttgcaatatttactggtttttagtaggttttaataaatatttctctgagtaattcactggtttataataaatgtaatactctttttataactatgttttactgtatatttaaaattataaattaatgttttcgtggcatgtaaatttttatggtacagatagttatcatcagtctttgtatcaagtgctgtaatttgacattttcagaaattattctaccctagtcatcttcactcgtgtattaagtcattcactttatatagggtttgctataaatccctagaaaaaaattgttcttattgttgaataaaaaagtgcacagtgtgattgtttacaaaatgatattataaataaataaaatacttcttctgtc

SEQ ID NO: 14803 - protein, 313 aa, Homo sapiens
MDTSTNLDIGAQLIVEECPSTYSLTGMPDIKIEHPLDPNSEEGSAQGVAMGMKFILPNRFDMNVCSRFVKSLNEEDSKNIQDQVNSDLEVASVLFKAECNIHTSPSPGIQVRHVYTPSTTKHFSPIKQSTTLTNKHRGNEVSTTPLLANSLSVHQLAAQGEMLYLATRIEQENVINHTDEEGFTPLMWAAAHGQIAVVEFLLQNGADPQLLGKGRESALSLACSKGYTDIVKMLLDCGVDVNEYDWNGGTPLLYAVHGNHVKCVKMLLESGADPTIETDSGYNSMDLAVALGYRSVQQVIESHLLKLLQNIKE

SEQ ID NO: 14804 - DNA, 3457 bp, Homo sapiens
  CDS (64)..(2781)
caactcctccaaggctcaaaatttcttcagaatctagttcctcatagatcttatgtttcaaccatgatcttggaagtagtgaagaatagcgttcatagctgggaccatgttactcagggcctcgtagaacttggtttcattttgatggattcatatgggccaaagaaggttcttgatggaaaaactattgaaaccagcccaagtctttctagaatgccaaaccagcatgcatgtaagctcggagctaatatcctgttggaaacttttaagatccatgagatgatcagacaagaaattttggagcaggtcctcaacagggttgttaccagagcatcttctcccatcagtcatttcttagacctgctttcaaatatcgtcatgtatgcacccttagttcttcaaagttgttcttctaaagtcacagaagcttttgactatttgtcctttctgccccttcagactgtacaaaggctgcttaaggcagtgcagccccttctcaaagtcagcatgtcaatgagagactgcttgatacttgtccttcggaaagctatgtttgccaaccagcttgatgcccgaaaatctgcagttgctgggtttttgctgctcctgaagaactttaaagttttaggcagcctgtcatcctctcagtgcagtcagtctctcagtgtcagtcaggttcatgtggatgttcacagccattacaattctgtcgccaatgaaactttttgccttgagatcatggatagtttgaggagatgcttaagccagcaagctgatgttcgactcatgctttatgaggggttttatgatgttcttcgaaggaactctcagctggctaattcagtcatgcaaactctgctctcacagttaaaacagttctatgagccaaaacctgatctgctgcctcctctgaaattagaagcttgtattctgacccaaggagataagatctctctacaagaaccactggattatctgctgtgttgtattcagcattgtttggcctggtataagaatacagtcatacccttacagcagggagaggaggaagaggaggaggaagaggcattctacgaagacctagatgatatattggagtccattactaatagaatgattaagagtgagctggaagactttgaactggataaatcagcagatttttctcagagcaccagtattggcataaaaaataatatctctgcttttcttgtgatgggagtttgtgaggttttaatagaatacaatttctccataagtagtttcagtaagaataggtttgaggacatcctgagcttatttatgtgttacaaaaaactctcagacattcttaatgaaaaagcgggtaaagccaaaactaaaatggccaacaagacaagtgatagtcttttgtccatgaaatttgtgtccagtcttctcactgctcttttcagagtcttgctatggagatacacttcaattcctacttcagtggaagagtcgggaaagaaagagaaaggaaagagcatctcactgctgtgcttggagggtttacagaaaatattcagtgctgtgcaacagttctatcagcccaagattcagcagtttctcagagctctggatgtcacagataaggaaggagaagagagagaagatgcagatgtcagtgtcactcagagaacagcattccagatccggcaatttcagaggtccttgttgaatttacttagcagtcaagaggaagattttaatagcaaagaagccctcctgctagtcacggttcttaccagtttgtccaagttactggagccctcctctcctcagtttgtgcagatgttatcctggacatcaaagatttgcaaggaaaacagccgggaggatgccttgttttgcaagagcttgatgaacttgctcttcagcctgcatgtttcgtataagagtcctgtcattctgctgcgtgacttgtcccaggatatccacgggcatctgggagatatagaccaggatgtagaggtggagaaaacaaaccactttgcaatagtgaatttgagaacggctgcccccactgtctgtttacttgttctgagtcaggccgagaaggttctagaagaagtggactggctaatcaccaagcttaagggacaagtgagccaagaaaccttatcagaagaggcctcttctcaggcaaccctaccaaatcagcctgttgagaaagctatcatcatgcaactgggaactctgcttacatttttccacgagctggtgcagacagctctgccatcaggcagctgtgtggacaccttgttaaaggacttgtgcaaaatgtacaccacacttacagcccttgtcagatattatctccaggtgtgtcagagctccggaggaattccaaaaaatatggaaaagctggtgaagctgtctggttctcatctgacccccctgtgttattctttcatttcttacgtacagaataagagtaagagcctgaactatacgggagagaaaaaggagaaacctgctgccgttgccacagccatggccagagttcttcgggaaaccaagccaatccctaacctcatctttgccatagaacagtatgaaaaatttctcatccacctttctaagaagtccaaggtgaacctgatgcagcacatgaagctcagcacctcacgagacttcaagatcaaaggaaacatcctagacatggttcttcgagaggatggcgaagatgaaaatgaagagggcactgcatcagagcatgggggacagaacaaagaaccagccaagaagaaaaggaaaaaataaatgaaatgcctgagttaatgtgaactttggggcttctgcttcatttttacccaacaagcaacaatgccccttgtcctgtagtccacaccgatgttggcatcttggttctgaacccactgaattcaactgcaccttcagttagaaggaatcttcttggcaggtcctgctactgaaaaatggctggccttaggcaagcccttttgcaaaaagcacagctgaaagcctgagtttgggagcctgcacccaccccgatgaagctccacgggagcaaatacagagcctccaggcagtgctatggtccaggctggcttcgtttttccaaggagcctttggtgagttcaattatctggtaaatatccagcgcttcacctgaaagatagtgcaaattggttaggatgccacctcaagaactgtaactgagagctcagaagtgagcaaaggagcttaatgctaaggtcaaaaggagagtgaaaggttgagaacaattgccacgaacggtaatgttacatgttaggagggtctgttttctttttatataagtgtgtcttagatatattttaaatagaaaataagctttctgatttacttgtttggtatttaaagcacagtttgtttttctgtcacctatagagtgcaagaatgcactctatagaataaattctctttaaacatt

SEQ ID NO: 14805 - protein, 906 aa, Homo sapiens
MILEVVKNSVHSWDHVTQGLVELGFILMDSYGPKKVLDGKTIETSPSLSRMPNQHACKLGANILLETFKIHEMIRQEILEQVLNRVVTRASSPISHFLDLLSNIVMYAPLVLQSCSSKVTEAFDYLSFLPLQTVQRLLKAVQPLLKVSMSMRDCLILVLRKAMFANQLDARKSAVAGFLLLLKNFKVLGSLSSSQCSQSLSVSQVHVDVHSHYNSVANETFCLEIMDSLRRCLSQQADVRLMLYEGFYDVLRRNSQLANSVMQTLLSQLKQFYEPKPDLLPPLKLEACILTQGDKISLQEPLDYLLCCIQHCLAWYKNTVIPLQQGEEEEEEEEAFYEDLDDILESITNRMIKSELEDFELDKSADFSQSTSIGIKNNISAFLVMGVCEVLIEYNFSISSFSKNRFEDILSLFMCYKKLSDILNEKAGKAKTKMANKTSDSLLSMKFVSSLLTALFRVLLWRYTSIPTSVEESGKKEKGKSISLLCLEGLQKIFSAVQQFYQPKIQQFLRALDVTDKEGEEREDADVSVTQRTAFQIRQFQRSLLNLLSSQEEDFNSKEALLLVTVLTSLSKLLEPSSPQFVQMLSWTSKICKENSREDALFCKSLMNLLFSLHVSYKSPVILLRDLSQDIHGHLGDIDQDVEVEKTNHFAIVNLRTAAPTVCLLVLSQAEKVLEEVDWLITKLKGQVSQETLSEEASSQATLPNQPVEKAIIMQLGTLLTFFHELVQTALPSGSCVDTLLKDLCKMYTTLTALVRYYLQVCQSSGGIPKNMEKLVKLSGSHLTPLCYSFISYVQNKSKSLNYTGEKKEKPAAVATAMARVLRETKPIPNLIFAIEQYEKFLIHLSKKSKVNLMQHMKLSTSRDFKIKGNILDMVLREDGEDENEEGTASEHGGQNKEPAKKKRKK

SEQ ID NO: 14806 - DNA, 2510 bp, Homo sapiens
  CDS (72)..(1097)
gctcccgggtcagctggtgctggcgtcaggcgctgggcgggctcgccaggacctggcaaggcttgtttactatggccgatgatctggagcagcagtctcaaggctggctgagtagctggctgcccacgtggcgccccacttccatgtctcagctgaagaatgtggaagccaggatcctccagtgtctccagaataagttcctggccagatatgtatccctcccaaaccagaataagatctggacggtgactgtgagccccgagcaaaacgaccgcacccccttggtgatggtgcatggttttgggggcggcgtgggtctctggatcctcaacatggactcactgagtgcccgccgcacactgcacaccttcgatctgcttggcttcgggcgaagctcaaggccagcattcccaagggacccggagggggctgaggatgagtttgtgacatcgatagagacatggcgggagaccatggggatccccagcatgatcctcctggggcacagtttgggaggattcctggccacttcttactcaatcaagtaccctgatagagttaaacacctcatcctggtggacccatggggctttcccctccgaccaactaaccccagtgggatctgtgcacccccagcctgggtcaaagccgtggcatctgtcctaggacgttccaatccattggctgttcttcgagtagctgggccctgggggcctggtctggtgcagcgattccggccggacttcaaacgcaagtttgcagacttctttgaagatgataccatatcagagtatatttaccactgcaacgcacagaatcccagtggtgagacagcattcaaagccatgatggagtcctttggctgggcccggcgccctatgctggagcgaattcacttgattcgaaaagatgtgcctatcactatgatctacgggtccgacacctggatagataccagtacgggaaaaaaggtgaagatgcagcggccggattcctatgtccgagacatggagattaagggtgcctcccaccatgtctatgctgaccagccacacatcttcaatgctgtggtggaggagatctgcgactcagttgattgagctgctctctgaagaggaagaggagaaagccagagagtcactcttacctccctgtctgcttactcacccactctgtcctttcctcaccaactaacatgtgccagccaggcagagtcttgtgctgttcccagaacaggacgacagtgaaaagaacactcttgaccctacactgaaggctgaaggcagaagccacaagaggccttgagtgccacccccagggaagaacataaagggttgcacaatgccacccatccactccttgccaagtgttacccagatggtggaggatgtgaagggattgcgccaagccacattcactctctctgtggcctttcttcctctgggcaaagaagggcttccagtggcctttcctcactctgtagtgtttgtggggatagattccatgcaagaacaccttcctcctccatcccccacttcaccccatcccataccagttccatccagggtctgcttaactgccaagagcaggtcctggagttcccttcacctgcagagtccttttcatgacctaggaggtcttattcaaagccctcattgacagaggaggaaacaggccaaggcaggacatggctggaccatggtgatacagctctgtgtgattcaagttctggcagagcttgtaaggctagagcccaggtctgccgacaccctgtgcttgttgcacacttgatttgctaaggctggagacaggcaccattgccatggggctggtcctagtcactggccgaggataagcccgtccctgtcccacattctagccccactatgcgggggtgctgttgtcctgcctgtgtctcatccccggctgcctaagctagggacactcaagtgcttccttccttgccccatcttcctcccaactggaggcctctgagcctcccctgtgccttgggccctgaagccccatatgtagtatagagcaaaggtggctcctggtgaagagagggtggaaaggcccttcagccccagggccatgtctgggttctccatgcccatcagtctctgcagtttctctacctgcccccagagctgaggccatctgcaagcccctgcccatggcccaatggggagcctccagccacaagttccctgtccttatcagccactgggtggttcccactgcatgaccctctatccctgccatctgtccccatggtttccagctcaatccacccctgacccatctgtcagctttttcccagggagccgtttcaggggttctgggcagtaggctgggcctggcctcagaacctggtggctcctgcctgctccttcacttttgtaaaaccatccccttcaccagaatggtattaactcctggtgctttgtactactggtccagctgccctgggctccttttctatattaataaagaaacgagtaaaaatt

SEQ ID NO: 14807 - protein, 342 aa, Homo sapiens
MADDLEQQSQGWLSSWLPTWRPTSMSQLKNVEARILQCLQNKFLARYVSLPNQNKIWTVTVSPEQNDRTPLVMVHGFGGGVGLWILNMDSLSARRTLHTFDLLGFGRSSRPAFPRDPEGAEDEFVTSIETWRETMGIPSMILLGHSLGGFLATSYSIKYPDRVKHLILVDPWGFPLRPTNPSGICAPPAWVKAVASVLGRSNPLAVLRVAGPWGPGLVQRFRPDFKRKFADFFEDDTISEYIYHCNAQNPSGETAFKAMMESFGWARRPMLERIHLIRKDVPITMIYGSDTWIDTSTGKKVKMQRPDSYVRDMEIKGASHHVYADQPHIFNAVVEEICDSVD

SEQ ID NO: 14808 - DNA, 2297 bp, Homo sapiens
ctttcgcgtcccccaccctctcggctccgcctggcagcagctccgccgcccagaggcgtccgagaccctccgactcgtgggtacgcataggcctcgccagcgagccttgcccaggcaacgagtcgccagcccgccccctcgccgcgggctaggtctcacctcgccaccagtacgtcttggacaagtagtgccaggtctgatgccgggtgtggtgagtgccgccgggacccaggtgcgccgcctcgatgaggtcccggcgtcgctccggctgcagcaccacctccagctccgcgaaggtcttgcggtgccgctgccgccgctggtaatacagagtcccgccgcgcaccacgtagcaggcggcagcttttcggattttacgcttgacattgccctcggtgcccggcgcatacggctcgcgctcgttcgtcaggtaacgcaggatggcccggtagctttcctcgcttgacatcgcggaccgcggctccctgagggcgcctgtcagggacaggtgaggaaaacggcccgctacctacgggcggctgcaggaggagcggcggcaccgtagggagaaacggctgcgcctttggcgagcgctcttcgacggctcccttagtccgaaggaaaagcgggcgagttggtaaccagggggaactgcacttctccagcgcgcgggatccgctggcgactgacaaaatggctgctgcaccaccggaagtgacgcaaggcaagggcggggactgagccctgattggagcgcactctcgttttctggcttgatggagccgatccagtgacgtcaggaatgcgggtggacattttggaagcgggtaggacccttcactgcagttcgagggagtctttaagcagacatcttaagtcctggcagtttctcttttcatttttcccttttccacgctttctaaggagccacgtgtagggggagctggtggacagttgagagttcagccgaaacatccagagggttaggagtccgtttttacgtttgagactcccaacatcataaaagcatattttcaggcttctggaaaaatattagtctcttgacacgggaccagagacagcccatttacatggaaatttagattccagttaacagttataaaattttcagtgcctccctcagtgatgagttattgtttctaaacttgcacctgctagctccagactactcaaggaagagtcgagattcttttggaattatcagcatttatagtcaatcttattgcgagtggaaaagggggtcggtaacactattttaaggctttatttacatatatttttacacaaacgtaggggaaaaggttctccattttgcaccaaatatatatgagggtgcaagaaggggagcggacttgagctgcgtctcccagtgcgtgctgaggatgctaatacaggtatttagctggtaatcccggagcagcgaccccggtcaccctttcctgggacgaatctgcagcgctcacaggggcccagggctgacatccctcctcggggactggggttggacactgtcgccgctttgctaaagccagaacatttcaggccgagggctccagctgcagacacggcctagtacacttctccaccggagggtctgtagtctctgggtgaggccctttgacgctcctagaagtagctgacgggcagacaggtgaatacagcaggctcgaaaacagaatcatacagccagcctctggtgttaggggcgtgtttttgtgtgtgtgcacacgcagtaattcccggatggcccggacatccttgaaagattccaggtgcggggacatgagctctcaaggcccagaagaaaaaagaaactaccaggcttgggatctacttagttgctgagtttgccactatagctcaaaggaggaatttaaaaatggagatgcacctctttcccccatggggtcgggcagtgagagcagaagaccaaatgcaccctctgcgaacccaggaggctggtctacgtgtcaggccaaccccactctcctgtcatactgtctttaaatattttggccgggcgcggtgactcacgcctgtaatcccagcactttgggaggccgaggcgggcaaatcacgaggtcaggagatggagaccatcctggctaacatggtgaaaccctgtctctactgggcctgaagtcccagctactcgggaggctgaggcaggaggatcgcttgaacccgggaagcagaggttgtagcgagccgagattgtgccactgcattccagcctgggtgacagagggagactccgtctcaaaaaaaaaaaaaac

SEQ ID NO: 14809 - DNA, 3219 bp, Homo sapiens
  CDS (71)..(2479)
gtagtagctgccaggctgtcccccgccctgcccggcccgagccccgcgggccgccgccgccaccgccgccatgaagaagcagttcaaccgcatgaagcagctggctaaccagaccgtgggcagagctgagaaaacagaagtccttagtgaagatctattacagattgagagacgcctggacacggtgcggtcaatatgccaccattcccataagcgcttggtggcatgtttccagggccagcatggcaccgatgccgagaggagacacaaaaaactgcctctgacagctcttgctcaaaatatgcaagaagcatcgactcagctggaagactctctcctggggaagatgctggagacgtgtggagatgctgagaatcagctggctctcgagctctcccagcacgaagtctttgttgagaaggagatcgtggaccctctgtacggcatagctgaggtggagattcccaacatccagaagcagagggagcagcttgcaagattggtgttagactgggattcagtcagagccaggtggaaccaagctcacaaatcctcaggaaccaactttcaggggcttccatcaaaaatagatactctaaaggaagagatggatgaagctggaaataaagtagaacagtgcaaggatcaacttgcagcagacatgtacaactttatggccaaagaaggggagtatggcaaattctttgttacgttattagaagcccaagcagattaccatagaaaagcattagcagtcttagaaaagaccctccccgaaatgcgagcccatcaagataagtgggcggaaaaaccagcctttgggactcccctagaagaacacctgaagaggagcgggcgcgagattgcgctgcccattgaagcctgtgtcatgctgcttctggagacaggcatgaaggaggagggccttttccgaattggggctggggcctccaagttaaagaagctgaaagctgctttggactgttctacttctcacctggatgagttctattcagacccccatgctgtagcaggtgctttaaaatcctatttacgggaattgcctgaacctttgatgacttttaatctgtatgaagaatggacacaagttgcaagtgtgcaggatcaagacaaaaaacttcaagacttgtggagaacatgtcagaagttgccaccacaaaattttgttaactttagatatttgatcaagttccttgcaaagcttgctcagaccagcgatgtgaataaaatgactcccagcaacattgcgattgtgttagcccctaacttgttatgggccagaaacgaaggaacacttgctgaaatggcagcagccacatccgtccatgtggttgcagtgattgaacccatcattcagcatgccgactggttcttccctgaagaggtggaatttaatgtatcagaagcatttgtacctctcaccaccccgagttctaatcactcattccacactggaaacgactctgactcggggaccctggagaggaagcggcctgctagcatggcggtgatggaaggagacttggtgaagaaggaaagtcctcccaaaccgaaggaccctgtatctgcagctgtgccagcaccagggagaaacaacagtcagatagcatctggccaaaatcagccccaggcagctgctggctcccaccagctctccatgggccaacctcacaatgctgcagggcccagcccgcatacactgcgccgagctgttaaaaaacccgctccagcacccccgaaaccgggcaacccacctcctggccaccccgggggccagagttcttcaggaacatctcagcatccacccagtctgtcaccaaagccacccacccgaagcccctctcctcccacccagcacacgggccagcctccaggccagccctccgccccctcccagctctcagcaccccggaggtactccagcagcttgtctccaatccaagctcccaatcacccaccgccgcagccccctacgcaggccacgccactgatgcacaccaaacccaatagccagggccctcccaaccccatggcattgcccagtgagcatggacttgagcagccatctcacacccctccccagactccaacgccccccagtactccgcccctaggaaaacagaaccccagtctgccagctcctcagaccctggcagggggtaaccctgaaactgcacagccacatgctggaaccttaccgagaccgagaccagtaccaaagccaaggaaccggcccagcgtgcccccacccccccaacctcctggtgtccactcagctggggacagcagcctcaccaacacagcaccaacagcttccaagatagtaacagactccaattccagggtctcagaaccgcatcgcagcatctttcctgaagtgcactcagactcagccagcaaagacgtgcctggccgcatcctgctggatatagacaatgataccgagagcactgccctgtgaagaaagccctttcccagccctccaccacttccaccctggcgagtggagcaggggcaggcgaacctctttctttgcagaccgaacagtgaaaagctttcagtggaggacaaaggagggcctcactgtgtgggacctggccttctgcacggcccaaggagaacctggaggccaccactaaagctgaatgacctgtgtcttgaagaagttggctttctttacatgggaaggaaatcatgccaaaaaaatccaaaacaaagaagtacctggagtggagagagtattcctgctgaaacgcgcataggaagcttttgtccctgctgttaatgcgggcagcacctacagcaacttggaatgagtaagaagcagtgcgttaactatctatttaataaaatgcgctcattatgcaagtcgcctactctctgctacctggacgttcattcttatgtattaggagggaggctgcgctccttcagacttgctgcagaatcattttgtatcatgtatggtctgtgtctccccagtcccctcagaaccatgcccatggatggtgactgctggctctgtcacctcatcaaactggatgtgacccatgccgcctcgttggattgtcggaatgtagacagaaatgtactgttcttttttttttttttaaacaatgtaattgctacttgataaggaccgaacattattctagtttcatgtttaatttgaattaaatatattctgtggtttatatg

SEQ ID NO: 14810 - protein, 803 aa, Homo sapiens
MKKQFNRMKQLANQTVGRAEKTEVLSEDLLQIERRLDTVRSICHHSHKRLVACFQGQHGTDAERRHKKLPLTALAQNMQEASTQLEDSLLGKMLETCGDAENQLALELSQHEVFVEKEIVDPLYGIAEVEIPNIQKQREQLARLVLDWDSVRARWNQAHKSSGTNFQGLPSKIDTLKEEMDEAGNKVEQCKDQLAADMYNFMAKEGEYGKFFVTLLEAQADYHRKALAVLEKTLPEMRAHQDKWAEKPAFGTPLEEHLKRSGREIALPIEACVMLLLETGMKEEGLFRIGAGASKLKKLKAALDCSTSHLDEFYSDPHAVAGALKSYLRELPEPLMTFNLYEEWTQVASVQDQDKKLQDLWRTCQKLPPQNFVNFRYLIKFLAKLAQTSDVNKMTPSNIAIVLAPNLLWARNEGTLAEMAAATSVHVVAVIEPIIQHADWFFPEEVEFNVSEAFVPLTTPSSNHSFHTGNDSDSGTLERKRPASMAVMEGDLVKKESPPKPKDPVSAAVPAPGRNNSQIASGQNQPQAAAGSHQLSMGQPHNAAGPSPHTLRRAVKKPAPAPPKPGNPPPGHPGGQSSSGTSQHPPSLSPKPPTRSPSPPTQHTGQPPGQPSAPSQLSAPRRYSSSLSPIQAPNHPPPQPPTQATPLMHTKPNSQGPPNPMALPSEHGLEQPSHTPPQTPTPPSTPPLGKQNPSLPAPQTLAGGNPETAQPHAGTLPRPRPVPKPRNRPSVPPPPQPPGVHSAGDSSLTNTAPTASKIVTDSNSRVSEPHRSIFPEVHSDSASKDVPGRILLDIDNDTESTAL

SEQ ID NO: 14811 - DNA, 2629 bp, Homo sapiens
aattatacctcaagaaagttgttttttaaaaagacagcgtaaggggtggggggcagttgagatgaagcaggaaaactgtgatcagaagcaaagctcaggggctgtctggcctggctgccccaagtcaaagcctgcatttcatacaggcaatgttagggtagcccccaagccatgattcggaaagataaattgaccccagaaggaatagggctgggtcccttctcccttgacagctccctttctgtgttttttctggcacaagaaactctgtcatcttgtataaataggagaaatttatggcagttttccctcttcttctccctggtgggctactaggaaaggtctagggggaggagggagcctgaaattccaaaaatataaatgtggaaagactggagggggtcgaggagtctctttgcctgccttagctctggccccagctctcctttccctttgcatgtttgaccatctgggtgatgaggagggtagagaactggtgcagcccgtcctctctgcaagcccaaaagagatgggtcccaaagcagatatccgacaggaggggcacaagggaaatcaaggaaataggcttggctgtcccatgaaataattggaggagacacagaccactgccctccttcctggatttggctatttttgtacttccctgtttgttgaggcagcctgatacagcgggaagagaactcgtcctcgatttagaaagattgacagagaaactaagtgtgtgaccttaagcaagtcatatcttgtctccgggcctcacctgtaaaaagagggaggggactgaatttatcaggggttttcaaatgattttaactctggggtccttccttcaaataaaaccgtatgcagtgacccaacatgaacatgagtagtaggctgctgagcttcttgaaggtaggaatgggagtctcagggccctgtggtgactggcgagaggcttgtccaagcacaagatgatctccatggcttttccagccccgtcctcaggagggatttgcccccatggtgaagaggctcagttctgcacacccagtgggcttgaaatccagctccaccccctcctgtgtgtccctcagcacataacttaccttccttgaacctgtttcctcgtgtgtaaattggaataatagtaacacatatctcagaggattgtcacatagattacactaaataatgtgcatagagtccttcgcatacttatctggcccaataaatattattatagttattccgtgatctgatgtaatcatttttttattttgagacagaatctcattttgtagcccagactggtgcacagtggcatgatgtcagttcactgcaacctccgcctcctgggttcaagcaattctcctgtctcagcctcccaagtagctgggattacaggagtgtgccaccgtgtccagctaatttttgtattttttagtagagatggggtttcaccatgttggccagactggtctcgaactcctggcctcaagtgatctgcctgcctcagccccacacagtgctgggattacaggcgcaagccattgcacctggcccgatacaatctttttaatttgaaatatctggtgtgagaaggtgaattagaaaggatgacagcaaaactgctataacacaaaggccccaaaacacagtagcatatagaaaacagaagtttatttctcacttagtctgggaggaagcggttccagacagcaggcagctctgttcctcctagtcagtcagggacgtgtgttcctttcatacctttgctttgtcttcccttagggatgtcttttcagttgcctggtcaaacctgtctcaggcacatctgcccagctcatgaaagagagaacacaaaggagaatttacccaatgtcatcaggctttgaggacatgcttgcctcacattcccctgtgtctacacctggcaacaagagcagctgggaaatggagtgtccagctgggtgtctctctaccctcgtgcagcaaggaaagaagagattttagtggacaacgggcagtcttaatccagggctcaaacccacacccgagctgtcctcttcctcttctcttcccaaaggaagggaaataaagtctacagcccagaaaacaatgtgaccacccatcccctaccccaatcaggtccctgccattcatcccaagatcagcagtcttgggaaagtggcttggaagcctccctccagaaagaccacccttttgtccatcttcttcacatgggtggatgtgagaaaagtttctctccccactgcctgcctgccactccctgtctcagtttcagctcacgctctagccctttgttcccagtcaccaagagtgactacaaatgcgggggaacaggaggacctgaaacttcatggaaattgagactgggacacagaagccatgctcagaggcagcctaggtgagggttctgatgccaggaaatccagctactactgtgtagcctaaagcggggattaagctctcagaacttcaatgaactcttttggaaataggggtaagaagcccacttgtcagggctgttgtgaacatcaaatgtgatcatgtatgtacctagtacatagtatgccttcaataaatggtaaggcaaacccaaggc

SEQ ID NO: 14812 - DNA, 2825 bp, Homo sapiens
  CDS (183)..(2711)
gctgttatggccgcctccttgaggtagtatccgcacatggaattctagggccgcaggtgtatttacggtaactgtcgccactagatttcagcgcctttggactctcctgttttcactttcttttgttgactcccgtgtggccctcgtgggagcctgttttggctgcagcggtgtctggggtgatgtggaccccggagctggcaattctgaggggattccccactgaggctgagcggcagcaatggaaacaggagggggtcgtcggttcagagagtggatctttcctacaattgctgctggaagggaactatgaagccatattcttaaattcaatgactcaaaatatttttaattcaacaacaaccgctgaagaaaagattgatagctacctggagaagcaggtagtaacattcctggattactcaacagatttggacacaacggaaagacaacagttgatatttctacttggtgtgagcagtttgcaactttttgttcagagcaactggacggggccccctgttgacttacaccctcaggactttttgtcatctgttctgttccagcaattcagtgaggttaaaggactggatgcatttgttctgagcctgctcactctagatggtgaatcaatctacagcctgacctcgaagcctatactactgttattagcacgcattatcctagtgaatgtaagacataaactgacagctattcagagcttgccatggtggactttgagatgtgtgaatattcatcagcatttgcttgaggaacgctcacctctgctttttactcttgccgaaaactgtattgatcaagtgatgaaactacagaatctgtttgtagatgattcaggtcgatatttggctattcaattccatctggaatgtgcatatgtgtttttatattattatgagtacagaaaagcaaaagatcagttggatattgctaaggacatcagccaattacaaattgatttgacaggtgctttgggaaaaagaacacggttccaggaaaattatgtggcacaactgattctagatgtaagaagggaaggggatgtcctttcaaattgtgaattcactccagcacccactcctcaggaacatttaaccaagaatcttgagctcaatgatgacaccattctgaatgacataaagttagcagattgtgaacagttccagatgccggatctgtgtgctgaagagatcgctattattcttggaatctgcactaattttcaaaagaataacccagtgcacacattaactgaagtggagcttctggcatttacatcatgtttgctttcacaaccaaagttctgggccattcagacatcagccttgatcctccggacaaaacttgagaaaggaagtactcgccgagtggaacgggcaatgaggcagacacaggctcttgcagaccaatttgaagataaaactacatctgtattggaacgcctgaagattttctattgctgtcaagtaccacctcactgggccattcagcgccaacttgcaagtttgctctttgagttgggatgtaccagttcagcccttcagatatttgaaaagctagaaatgtgggaagatgttgtcatttgttatgaaagagccgggcagcacggaaaggcagaagaaatccttagacaagagctggagaaaaaagaaacgcctagtttatactgcttgcttggagatgtcctcggagaccattcttgctatgacaaggcctgggagttgtcccggtaccgcagtgctcgtgctcagcgctccaaagccctccttcatcttcggaacaaggagtttcaagagtgtgtagagtgcttcgaacgctcggttaagattaatcccatgcagctcggggtgtggttttctctcggttgtgcctatttggccttggaagactatcaaggttcagcaaaggcatttcagcgctgtgtgactctagaacccgataatgctgaagcttggaacaatttgtcaacttcctatatccgattaaaacaaaaagtaaaagcttttagaactttacaagaagctctcaagtgtaactatggacactggcagatttgggaaaactacatcctcaccagcactgacgttggggaattttcagaagccattaaagcttatcaccggctcttggacttacgtgacaaatacaaagatgttcaggtccttaaaattctagtcagggcagtgattgatgggatgactgatcgaagtggagatgttgcaactggcctcaaaggaaagctgcaggagttatttggcagagtgacttcaagagtgacaaatgatggagaaatctggaggctgtatgcccacgtatatggaaatgggcagagtgaaaagcctgatgaaaatgaaaaggcattccagtgcctctcaaaggcatacaagtgtgacacccagtccaattgttgggagaaagatattacaccatttaaggaagttgttcaaagagccttaggacttgcacatgtggccataaaatgcagtaaaaacaaatccagttcccaagaagctgtacaaatgctttcttctgttcgactcaatttacggggcttgttatctaaagcaaagcaactttttacagatgtggcaactggagaaatgtccagggaattagctgatgacataacagctatggacaccttagtgacagagctccaagacctaagcaaccagtttcgaaatcagtattgattctgctggaagcagattctggaaaaggtgctttcacctgctggtaaaagatacatctgtatatctgaaatgcaagatattgatttttaaaataaatttgttttatgactt

SEQ ID NO: 14813 - protein, 843 aa, Homo sapiens
MWTPELAILRGFPTEAERQQWKQEGVVGSESGSFLQLLLEGNYEAIFLNSMTQNIFNSTTTAEEKIDSYLEKQVVTFLDYSTDLDTTERQQLIFLLGVSSLQLFVQSNWTGPPVDLHPQDFLSSVLFQQFSEVKGLDAFVLSLLTLDGESIYSLTSKPILLLLARIILVNVRHKLTAIQSLPWWTLRCVNIHQHLLEERSPLLFTLAENCIDQVMKLQNLFVDDSGRYLAIQFHLECAYVFLYYYEYRKAKDQLDIAKDISQLQIDLTGALGKRTRFQENYVAQLILDVRREGDVLSNCEFTPAPTPQEHLTKNLELNDDTILNDIKLADCEQFQMPDLCAEEIAIILGICTNFQKNNPVHTLTEVELLAFTSCLLSQPKFWAIQTSALILRTKLEKGSTRRVERAMRQTQALADQFEDKTTSVLERLKIFYCCQVPPHWAIQRQLASLLFELGCTSSALQIFEKLEMWEDVVICYERAGQHGKAEEILRQELEKKETPSLYCLLGDVLGDHSCYDKAWELSRYRSARAQRSKALLHLRNKEFQECVECFERSVKINPMQLGVWFSLGCAYLALEDYQGSAKAFQRCVTLEPDNAEAWNNLSTSYIRLKQKVKAFRTLQEALKCNYGHWQIWENYILTSTDVGEFSEAIKAYHRLLDLRDKYKDVQVLKILVRAVIDGMTDRSGDVATGLKGKLQELFGRVTSRVTNDGEIWRLYAHVYGNGQSEKPDENEKAFQCLSKAYKCDTQSNCWEKDITPFKEVVQRALGLAHVAIKCSKNKSSSQEAVQMLSSVRLNLRGLLSKAKQLFTDVATGEMSRELADDITAMDTLVTELQDLSNQFRNQY

SEQ ID NO: 14814 - DNA, 1876 bp, Homo sapiens
  CDS (222)..(1448)
cattccatgcagacaagcgtgtccttcatgagacaggattcagtactgagctagatcgtgtaaagaatctgcctcattgtgaaacggaaatatttgaagtgagatttgacccacagggggccaatcttcctgttggaagcaaagaagtcattctgcccatcaaggtggttggagggccaacagttcacatctgtctccaagccaaggtgaccattccaaccatgactctctctcgtggaaaagtggactttgccacaattcagtgtggacagtgcctggtggaaactattcagctttccaatcatctccaagtcccttgtgaatggttcgtccagagccaaaagcctgttgacaagctggagaaacacatgccgaagtacttaagacagaaactacgcgctgaattaaagccaaagacacggatcttcgaaatccagcccatttctggagtcttggatcctggtgagaagtccaacgtgcaagtgaaattcatgccaaaagaagagaaattctacagccaaaccctggtgtttcagattgcccagagtgctcaaaagcttaccctcctggcacgtgggcaaggtctagagccacgcctggaatttagtccttcagtcctggatctggggccactgctactttgtgcacctggagacgaggccgaggtgatagtgaagaatccctgcaacttccccattgagttttattccttagaatttgatcagcagtatctcatagaagaaaagatcttgcggaagctgaagggctatgattcctacaacaccctgctgctgcctccccgcaaccctggggagaagctgcccccagaactgtacgagtacttcaaagagataaagaagtcaaaagaggagcagatgagggcgaaatatctggagaatctggcacaggagaatgaagaggaagatataacctcatcagatcagggaacctccaatagcacaaagaggacatcgctgagccgagggatctctgtcacatccaacctggaagaatggcacgccctgttggtcgagtccaaaacctacctagaggaagaggaggatgaggaaagcctggaaaaaatcattttccaaactgacaagcttcagagcattgacagccactccatggaggaagttggagaggtggaaaacaacccagtgagcaaagcaatcgctcgccacctgggcattgacatttctgcagaaggccgcctggccaagaaccggaaaggcatcgccattatcattcacgggacacccttgtcaggaaagtcagccaatgccgttagcgtggccaagtactacaacgcagcctgcctgagcatcgactccattgtgctggaagctgtggccaacagcaacaacatcccagggatccgggcctgtgagctctgcatcagggctgccatagagcagtccatgaaggaaggagaggaggctgctgagtgactgctaccgaggagtggtgtttgatggcctcgacactctctttgctcggaatgctgcagccgccctcctctgcctgctgaaggccattggcagccgggagcatatatacattctcaacatggcccaggattacgcagccatgaaggcccaggagaaagccaaaaaggagcaagaaggcaaggcctcctacctttccattgggcttaagtgaaactttgacatttgctattccgttggcgcctcacctctgccctgtaaggtggccaggagttgtatttctgctttgctaggagggaactgggacgcgagtggctggctgggaagttctatgatgaacgctttgctgacagcaggtgcattcctgcttccctcccatcacactgtacccctccatcctttctgcaattacagccattttgggtccc

SEQ ID NO: 14815 - protein, 409 aa, Homo sapiens
MTLSRGKVDFATIQCGQCLVETIQLSNHLQVPCEWFVQSQKPVDKLEKHMPKYLRQKLRAELKPKTRIFEIQPISGVLDPGEKSNVQVKFMPKEEKFYSQTLVFQIAQSAQKLTLLARGQGLEPRLEFSPSVLDLGPLLLCAPGDEAEVIVKNPCNFPIEFYSLEFDQQYLIEEKILRKLKGYDSYNTLLLPPRNPGEKLPPELYEYFKEIKKSKEEQMRAKYLENLAQENEEEDITSSDQGTSNSTKRTSLSRGISVTSNLEEWHALLVESKTYLEEEEDEESLEKIIFQTDKLQSIDSHSMEEVGEVENNPVSKAIARHLGIDISAEGRLAKNRKGIAIIIHGTPLSGKSANAVSVAKYYNAACLSIDSIVLEAVANSNNIPGIRACELCIRAAIEQSMKEGEEAAE

SEQ ID NO: 14816 - DNA, 4585 bp, Homo sapiens
  CDS (30)..(1259)
gaggaggccgcagcagtcgccgcgcgaacatggcggccgaaatccactccaggccgcagagcagccgcccggtgctgctgagcaagatcgaggggcaccaggacgccgtcacggccgcgctgctcatccccaaggaggacggcgtgatcacggccagcgaggacagaaccatccgggtatggctgaaaagagacagtggtcaatactggcccagcatttaccacacaatggcctctccttgctctgctatggcttaccatcatgacagcagacggatatttgtgggccaggataatggagctgtaatggaatttcacgtttctgaagattttaataaaatgaactttatcaagacctacccagctcatcagaaccgggtgtctgcgattatcttcagcttggccacagagtgggtgatcagtaccggccacgacaagtgtgtgagctggatgtgcacgcggagcgggaacatgctcgggaggcacttcttcacgtcctgggcttcgtgtctgcaatatgactttgacactcagtatgctttcgttggtgattattctgggcagatcaccctgctgaagcttgaacagaacacgtgttcagtcatcacaaccctcaaaggacatgaaggtagtgtcgcctgcctctggtgggaccctattcagcggttactcttctcaggagcatctgacaacagcatcatcatgtgggacatcggaggaaggaaaggccggacgctgttacttcagggccatcatgacaaggtgcagtcgctgtgctaccttcagctcaccaggcagctcgtctcctgttcctcggacggcggaattgcagtgtggaacatggatgttagcagagaagaggctcctcagtggttggaaagtgattcttgtcagaaatgtgagcagccatttttctggaacataaagcagatgtgggacaccaagacgctggggctaagacaacatcactgcaggaaatgcgggcaggctgtctgcgggaagtgcagcagcaagcgctcaagttacccagtcatgggcttcgagttccaagtccgggtttgtgattcttgttacgactccatcaaagatgaagatcggacttctctagcgacctttcatgaaggaaaacataacatttcccacatgtccatggacattgccaggggactgatggtgacctgtgggaccgaccgcattgtaaagatctgggacatgacacctgtggtgggctgcagtctggcgactgggttttctccgcactgatctgagagctgggcggcgtccacacctaagaacagcagctccaccaaatgaagtccctctcacgcagctccacagcgctgtctcgtgaatggacagtagccacttacaaacaaatcaacattcttaaaaagaaaatgtaaaggtgtgttttggggcatttgtggaacttacccatggggactaatatggaaaaggtctgtccatagtggttccctgaagactggaattacttcagcaaaacttccccatgaacagctaatgtgtagtgaaagaatgagctagcaaatgagttttagcggggacaaaaaatcaaacaaaaaagtgaatgcttagaaccttctcaaagcagtcacaagtacagacacttcacttagcctagggggccttccagggttcttgtggctgttgtcagagcaggagctgggggagggaagacttgttctctctttcttgaggggtggcattaggaacttacgaaaccagagacctttccctatgacttggcagtatgtgaatatcctctacacttagttattgataaacttcttaaagagatctgttattttcaggtagtgccataatctgcacttagcattggcttgcttcagttgtttctcttcccagccagtatgccacaggtgaactttcgaggttgtcattaagtaagttgtgaaatttctgtaataacaaaggcagtccgcattcttccctttcccccaaattcctagggcaaaacttttttatggtgctgttaacatgggagtcacacaagccgcctgactttttctcattgccattagtaatgactgatggaaaacccagccaccactgtgatgcgaaatgatcagtctgttgcctgaaacagcccagtcctcttaactgaaacagcattctacttcttgttccaagatgagcctctgcaatattctggcaatttaatataccccctacaaaagcactccacagcttttacactattttgactttgagttataactagtattattcatgttttcataaaaagaagttagtgacccagagctataatcatccatcaagtcttccacaataattcccaactcataaattgctttcctaacaactagcaaaagctattgttcataatggcatttaaagcttttgggcactgtgtaccaggatgaggaagagaagaaatgaggagcctgtcttttaatattccagtatttgtgtgtttgattttttttgacaacagtacatatatctatttctctagggatatggaagtaagtggagaagggcctacctttttaaaggacaaatataaaaatagcaacagtatctttgctaatcttactaatggatattgattaaaaaaaaaaaacctcagtactgcatcactgtgttgggatcgtaccaggacaatagggtcattccatatgataaaactaaaggactaaatttgttttataatgatgtcttagagggactgaaaagtttaaggaggcgatcgaactaaaatgtcttaatggctgtgtgacacacgtaaggaaaggaaagggggtcacgcacatcatgtactggaatgatctgcattaaacattgacttgtcttcagaaataagactgaagggttttgttgttccttagagttttcgtgttacatcacctaaagagatttcttttaaaaactttctagactctttgcaaaatgtatattactaacatagtttggaagaaaaattgagtagtggtaagttttgttcaagcacaatgttgaatgttaagcttcctgtattaattttagttcagttaatggttcagcccatacaaaggtgctatcctagggattttatgaattcctgaaaggaaaatagaatatgatcaattccttgccctgtggaagagtgcagaactgtggttttgttttcctttgacttctgtaaaatgtgaccgtttgacatctgtggtagattgaacggaatatcacagctgctgagtttactccatagctttcaaaccttttttattttaagaaattcttgaaaaaccctatgttccatgggaacataaagttattatagtgcctcctaaggggttaatataaatcaaggaggaagtttatatttaaggaagaattggagtgacgtatcttagaaaaggaaaggctgatgtttccatatagcttgctctccaccaggcctatcatttttctttttagagacaaacgtgacaggctagtcttgtctctctcatatgctaggtagcaaatggggtgatatttttatagaagtgggcaaaaattattttctcaattttactgagtaggcacagaagaaaagtacagataggctgatggttattgccttattttgactgcatttctcttaaatggatcatttaaattagttcttcaagtaacagtttactggttgttccattcctgaatatgcaggctaatttgtacagatagggattaaggaatacagactattagagaagatccttatatttacatctagtatatatgtggtaaggaaatgccgattcttcattataaacaagttttaaaattgttctttcttagttcaaatgatagcaatacccctatagcattaggtagaaacaaattattcattacatcgtaaatctctttactatgtcctagctctgtcctgctacctaaaggatataaagaaatattattgctctagaatgtattactttgttctcccatgaaagaattcagtttgttagtacctatatttttaaactggtgaaactgacccaaatatgtaataaataccatagtagctcagacccaaggagatatttttctaaaatcagttttcgttaaagtacttctacttccgttattggatatggtatctcctaaagtgtaaaaaaaatctgttactatatagtgataaaccatctgctcatcgtaagtgtaaggcttaacaaataagtaatacatgctatatttattcaagtgtctattgcttaattgttaattgtgagcagatttattgaatgcctattctattttctgcagtttacaatacaataactctttgagtaagttgaagtttaattgtgcaacaaatttgtattagagtacaatttaaagtgtttttctctatagccttttttgactggggaagcaaggggtaatgttaattagtacactttgttcttgtactagctatgtttctataagatatggtgccctgtgtatcccagagatgctagaaaactgttctttgctcctatttgtgggttctgtttttgtgggttttttttttttttgagaaaatgtacacaataaaacattccttgcttgtt

SEQ ID NO: 14817 - protein, 410 aa, Homo sapiens
MAAEIHSRPQSSRPVLLSKIEGHQDAVTAALLIPKEDGVITASEDRTIRVWLKRDSGQYWPSIYHTMASPCSAMAYHHDSRRIFVGQDNGAVMEFHVSEDFNKMNFIKTYPAHQNRVSAIIFSLATEWVISTGHDKCVSWMCTRSGNMLGRHFFTSWASCLQYDFDTQYAFVGDYSGQITLLKLEQNTCSVITTLKGHEGSVACLWWDPIQRLLFSGASDNSIIMWDIGGRKGRTLLLQGHHDKVQSLCYLQLTRQLVSCSSDGGIAVWNMDVSREEAPQWLESDSCQKCEQPFFWNIKQMWDTKTLGLRQHHCRKCGQAVCGKCSSKRSSYPVMGFEFQVRVCDSCYDSIKDEDRTSLATFHEGKHNISHMSMDIARGLMVTCGTDRIVKIWDMTPVVGCSLATGFSPH

SEQ ID NO: 14818 - DNA, 2441 bp, Homo sapiens
  CDS (231)..(2390)
gctttcccagctagtcgaatcactggtgcacctccggaatccgaggttcgcattgctctcggacagagttctgcctccccagtactcccaaactcccagtcctgtgcaccaatgaggtccagctctgaggcttctttcctgagaaaaaaatttggaagtccgtgactgtttcctggaggagctgagaagaggaagctcacttccggcgtagggaggctttctgacccggaatggaggaggcggaggagctgctcttggaggggaagaaggcgctgcaactcgcccgcgagccgcgcctgggcctggacttaggatggaacccttccggagaaggctgtacgcagggcctcaaagacgtcccacccgagccgacccgagacatcctcgctttaaagagccttccccggggcttggcccttggcccctcactcgccaaggaacagcgcttgggggtctggtgtgtcggggaccccctgcagcccggcctgctgtgggggccgctggaagaggagtctgcctccaaggagaagggcgagggagtaaagccacggcaggaggagaacctgtcattaggcccatggggagacgtgtgtgcctgtgagcagagttctggctggactagcttggtacaacggggcaggctggagagtgagggaaatgtggccccagtgcggatcagcgagaggcttcatctgcaagtgtaccagctggtgctgccaggctctgaactgctgctgtggccccagccttcctctgagggcccaagtctcacccagcctgggctggacaaagaggcagctgtagcagtggtgacagaagtggagtctgctgtacagcaggaagtggcctcccctggggaggatgcagcagaaccttgcatagatcctggttcccagtcaccctctggcatccaggcagagaatatggtgagccctggacttaagttcccaacccaggaccgaatttccaaggatagccagccacttggcccattgcttcaggatggcgacgtggatgaggaatgcccggcccaggcacagatgccacctgaacttcagagcaattcggctacccagcaggacccagatggcagtggagccagtttctcatcttctgccaggggcacccagccgcatggctacctggccaagaagttacacagccccagtgatcagtgcccacccagagcaaagaccccagagcctggagcccagcagtctggcttccctacactctcgcggagccctcctggcccagcaggaagctccccaaagcaggggcgacggtaccggtgtggagagtgtggcaaggcattcctacagctgtgccacctaaagaagcacgcatttgtgcacacgggccacaagccctttctttgcactgagtgtggcaagagctatagctcagaggagagcttcaaagcccatatgctgggccaccgtggggtgcggcccttcccctgtccacaatgcgacaaggcctatggcacccagcgagacctcaaagagcaccaggtggtacattcaggtgcccggccctttgcttgtgaccagtgtggcaaggcctttgcccgccggccctccctgcggctgcatcgcaagacccaccaggtgccagctgcccctgccccttgcccatgccctgtgtgtgggcggcccctggccaaccagggctccctgcggaaccatatgaggctccatacaggagaaaagcctttcctgtgcccgcactgtggccgggcgtttcgtcagcggggcaacctgcgtgggcatttgcggctccacaccggggagcgtccttaccgctgcccacactgtgccgatgccttcccccagctgcctgaactgcggcgccatctcatctcacacaccggggaggcccacttgtgcccggtgtgtggcaaggccctccgagacccacacacgctccgagctcacgagcgtctgcactccggagagaggccctttccctgtccccagtgtggccgtgcttacacgctggccaccaagctgcggcgccacctcaaatctcacttggaggacaagccctaccgctgccccacctgtggcatgggctacaccctcccgcagagcctcaggcggcatcagctcagtcaccggcctgaggcaccctgcagcccaccctctgtgccttctgctgcttctgagcccactgtggtgctcctgcaggctgagccacaactgctggacacacacagagaggaggaagtctcccccgccagggatgttgttgaggtcaccatttcagaaagccaggagaagtgctttgtggtgccagaggagccagatgccgcccccagcctggtgctaatccataaggacatgggcctcggcgcctgggcagaggtggtggaggtggagatgggcacctgacagctttgccttttgctgacacagctccataaagactcgtgctttctc

SEQ ID NO: 14819 - protein, 720 aa, Homo sapiens
MEEAEELLLEGKKALQLAREPRLGLDLGWNPSGEGCTQGLKDVPPEPTRDILALKSLPRGLALGPSLAKEQRLGVWCVGDPLQPGLLWGPLEEESASKEKGEGVKPRQEENLSLGPWGDVCACEQSSGWTSLVQRGRLESEGNVAPVRISERLHLQVYQLVLPGSELLLWPQPSSEGPSLTQPGLDKEAAVAVVTEVESAVQQEVASPGEDAAEPCIDPGSQSPSGIQAENMVSPGLKFPTQDRISKDSQPLGPLLQDGDVDEECPAQAQMPPELQSNSATQQDPDGSGASFSSSARGTQPHGYLAKKLHSPSDQCPPRAKTPEPGAQQSGFPTLSRSPPGPAGSSPKQGRRYRCGECGKAFLQLCHLKKHAFVHTGHKPFLCTECGKSYSSEESFKAHMLGHRGVRPFPCPQCDKAYGTQRDLKEHQVVHSGARPFACDQCGKAFARRPSLRLHRKTHQVPAAPAPCPCPVCGRPLANQGSLRNHMRLHTGEKPFLCPHCGRAFRQRGNLRGHLRLHTGERPYRCPHCADAFPQLPELRRHLISHTGEAHLCPVCGKALRDPHTLRAHERLHSGERPFPCPQCGRAYTLATKLRRHLKSHLEDKPYRCPTCGMGYTLPQSLRRHQLSHRPEAPCSPPSVPSAASEPTVVLLQAEPQLLDTHREEEVSPARDVVEVTISESQEKCFVVPEEPDAAPSLVLIHKDMGLGAWAEVVEVEMGT

SEQ ID NO: 14820 - DNA, 2719 bp, Homo sapiens
  CDS (7)..(2148)
tttacaatgggcatagaccttacaaaaccatttgaatacctttttgctactgggaatctgcgttctaaaacaggtcttggcctcctacaagattctggactttgtgttgtggctgacaagctgaacttcatacgctacctctcccatttccgctgcgtgcacagaggggctgattttgccaagatgaggaccaccacagtacgcaggctgctgccagagtcctggggcttcctttgtcccgtgcataccccagacggggagccctgtggcctgatgaaccacctaactgccgtatgtgaggttgtcacacagtttgtgtatacggcatctattccagctttactgtgcaacttgggggtcactcccattgatggagctccccaccgatcatacagtgagtgctaccctgtcctgctggacggtgtcatggttggctgggtggataaggatcttgctccaggcatcgcagattctcttcgtcattttaaggtgttgagagagaaaagaattcctccctggatggaagtggtccttatacccatgacaggaaaaccaagtctgtacccaggattgttcctttttaccactccttgtagactggtacggcctgtgcagaacttagcattgggcaaagaagagctaattggaactatggaacagatcttcatgaatgtcgctatctttgaggatgaagtttttgctggagttaccacacaccaggaactctttccacacagcctgctgagtgtgattgccaacttcatccctttctctgatcacaaccagagtccacggaacatgtaccaatgccagatgggtaagcaaactatgggctttccacttctcacttatcaagaccgatcggataacaaactgtatcgtcttcagactcctcagagtcccttggtgagaccctccatgtatgattattatgacatggataactatccaattgggaccaatgccatcgttgctgtgacttcttacactggctatgatatggaagatgccatgattgtgaataaggcctcttgggaacgaggctttgcccatggaagtgtctacaagtctgagttcatagacctctctgaaaaaattaaacaaggagatagtagcctggtgtttggcatcaaacctggtgacccacgcgttctgcagaagttagatgacgatggattgccgtttataggagcaaaactgcagtacggagatccgtattacagctacctcaacctcaacaccggggaaagttttgtgatgtactataagagtaaagaaaattgtgttgtggataacatcaaagtgtgcagtaatgacactgggagtggaaaattcaagtgtgtttgcatcactatgagagtgcctcggaacccaactatcggagataaatttgccagtcgccatgggcagaagggcattttaagcagattgtggccggctgaggacatgccttttactgagagtgggatggtcccagacattctgttcaatccccatggttttccatcccgcatgaccattgggatgttaattgagagtatggccgggaagtctgcagctttgcatggtctctgccatgatgctacacccttcatcttctcagaggagaactcggccttagaatactttggtgagatgttaaaggctgctggctacaatttctatggcaccgagaggttatatagtggcatcagtgggctagaactggaagcagacatcttcataggagtggtttattatcagcgcttacgccatatggtctcagacaaatttcaagtaaggacaactggagcccgagacagagtcaccaaccagcctattgggggaagaaatgtccagggtggaatccgttttggggagatggaacgggatgcgcttttagctcatggtacatcttttctccttcatgaccgcctcttcaactgctcagatcggtcggtagcccatgtgtgtgtgaagtgtggcagtttactctctccactgttggagaagccacccccttcttggtctgccatgcgcaacagaaaatacaactgtactctgtgtagtcgcagtgacactatcgatactgtttctgtgccttatgtttttcggtattttgtagctgaactggcagctatgaacatcaaagtgaaactggatgttgtttaacttgatgttgaccttttggattaagaggactatcagattaaagcaaaatgtaattttaattcaatgaagatatcattaccaggttactcttgagatttttcaacggtgttagaactctcaaccaagacctgaaaaccaagtatgcaaggtttctgaatctctctggtagattaactattgacaatgattttctgttatctttgttcaaaaagttcatgtcttctcaaaatatgaaatattgataaatggaagagcatacggtgacaagtctcctttccaaccccaggttccctacaccctgctctcagcaggcagtgagtgtcacacacctgttaatccatcttgagcaggacagtactatacaaatagaatgcaagctgtaatgtaattttatattttcttatagccacgttgaagtaaaaacaaacaggtacagtgttttttaccagctttatagaagtacagttgttacatatttaatgaatacaatttgatgggtctgactatatgcacacacctttgataccatcaccacaatcagggtaataaacatacctgtcatctccac

SEQ ID NO: 14821 - protein, 714 aa, Homo sapiens [sequence omitted]

SEQ ID NO: 14822 - DNA, 2582 bp, Homo sapiens
acaatgaatggaggtaattgatttagtctgattccttcctgaaatctaaatattagcacaatagtttctgaaattttacaatgttaaattatgatctaattcatgagaaaccacgggtttaacatagggattcaaaaaaacaaaaacaaaagaataggaataaataacccttaattgtatattggactagttcagcccttaaacagctttacctttatttaggaatgtacattttaggtattatcttgatcatggagcttagatttaatttagatagcaaaaataaagatttgtatttcttttccaatagctaaaagttacataacactaatacttataacctatcaatatcagatattaatgactttgtagtgttgtaaaattttgaggaattttggagtctttatcataggtaacctggaccacagttactatttattgacaatgtgattgagtgtatggaggaaagcacagtggatgctaggctttgtaaatatggggatgtagaaaagcagatagttcagtgtctacctttttctagaactaccttgaaccttaaattttaagtcatgttcattgctagaaaattaaatgtacttattaaaaccaatgaaaaagcacatttctgaaatgaagttagagataatctttgtgtcttataaaaagacattaataaaaatctgaaagggccgggcgcagtggctcacgcctgtaatcccaacattttgggaggccaaggtgggcggatcatctgaggccaggagttcgagaccagcctggccagcatggtgaaaccctgtctctactaaaaatacaaaaaatcagcctggcatggtggtgcgtgcctgtagtcccagctactcagggctgaggcaggagaattgcttgaacccggcaggcagaggttgcagtgagccgagatcgccctgctgcactccagcctgggtgacagagggagactccgtctcaaaaaaaaaaaagtctgagagtagctaagaatttatgtaaaagcaatcagagtttttaatttatgggaaccaaataaaactataacctcatagtgtttataagaactcagaaataatatttatttaactttattatgaggccacacatattttcctgtgtttctatatatggtttggaaaactatccttaatagtctgttttatatgccttatatttaaaagtttgttttagttattttgaaagactattgctgctgcaaatagttgtgtgctttacattctaagcttcagtacatttatttaagagcatcataatctgacctgagcatccacttggagagtgttttttttgtgtgtggtctggggtgacaaaagaccacaaaaatgtgtggtctggattttttcaactatgtcattaactttatgatccaagaccagttataggatgaatctgtatgtaaaaatagagtcttatttatggaaggaattattctaagggaaaaatccagggtcaagctgtatcttttatgtcctttatattgcatgtctatttctgttacacaatttgttatttcttcaaatttcctatggtagcatgataaatcatcaaagaacctgtttgggatataaaactctgatagaaaatatttaatgagtatcttgattataacctagaatatgtatacgttagtaaaataaccagatatactacagaactctctattggctcaaacaggttgacctcaatccaagtttactcttgatatcactctgttggctgaaggaggtaactcaaacctcagggtttgtttttcccgggacagatagtagtgatagtgcattatatttgaataagaaaaacaaaccagtataccttgagaaattttaaaaagcatagttgaggcatattttttcataattatatacccatctgtttattgcccatggaaaatatatgtgtagaagtatttcttctgttatttgttactatcttcttaatttgttccaaagaaaatgctgccatactgcattccctctggaaggaaacaaaacaaaacaaaactcactcaaaaccagcagtgctgctatcagataagtagatgtcaatgtatacttacaaggaaaaactaaaaaatgtaatgtgttaattcagcctttttctatgtaatatttccaagtcagactttcttacattcctggaatttactttgagataccaagaataataatgataaaatgtttgctttgattactgtggggggaaagatgaaatgttcaattgtattaaaacaaacaagcttttcagagatactggtttcctgcccttgaagggtataaagaatttagatcatgcctgtaatcccagtactttgggaggccgaggcaggtggatcacctgagatcaggagttcgagaccagcctggccaacatggcaaaaccctgtctctactaaaaatacaataattagccaggcatggtggcgggcacctgtcatcccagctacttgggaggctgaggcaggagaatcgcttgaacccaggaggcagtgattgcagtgagctgagatagcaccactgcatgcaagcctgggcaatagagcgagactccgtctc

SEQ ID NO: 14823 - DNA, 2497 bp, Homo sapiens
gcagaccacgttagaacctcggctcctggagtagcagaacctcggcttcaatgggaccctcatttcataaatgaagaaactgagattcaaagaggggaactaccgaaggttacagagcgagttcgtggatggggaaactgagcctcacatgtatgaattccagcatataagcaacagactccagatttggacatgtatatcttattccaggcttcccagatgaccaccaaggtggaagggatgatgatgtccaggcagaagggagctaggccggcccaggcttttcctctaggcacagcggactccaggttcagccttcccggatggtaatgttgcattctgaagagctactttcccgccaactcatctctggacttctctggggcccaactctggtttcctgcctgcaggaggtcccctctgacttccgacagtagatgacccttctgactcacagttctactgctgggaaatgcctccagagctgctgcccaccctctctgcatccctccaggtcactgggtgttgagtcaggggaagcagggatacacacgggcgggaaactcaggtctcctaaatgtcagagcctcaggacttcggctactcagaagtagctccctcctgggccaccagggagcagcagggcagccagcatccagacatcccccctgggttctgctgctcagaggctagatggagaaccaaggtgggaaaaaggcttaaaccacagcgtggggagatttaggttagatgggtcagaggaagtttaggacaagccttgcccttttcagtttctgtccagcttcagcacagccactgcttcctctctttggtttttacccatccccctctctcccatcacctctatccccttccagctttcctttccttccctccttcccaaaccccagagtttctcaggattagctgcccgtgtgcctatctcccccacccccatgctttcctcactgcctcacagaaacaggcaaacacacacacatgcatacaaccatgagctggccctgagagttctctgactggactggggttggagccccagctcttgtcctgagctgaggcccttcccccaggtatcttggggcttccatcatttctcttgacaggagctgtgggcgtctgggcagatgggaacctgggggaggtgtggggagccctctctgaggcaggaagctcccacgctactgtagttaaaataatccggcagcaacttggggcagccatctgggatgcccagatcttccaggacacccagctctcaacaacaaccctataggaacaaatcaaaaacctaagagatacttataggccctggaaatgtctcccaaaagtggcctgaacttgagccctgtttccttttatcctcttcaggttagcactgggcattggcatttgcaaaaaaactctaagcattaagcaaaacttgtaggagtggaagatacagcgttctggacctccagtcctaatacccagccacaccccagcagctatgcatggttccatgggagagcaggcatagcccatcctgctggcatatagtccagccatatcttccaatgcccacctggagactaagccgagttctgcccagcaacaggagctcagagctccagagagcctctcctggggtgcagactcaggagatcttagctcaggagcagacttagcctgacttcctcttttataggaggagacagacttagttacagaggaaaccagagttgttataaatagcaaggaagggagaaacctgctatggattacaaacacgccatcaatcttaaaacaaactatttttagtttcaaataataacgagagtctaattaatgctctgtataacttcaaatgtgggatctttatctgcctttctactttgtgatgctttctaatacagtattagggccaaaggcaggaagagatgtgggcaattctcaatgttaccaaatcctagatatggaaagaacctgagaaatttagtccagccctttcattttcagtgaagaaactcaggcccagagaggtaaaaggacttgtccaaagttgcatagtaaggtagggactgagcagtgactaaaagcctagtccctgtactccagaagcaggacagtttccacagcagcacaatagaacccaaaggctaaacatctgtggttgggcagttggtgagtttatagcctggataaaagtcaggtctaagccaggtgtggaggctcacgcctgtaatcccagcactttgggaggctaaggcaggtgaatcacttgaggccaggagtttgagaccaacctggccaacatggcaaaacctcatctctactaaaaagtacaaaaattagccagatgtgacggcacatgcctgtaatcccagctactcaggaggctgaggcacgagaatcggttgaacccgggaggtggagatttcagtgagccgagatcgcactactgcacttcaacctgggggacaaagcaagactctgtctc

SEQ ID NO: 14824 - DNA, 2540 bp, Homo sapiens
  CDS (41)..(358)
atatcagcttccagtgtattgcttggcaccgccaatcaacatgatagaggaaaagagcgacatagagactctggatattcctgagccaccacccaattctggatatgaatgtcagcttcgtttgcgcctttccacaggcaaagacctcaagcttgtggttcgcagcacagacacagtattccacatgaagagacggttgcatgcagcagagggagtggaaccaggtagtcagcggtggtttttttctggcagacctctcactgacaaaatgaagttcgaagagctgaagatcccaaaggactatgttgtacaggttatagtgagccaacctgtgcagaacccaacaccagtggagaactgaactgagccctgttggccagctcccacatccctctgctcctttttatggttcttgttgtcatttcctactctgcggcgtgaaatctatttcactgctctaaattccctatgaatggatttagttctgaggaattaccagtgaaaaattccatctgtgatggagaccaacaaaaataataaaacacaaagagccaggctttgagactcatgtaattacaatttctaatttgaaaggcagttaagaaatagataaccatttattttagaacactcaacaactatgtaatggctatatttcagtgacttggactgtaaatgaaacattgcatccatgaaggacagcaccaagcacctttttgaatacagaatttttttagaaaaatatatcaaattatataatttccagaaaccataaataatggatataaaacttaacctttttgttttgttttgttttgttttgttttgttttgttttggttaatggaaactgaaaagagcagtatttgaggttgcttctattctggttttttattcttagctcaattaatatttagccataaatgagtagagactggcaaattgtgctttagtgttgctttcctcatccccacatcttgagctccttatttacattcacactaaattttggtgccttccagcacattagtggcaggcacccttctggaacactaggcaataatttcatcaatacagtcaggtctcttgagtttcaacagatactcagttgaaaagtcgctgtcatcttgctgcataagtattttgaaaggtctgtataacgaagccatttttatatccaggcttagaaggtcactactatatagtaccttcattgatctatctattctgcttggaacttttcatagctaagtataacccccaaatgcatggttcctgggtcaggagacaccaaaatcaattatagctgttcccactcaagttaataaagtaaatgatttcctccactttgcatggaggggtgtaaggaaagcctattttatctgtgcctgggagaactgtgcctattttcagtcttttagaggaaatttcaactcaaaatttttaagtgtgaaaggtttactggtgtcacataaacattagcagtgagaccaaataatgaaacattgctttataccttagtgctttccagttcactgttacctctagtcatggtagatgacaattttcctccctcatcttttgtagcaaagaagcaaattaagagccttttgcaagttagattaggggactgaaaaatccagggagataacctgattcttctatactatgactggagtaaagctgccaagagttaggttgaatttggagccttttaaaagttggttccataagtgagaaggggggctaacatgtgaccactgtgcccctgagaatccatgagatggaaaagtacagacaagaaggcacttaacgctgttctcagttggaaaatgtcagccctccacacctgtttggatgtgaagtgcattattaattttaatgacaaaatgaaactgctaattagtttaaatgtaatgtttaaatggtattgaatttcctattgcctgattaaatatatctgtaattgtaacatcatgtttctgagagctttaactacttccttatttttatgcaatcattttaaagattgtggctatatctaatttaaatttgctgatgattgaatctaaattcaagtgaagaccacagcattaatcccaaaggagattttttttatgtttagaggtggagatattagggtaaatcagtatattgctcctgtcatcaaagtttttgttcatttgtgtgccacatcgaatagcagcacttctcaaagtttgtcaactggaaaaaagtgtttaaaactgtttttttcttaagcagatttggtgatgtcatcaatatctatgatatcgattggtaaaaggtctttctttgttgaggatttgagctctctttttaagagtttattttattttaaaggaacatatgctttgaataacaattctctgggcatgtttaactaacctaggtgggaaaaccatggtgctgtttaattgtaaatagattgatataagattggaccagtacttgatgtgtataattttagtatgtagggtttatgtgctttttttaaaaaaaaaaaaaaggttcaatttt

SEQ ID NO: 14825 - protein, 106 aa, Homo sapiens
MIEEKSDIETLDIPEPPPNSGYECQLRLRLSTGKDLKLVVRSTDTVFHMKRRLHAAEGVEPGSQRWFFSGRPLTDKMKFEELKIPKDYVVQVIVSQPVQNPTPVEN

SEQ ID NO: 14826 - DNA, 2327 bp, Homo sapiens
  CDS (292)..(1467)
gttgaaggcgagagcttgcttggcccgtgtcgcttctgtcccaagaaccggacggagagtgagggcacgagggtcgctgtcgggggctgtcgtcttccacgtacacgtcgtcgtgaggagcgcagtccggactcttcccgcaacccctccggctccctttccgcacgcctcgaggcggcggcggccaccgagacagcagcgcaccttcccccatcccttccccttatcccccagcccaaaagggcccggtctgcgccccacccccgcccgtccgcccgctacgccgccgccatgtcggcgcaggcccagatgcgcgcgatgctggaccagttgatgggcacctcccgggacggagatacaactcgtcaacgaatcaaattcagtgatgacagagtatgcaagagtcaccttctcaactgttgtcctcatgatgtcctttctggaactagaatggatcttggagaatgtctgaaagtccatgacctggctttaagagcggattatgaaattgcatccaaagaacaagattttttctttgaacttgatgccatggatcatctgcagtcattcattgcagattgtgatcgtagaacagaagtggccaagaaaagattagcagaaactcaagaagagattagtgctgaagtagcagcaaaggcagaacgtgttcatgagttaaatgaagaaattggtaaattgttagccaaggtggaacaactaggagctgaagggaatgtggaggaatcccagaaagtaatggatgaagtagagaaagcacgggcaaagaaaagagaagcagaggaagtttatcggaattctatgccagcttccagttttcagcagcagaaacttcgagtctgtgaagtctgctctgcctatttaggacttcatgataatgacagacgactggctgatcattttgggggtaaactgcacctgggatttattgaaataagagagaagcttgaagaattaaagagagtcgtagctgagaagcaggagaaaagaaaccaggaacggctgaaacgaagagaagagagagagagagaagaaagggagaagctgaggaggtcccgatcacacagcaagaatccaaaaagatccaggtccagagagcatcgcagacatcgatctcgctccatgtcacgtgaacgcaagaggagaactcgatccaaatctcgggagaaacgccatcgccacaggtcccgctccagcagccgtagccgcagccgtagccaccagagaagtcggcacagttctagagataggagcagagaacgatccaagaggagatcctcaaaagaaagattcagagaccaagacttagcatcatgtgacagagacaggagttcaagagacagatcacctcgtgacagagatcggaaagataagaagcggtcctatgagagtgctaatggcagatcagaagacaggaggagctctgaagagcgcgaagcaggggagatctaactagctgtgtacatttcttcagtccttaagcttcctacggagttacgtactattgtttagttcacagctgttcagggtgacagtgagcagatccagacaccagatccagctaggctagatgtacagtatctaacttgatctgaactgaacctgttttccttgatgatgcctaaaactacatccatagtttctggtgaacctgtaatacagttctgaaagtacagttttatataataagatgctgatctctttattctttcaagtaagagtgctagtgaacaaattgtgttacttgccttgggattttttgaacgtttgtaaaatgctgtcttcctagtccaaacagctgcagctttgggcatttttctttttaattattcttcctctgactttgtatcccttaatacctacactctccaattgtaagagaaagggggcagggaagcaatatagcttccattctaaggctgtattcccgttatgaattactagctgattacagttcagagcattgatcctggaatgtgtgctggagaaatttaaaatactggggttttttgtttaatggtgcctatttagagttggaagttgaacagctgttgcattacatacttttgcttttttattgaaattttgaaatcaaacgtcttgatttttctgttctgttgaattgctatgttcaggatgttctagggggtgggggcagggactcttttcgtaataagcacttgttttattttgtgtgtgtggagtataaaggctacacccttattgtaaaaaaataataataataaaatgaaagaaacaatcaccaccaccattattaaactgtaacttgtctagtaaattgtcactag

SEQ ID NO: 14827 - protein, 392 aa, Homo sapiens; identical to SEQ ID NO: 11735

SEQ ID NO: 14828 - DNA, 2097 bp, Homo sapiens
  CDS (115)..(1716)
cccgacgctatctcgcgctcgtgtgcaggcccggctcggctcctggtccccggtgcgagggttaacgcgaggccccggcctcggtccccggactaggccgtgaccccgggtgccatgaagcaggagggctcggcgcggcgccgcggcgcggacaaggcgaaaccgccgcccggcggaggagaacaagaacccccaccgccgccggccccccaggatgtggagatgaaagaggaggcagcgacgggtggcgggtcgacgggggaggcagacggcaagacggcggcggcagcggctgagcactcccagcgagagctggacacagtcaccttggaggacatcaaggagcacgtgaaacagctagagaaagcggtttcaggcaaggagccgagattcgtgctgcgggccctgcggatgctgccttccacatcacgccgcctcaaccactatgttctgtataaggctgtgcagggcttcttcacttcaaataatgccactcgagactttttgctccccttcctggaagagcccatggacacagaggctgatttacagttccgtccccgcacgggaaaagctgcgtcgacacccctcctgcctgaagtggaagcctatctccaactcctcgtggtcatcttcatgatgaacagcaagcgctacaaagaggcacagaagatctctgatgatctgatgcagaagatcagtactcagaaccgccgggccctagaccttgtagccgcaaagtgttactattatcacgcccgggtctatgagttcctggacaagctggatgtggtgcgcagcttcttgcatgctcggctccggacagctacgcttcggcatgacgcagacgggcaggccaccctgttgaacctcctgctgcggaattacctacactacagcttgtacgaccaggctgagaagctggtgtccaagtctgtgttcccagagcaggccaacaacaatgagtgggccaggtacctctactacacagggcgaatcaaagccatccagctggagtactcagaggcccggagaacgatgaccaacgcccttcgcaaggcccctcagcacacagctgtcggcttcaaacagacggtgcacaagcttctcatcgtggtggagctgttgctgggggagatccctgaccggctgcagttccgccagccctccctcaagcgctcactcatgccctatttccttctgactcaagctgtcaggacaggaaacctagccaagttcaaccaggtcctggatcagtttggggagaagtttcaagcagatgggacctacaccctaattatccggctgcggcacaacgtgattaagacaggtgtacgcatgatcagcctctcctattcccgaatctccttggctgacatcgcccagaagctgcagttggatagccccgaagatgcagagttcattgttgccaaggccatccgggatggtgtcattgaggccagcatcaaccacgagaagggctatgtccaatccaaggagatgattgacatctattccacccgagagccccagctagccttccaccagcgcatctccttctgcctagatatccacaacatgtctgtcaaggccatgaggtttcctcccaaatcgtacaacaaggacttggagtctgcagaggaacggcgtgagcgagaacagcaggacttggagtttgccaaggagatggcagaagatgatgatgacagcttcccttgagctggggggctggggaggggtagggggaatggggacaggcactttcccccttgggggtcccctgcccagggcactgtccccattttcccacacacagctcatatgctgcattcgtgcagggggtgggggtgctgggagccagccaccctgacctcccccagggctcctccccagccggtgacttactgtacagcaggcaggagggtgggcaggcaacctccccgggcagggtcctggccagcagtgtgggagcaggaggggaaggatagttctgtgtactcctttagggagtgggggactagaactgggatgtcttggcttgtatgttttttgaagcttcgattatgatttttaaacaataaaaagttctccacagtg

SEQ ID NO: 14829 - protein, 534 aa, Homo sapiens
MKQEGSARRRGADKAKPPPGGGEQEPPPPPAPQDVEMKEEAATGGGSTGEADGKTAAAAAEHSQRELDTVTLEDIKEHVKQLEKAVSGKEPRFVLRALRMLPSTSRRLNHYVLYKAVQGFFTSNNATRDFLLPFLEEPMDTEADLQFRPRTGKAASTPLLPEVEAYLQLLVVIFMMNSKRYKEAQKISDDLMQKISTQNRRALDLVAAKCYYYHARVYEFLDKLDVVRSFLHARLRTATLRHDADGQATLLNLLLRNYLHYSLYDQAEKLVSKSVFPEQANNNEWARYLYYTGRIKAIQLEYSEARRTMTNALRKAPQHTAVGFKQTVHKLLIVVELLLGEIPDRLQFRQPSLKRSLMPYFLLTQAVRTGNLAKFNQVLDQFGEKFQADGTYTLIIRLRHNVIKTGVRMISLSYSRISLADIAQKLQLDSPEDAEFIVAKAIRDGVIEASINHEKGYVQSKEMIDIYSTREPQLAFHQRISFCLDIHNMSVKAMRFPPKSYNKDLESAEERREREQQDLEFAKEMAEDDDDSFP

SEQ ID NO: 14830 - DNA, 2280 bp, Homo sapiens
gaaaaatgtgtgcaaagaaatgatggcccctgaggacagactctgggcgatcacagtcacctgtgaaggttttatgaagatgaaatctgatgaaaatgcaagccttcagcaaaccataaaaccctgtatcaaggttagagagaaggaaaagccttccttactgaagctctttcgggacaacacggccattccaacctctagtgactctacgtaggtgtaaacttttttgtgggcattcaaagaaacactcagcatccttcccataaatatatttattaacttctacaagcaatctaatttccttaattacaagcctaatttaatttccctttaagcctttttgttaattttctttggagatttttcacgtctttcatttatttatttggagacagagtctcgctctttttcatgtctttaattaattaattaatttattttgagacggagtcttcactgtgtcactcaggctggagtgcagtggcgcaatcacggctcactgcaacctctgcctcccaggtccaagtgattcttctgcctcagcctctcaagtagctggaattacaggcatgtgccaccacgccccgctaaattttgtatattttttagtagagacagggtttcaccatattggccaggctggtctcaaactcctgatctcaggtgatcccctgcctcagcctcctgaagtgttgggattacaggcatgagccaccgcgcccgaccttcatgtcttttaaaaagtttgccaaagtttgattgacaattaccaaagtctgatgagctattctaggcaaaattttttgctaaacgtccatccaatttagaaaccacaggaaagattgttttacgcctggtatcttatattcatttcaggatatccgagtaacatggggtccctttttaccccaaatatctctaataaagcacatttctattgtacctgtgttctaccatgatcttaggtatctccatttgtttttgtctctagactgcaattcctacatcctatatttgtattgttaatttttcatctctaagtgtatcaccaagatgaatgccaatatgctaccacctaactctggttataagtgctaacccaggttatccaccaatataataaaaagttcaaagtttcataatttaataaagagaatgtcccttagatgtcagatcaaaacatcttctaaactgtaagcttacttaatgatctctataaggatagaattcatctattgcatcatcttaaatatttactaccctgccaatgctaatcctccacaccccaaaacacagagcttttagcactcaatatacagaacaatgttttgtatacggtacacaatgctcaatacacatttgttggatgaaataatattttatattttctaaatgctaaacctataccacgtaagaatataacacacgtttgctaggcttaaaatcattaattaaaatgccattttctactgattttggtaaaggaaaatgaaatactaacctacatgttgaagtgtttgctttagaacaacaatgcaatttagccccatcgaggcctgtagagggaggagggtgtacagtgactccagggtgaacagattgtgagctttcaagaaaacattgccaaagaggatcttgaggcaagggctgggtcttacaaccctcgatgagaccatcaacaatctccatttccgttttcttggacatcaggattctcttgcaggcattttggcaagcatggtcttcagctctgtcacagcaatataaacctacattttcagaatataagtggcttaattagctgttttttttgtttgtttttattgtactttaagttctgggatacatgtgcagaatgtgcagatttgttacataggtatacacatgccatggtggtttgctgaacccatcaacctgtcatctacattaggtatttctcctaatgctatccctcccctagcccccaactccctgacaggccctggtgtgtgatgttcccctccctgtgtccatgtgttctcatagttcaactcccacttatgagtgagaacatgcagtattttgttttctgttcttgtgttagtttgctgagaatgatggtttccagcttcatccatgtccctgcaaaggacatgaactcatccttttttatggctgcatagtattccacggtgtagatgtgccacattttctttattcagtctgtcactgatgggcatttgggttggttctaagtctttgctactgtgaatagtgctgcaataaacatatgtgtgcatg

SEQ ID NO: 14831 - DNA, 2686 bp, Homo sapiens
  CDS (97)..(2223)
tgacctgaggaagaagagcaagtaatacatgaagatgatgaaagaccttctgagaaaaatgaattttctagacgaaaacgttctaaatcagaagacatggacaatgtacagtctaaacgtcgtcgatatatggaagaagaatatgaggcagaatttcaagtaaagattacagccaaaggagacattaaccagaaacttcaaaaggttatacagtggttgctggaagaaaaattgtgtgcgctgcagtgtgctgtatttgataagactttggcagaattgaaaacacgagtggaaaagattgaatgtaacaagaggcataaaacagttctcactgaactacaggccaagatagccaggttaaccaaacgctttgaagcagccaaagaaggtcttaagaaaagacatgaacatccacccaacccaccagtatcaccaggaaaaactgtaaatgatgtcaacagcaataataacatgtcttacagaaatgcaggcacagtgagacagatgctggagtccaaaagaaatgtaagcgagagtgcaccaccatcctttcaaactcctgtgaatacagtatcttcaaccaatcttgtcactcctccagcagttgtcagtagtcaacctaaattgcagactccagtgacttcgggttccctcacagcaacgtcagttcttcctgcacccaatacagctactgtagttgctactactcaggtgcctagtggaaatccccagcctacaatctctttacagcctttgccagtgattttgcatgtacctgttgcagtatcctcccagcctcagcttctacagagccatccagggactttggtgactaatcaaccatctggcaatgttgaattcatttctgtgcaaagcccacctacagtgagtggtcttaccaaaaatccagtatccttgccatccttgccaaatcccactaaaccaaacaacgttccttctgtgcccagtcctagtattcaaaggaaccctactgccagtgctgcaccattgggaacaacacttgctgtgcaggctgttccaacagcacactctattgtacaagccacaaggacttctttacccacagtgggcccatcaggactctatagtccatcaactaatcgaggtcctatacagatgaaaattccaatttctgcatttagtacttcgtctgctgcagaacagaacagcaataccaccccaagaattgaaaaccagacaaacaaaacaatagatgcttctgtcagtaagaaagcagctgatagcacatcacagtgtggaaaagccactggcagtgattcaagtggtgtcattgatctcacaatggatgatgaagagagtggagcttcacaagaccccaaaaaactaaatcacactcctgtatcaaccatgagttcttctcagcctgtgtcacgaccattgcaacccatacaaccagcaccgcctcttcaaccatctggggtgccaacaagtggaccatctcagaccaccatacacttactacctacagctccaactaccgtgaatgtaacacatcgtccagtaactcaggtgaccacaagactccctgtaccaagagctcctgcaaaccaccaggtggtttatacaactcttcctgcaccaccagctcaggctcccttgcgaggaactgttatgcaggctcctgctgttcggcaggtcaatccccaaaatagtgttacagttcgagtgcctcaaacaaccacatatgttgtaaacaatggactaaccctgggatcaacaggacctcagctcacagtgcatcaccgaccaccacaagtgcatactgagcccccacgccccgtgcacccagcacccttaccagaagctccacaaccacagcgtctgcccccagaagctgccagcacatctctgcctcagaagccacacttgaagttagcacgcgttcagagtcaaaatggcatagtactgtcatggagtgtcctggaggtggatcgaagctgtgccactgttgatagctaccatctctatgcttaccatgaggaacccagtgccactgtgccctcacaatggaaaaagattggggaagtcaaggcacttcccttgcccatggcatgtactctcacccagtttgtatctggtagcaaatactactttgcagtacgagccaaggatatttatggacgttttgggcctttctgtgatcctcagtcaacagatgtgatctcttctacccagagcagttaaaccttggagcctttatattttcctcttttaaaatttccaccttttggtcttgtttttaatcttgtgcatgataccccatgtaaaatccaccttgtgcaagatttcttggacagatgtgtgtatacactacatttgtttataaccagaagcaaaataaactcagcccacaaagctagaatcttttcctggacagtttaggctttggggtttggaaatgtaaatgtgtaccttgctttagttttgaggctggggaatatgtgtgggtgtttatgtgtgtttttccttatgtaggtgttattgcattggagtctcccattttcattctcaaatttacctcttaaagtacgaagtaagtagatcaaaggatttgagatgtgtaactggcatgattctgcttttgaaggatctatagtatcattttagttaagtgggtcaaacagaatcaaaacaaaacccaaag

SEQ ID NO: 14832 - protein, 709 aa, Homo sapiens [sequence omitted]

SEQ ID NO: 14833 - DNA, 3788 bp, Homo sapiens
  CDS (91)..(1062)
gaggaaataattaagcttattaaagacaaaagaaaggatgttagttttcgaaacattggcataataactcattacaaggcccagaagacgatgattcagaaggatttggacaaagagttcgatagaaaaggaccagcagaagtagacactgtggatgcattccagggtcggcagaaggattgtgttattgttacgtgtgtcagagcaaatagcatccaaggttcaattggattcctggcaagtttgcagagattgaatgtcaccatcacacgagccaagtacagcctcttcatcctcggacatttgaggaccctgatggaaaaccagcattggaatcagctgattcaggatgctcagaagcgtggtgccattattaagacctgtgacaaaaactatagacatgatgcagtgaagattctgaaactcaagcctgtgctgcagagaagtctcactcaccctcctaccatagccccagaggggtccagaccccagggtggtttgcccagcagcaagctagacagtggatttgccaagacatctgttgctgcttctctataccacacaccctctgactccaaggaaattactcttactgttacttcaaaggaccctgaaagacctcctgttcatgaccaacttcaggacccacgactgctgaagaggatgggcattgaggtcaaaggaggaatattcctttgggatccacaaccctcgagcccccagcatcctggagcaacacctcctacgggcgagccgggcctccctgtcgttcaccaggacctgagccatgtacagcagcccgctgctgtagtggctgctctgagcagccacaaacctcccgtgcggggcgaacctccagctgccagtcccgaggcttccacgtgtcagagcaaatgtgatgacccggaagaggagctctgtcacaggagagaggccagggctttcagtgaaggggagcaggagaagtgtggttccgagacccatcacaccaggaggaactctaggtgggacaagaggacactggagcaggaggacagcagttccaagaaaagaaagcttttataggaaagcccagtgacatgggccagcagccacagcatattgtaaactgaagatgaccagctcgtgggaccatctagataagcttgttttttgtaaggagtttgtgtgctgttggaaaacatggaaaatgcatccttaacacctgagcctctggtcatcttcagtattttctgtcatttgcaaaagctttcagagggcattgtgtatccgtaataatgtccttgaagtcagagactggaaatgttgatctcttagtcttctatagacaaggaggtcagactggagtgaatgttgtaaaagttgaaatgtatatttgtatagcaaataacaaaatccctttaaaatttaatctagtagaccgcttttctttccccctgtttaaaatgttaatcagttttcaacagaacaaactttatattaccaaaaaaaaaaatgggaggagggcgggtcctttcaaccattgttagagcaagacagataattatttaacagcctagcttggaataagctgagttagtgctggtgggtcaggtgtctctggctctattaaaaaaagcaaaaacccccccaaaaacctggagtctcctaggggacactttgggcagcacggttatgttaggtaaagtcttgctgacatggtgcatttttagatagagtgcattggcccagggtattatatttctgtgatgagttcatttacctgtttcagtatgcacatagttccctagctaaaattcctaatcttcttgagagagaagaatatggagtgaaagaataattcttgagctatcattcaaatgctcccagcatattgtgagccttgtgtgactggtgaggtacagacatttggttgccaaatgctagattagcgctgggtcagctgtggaagaatcgcctcagcttacagattgtcagacagatctaactagttttccagaaagcctgggaagctgtgtgttcaacatttcccaagggattctgatcaccaggcagcttgggaaccactggggcaggccaaatagaatattttgggcgggaaagaagcacccgatttaaaatgaagcgtaaccagaggagttcagaactgggaagagagtggtagacttcctgtgatcttcagaaatcatctacctggtaaaaatacatgctgtttagaatacctgataggtgtttccagctactattagaggtgatagtgcttttgtgggggaaaaaattggtcatggtgaatggagatcgaggaagctcgggacaagggaggggtgggctgcctgattttgtccagttttccaaatatccacgcagtgaactggagtatcctaaacatgagaatgtacagttgacagttgtaaaaactagggatctgtagtgaatgctgtgcagccccatatctcatttgggggtaggaaaatagctgaagattcatgtgcattatttgacatttcctttgtcatctgctttttaagcaaaaaagggttttgtgttagaaattctacttgagcagattataaagagctttaaaaaacaactttcggttgccaaaagtttgagcatttgatttcattacctgtgtctccctcactggtgtccagacggtcaactgaatactcctgaaacccagggagcaggtgacttcctggagtgctttgtccccagagtcagccactgcttcctctgtgggggtggagagtttgtctttggccatgcagtgtgcgacagttcaggacgggtagggatgggtcccattctgtctgggtcaagggctctatcagcttcttccatgtgcctttgggaagaaatctcgttactttaagtttgctttcctgttatcttgatgaagtgcccattttagcagacacttgtagtgctgaccacttagggaatgtacaaactcctaagcttctaaagggaggcatggcaaaaacgttggggtcaggatgtctctcacgctgctcatgttaatactattaacacatgatttgagaaataagttttctctaaaatgcatattttgccgccacacactgaacaatattatttccagtgaagtttgatgcctgttcttacgttgtgttcacctgttggttcaccactcagcagatcggattctgcaagaattaatggtagaactagatcatcctttctaacagacgagcctgtgtcctgtgacggcctttcacagcggaatgcagttgtacctcacattacttttgaaacttcactcgttccagttggtacaagtatttgccaaagccatttcctgtgttcaccgtggcccctcctgatgtggctgtcagcgcagcgttgttgaacagggctattctttttacaaggtgtgaagtgtggctcttcgcttcgtctttgccatggcattaaaagaaagttccctgtcttctttcaatattagttatttcaaatgaatatgtgctacttaaaagcttgttttgtttctttgtatataatttgccttggatttattgtgcacagtttgttgagttgtatgtttttgtgaattatcaggagtaaatttgacaagtacatgtgaataacctcctgtaaatgaattttataacaaaaatgtactgaactattttttaaagttgtgcagattagcaattttttgctatagctttgacttttctatgctgtgaattaatagctgcgatttggcaaacagccctgttgtctttgttaaaccctaaattttaagaggaaatggcagaatt

SEQ ID NO: 14834 - protein, 324 aa, Homo sapiens [sequence omitted]

SEQ ID NO: 14835 - DNA, 2064 bp, Homo sapiens
  CDS (156)..(1274)
ctgttccaaaccacgtggacgcgtctgggctgctggaggcagcccgagccgccgccgtcggtgtcgccgccaccaccaccatcggagtcacgagtcccgcgtctgtccgaagtcgccgctctcgggctgctcacgtctcttcggagagcgcgcacatggcgactcaggcgtactccctcagctacgcagggtgcaacttcttgcgccaacgtctggtcctgtctaccctgagcgggcgccccgtcaaaatccgaaagattcgggccagagacgacaacccgggcctccgagattttgaagccagcttcataaggctattggacaaaataacgaatggttctcgaattgaaataaaccaaacaggaacaaccttatattatcagcctggcctcctgtatggtggatctgtggaacatgactgtagcgtccttcgtggcattgggtattacctggagagtcttctttgcttggctccatttatgaagcacccgttaaaaatagttctacgaggagtgaccaatgatcaggttgacccttcagttgatgttcttaaggcaacagcactccctttgttgaaacaatttgggattgatggtgaatcatttgaactgaatattgtgcgacggggaatgcctcccggaggaggaggcgaagtggttttctcatgtcctgtgaggaaggtcttgaagcccattcaactcacagatccaggaaaaatcaaacgtattagaggaatggcgtactctgtacgtgtgtcacctcagatggcgaaccggattgtggattctgcgaggagcatcctcaacaagttcatacctgatatctatatttacacagatcacatgaaaggagtcaactctgggaagtctccgggctttgggttgtcactggttgctgagaccaccagtggcaccttcctcagtgctgaactggcctccaacccccagggccagggagcagcagtacttccagaggaccttggcaggaactgtgcccggctgctgctggaggaaatctacaggggtggatgcgtagactcgaccaaccaaagcctggcgctactactcatgacccttggacagcaggatgtttccaaagtcctgctaggccctctctctccctacacgatagaatttttgcggcatttgaagagctttttccagattatgtttaaaattgaaaccaagccatgtggtgaagaactcaagggtggggataaagtgctgatgacctgtgttggcattggtttctccaaccttagcaagaccctcaagtgataaccatcacaagataaggccccagtgcctacagacaaagcagaagctgccacggacaccaatgggaccaagtccaaatggattaatccaggacagaatagccacttgcttaattttctgtgaagaaatatcaatatacaaataaaagacatccctgtagcatatggtttccagctgtttctccagtggcattgccattgcccaggaggggcccagtcaccatgagagctcccttgccttacctggaggaagaatgtgccttcaggccacagtcgtgctgctagaacagtctcatagctgcagttcagctgtgcttcctcagcctactatcataggcttcctcagccctctgtcatatggctgttttgcaaacctgtggagtctgttactgttctttctgcaaggactcacctccttgagccttggtttttgttgtagggattaaatgagataatatgagtggcagctcttcatgagtcctgcagtgctaagcaaatgtcagaaattggtgtattagactatttatctttgatcttctgaatggattgctgtcatggacacggacacggatcttcatctggttcattgtatttatatgtgagggatggatggctgcggggctccaagtaagttattgggatgttttttatattccaggtgtgctgtacattcttattttattttcacaacagctctgtgatgtaaatgctatctccatgagaaaattcataaagggtgttttgttcctttgaaatgtataatgtaaagacattaaatctcctcattt

SEQ ID NO: 14836 - protein, 373 aa, Homo sapiens
MATQAYSLSYAGCNFLRQRLVLSTLSGRPVKIRKIRARDDNPGLRDFEASFIRLLDKITNGSRIEINQTGTTLYYQPGLLYGGSVEHDCSVLRGIGYYLESLLCLAPFMKHPLKIVLRGVTNDQVDPSVDVLKATALPLLKQFGIDGESFELNIVRRGMPPGGGGEVVFSCPVRKVLKPIQLTDPGKIKRIRGMAYSVRVSPQMANRIVDSARSILNKFIPDIYIYTDHMKGVNSGKSPGFGLSLVAETTSGTFLSAELASNPQGQGAAVLPEDLGRNCARLLLEEIYRGGCVDSTNQSLALLLMTLGQQDVSKVLLGPLSPYTIEFLRHLKSFFQIMFKIETKPCGEELKGGDKVLMTCVGIGFSNLSKTLK

SEQ ID NO: 14837 - DNA, 3466 bp, Homo sapiens
  CDS (6)..(3278)
tttttatgtcggaatatgaagcaacaaatttattgatccgagctctgtgtcacttttatgatcaagatgaggaggaaggtctccaatctgatggtgttattgatgatgcatttgccttgtggctacaggactcaacacagacattgcaatgtattacagaactgttcagccattttcagcgttgtacagccagtgaagaaacagaccattcagatctcttgggaaccctgcacaatctttatttgattacttttaatcctgtgggaagatcagctgttggccatgtttttagtctggagaaaaatctccaaagtcttattactctaatggagtactattccaaagaagccttgggtgattccaaatctaagaagtcagtagcttataattacgcatgcatacttattttggtggtggttcagtcttccagtgatgttcaaatgctagaacaacatgcagcatctctcttgaagctttgtaaagcagatgaaaataatgctaaattgcaagaacttggcaagtggcttgaacctctgaaaaaccttagatttgaaattaactgcatcccaaacttaattgagtatgttaagcagaatatcgataacttgatgaccccagaaggagttggccttaccactgccttacgtgttctctgtaatgttgcatgcccaccacctcctgttgaaggtcaacagaaagatctgaaatggaatcttgccgttattcagcttttttctgctgaaggaatggacacgtttattcgagttctgcaaaaattgaacagtattctgactcagccttggaggctccatgtcaacatggggactacccttcacagagttactactatttcaatggctcgctgcacactcactcttcttaaaactatgttaacggaactcctgagaggtggatcctttgagtttaaggacatgcgtgttccttcagcgcttgttactttacatatgctcctgtgctctatccccctctcaggtcgtttggatagtgatgaacagaaaattcagaatgatatcattgatattttactgacttttacacaaggagttaatgaaaaactcacaatctcagaagagactctggccaataatacttggtctttaatgttaaaagaagttctttcttcaatcttgaaggttcctgaaggatttttttctggactcatactcctttcagagctgctgcctcttccattgcccatgcaaacaactcaggttattgagccacatgatatatcagtggcactcaacacccgaaaattgtggagcatgcaccttcatgttcaagcaaagttgctccaagaaatagttcgctctttctctggcacaacctgccagcccattcaacatatgttacggcgtatttgtgttcaattgtgtgaccttgcctcaccaactgcacttctgattatgagaactgtgttggatttgattgtagaagacttgcaaagcacttcagaagataaagaaaaacagtatactagccaaaccaccaggttgcttgctcttcttgatgctctggcttcacacaaagcttgtaaattagctattttgcatctaattaatggaactattaaaggtgatgaaagatatgcagagatattccaggatcttttagctttggtgcggtctcctggagacagtgttattcgccaacagtgtgttgaatatgtcacatccattttgcagtctctctgtgatcaggacattgcacttatcttaccaagctcttctgaaggttctatttctgaactggagcagctctccaattctctaccaaataaagaattgatgacctcaatctgtgactgtctgttggctacgctagctaactctgagagcagttacaactgtttactgacatgtgtcagaacaatgatgtttcttgcagagcatgattatggattatttcatttaaaaagttctttaaggaaaaacagtagtgctctgcatagtttactgaaacgagtggtcagcacatttagtaaggacacaggagagcttgcatcttcatttttagaatttatgagacaaattcttaactctgacacaattggatgctgtggagatgataatggtctcatggaagtagagggagctcatacatcacggacgatgagtattgatgctgcagagttaaaacagcttctacaaagcaaagaagaaagtccagaaaatttgttccttgaactagagaagcttgttttggaacattcaaaagatgatgacaatctggattctttgttggacagtgtagttggacttaagcagatgctggagtcatcaggtgaccctttacctctcagtgaccaggatgtagaaccagtactttcagctccagaatctcttcagaatctgtttaacaataggactgcctatgtgcttgctgatgtcatggatgatcagttgaaatctatgtggttcactccatttcaggctgaagagatagatacagatctggatttggtaaaggttgacttaattgaactctctgaaaaatgctgtagtgactttgatttgcactcagaattagagcgctcatttttgtcagaaccatcatctccaggaagaaccaagactactaaaggattcaaacttgggaagcacaagcatgagacctttataacgtcaagtggaaaatctgaatacattgaacctgccaaaagagctcatgttgtgccaccaccaagaggaaggggcaggggaggatttggacagggtatacgacctcatgatatttttcgtcagagaaaacagaacacaagtagaccaccatctatgcatgtggatgactttgttgctgctgaaagtaaagaagtggttcctcaagatggaatacctccaccaaaacggccactcaaagtatcacagaagatttcttcccgtggtgggttttcaggcaatagaggaggacggggtgctttccacagtcagaataggtttttcacaccacctgcttcaaaaggaaactacagtcgtcgggaaggaacaagaggctccagttggagtgctcagaatactcctcgaggaaattacaatgaaagtcgtggaggccagagcaattttaacagaggccctcttccaccattacgaccccttagttctacaggttaccgcccaagtcctcgggaccgtgcttctagaggtcgtgggggacttggaccttcctgggctagtgcaaatagcggcagtggaggctcaagaggaaagtttgttagtggaggcagtggtagaggtcgtcatgtacgctcctttacacgataaaaatccttttgggaacatcttaactgtatatgaacatttcacgaggacaataaaaataagacattgaaggaccaatttagacttagcagttatctggagacatctgagagaatatttttatctgaagaaagcagaatttgtttgatacctaacaagatttcaataaaaatccaaactttgtatgt

SEQ ID NO: 14838 - protein, 1091 aa, Homo sapiens [sequence omitted]

SEQ ID NO: 14839 - DNA, 2933 bp, Homo sapiens
  CDS (163)..(2028)
gggggctgctgggaaggccggcgggatggaggcggcgggaccggctcgcgggtgcgggtccgggtgaagcgggaggcagccagagtcggagccgggcccgagcaccaggcgcaggcccggcgcccgcctgcccgcaccctcgtcctcacagacgccacagccatggccatgatggtgtatccgcgggaggagaagctgagccaggatgagatcgtgctgggcaccaaggctgtcatccagggactggagactctgcgtggggagcatcgtgccctgctggctcctctggttgcacctgaggccggcgaagccgagcctggctcgcaggagcgctgcatcctcctgcgtcgctccctggaagccattgagcttgggctgggggaggcccaggtgatcttggcattgtcgagccacctgggggctgtagaatcagagaagcagaagctgcgggcgcaggtgcggcgtctggtgcaggagaaccagtggctgcgtgaggagctggcggggacacagcagaagctgcagcgcagtgagcaggccgtggcccagctcgaggaggagaagcagcacttgctgttcatgagccagatccgcaagttggatgaagacgcctcccctaacgaggagaagggggacgtccccaaagacacactggatgacctgttccccaatgaggatgagcagagcccagcccctagcccaggaggaggggatgtgtctggtcagcatgggggctacgagatcccggcccggctccgcaccctgcacaacctggtgatccaatacgcctcacagggccgctacgaggtagctgtgccactctgcaagcaggcactcgaagacctggagaagacgtcaggccacgaccaccctgacgttgccaccatgctgaacatcctggcactggtctatcgggatcagaacaagtacaaggaggctgcccacctgctcaatgatgctctggccatccgggagaaaacactgggcaaggaccacccagccgtggctgcgacactaaacaacctggcagtcctgtatggcaagaggggcaagtacaaggaggctgagccattgtgcaagcgggcactggagatccgggagaaggtcctgggcaagtttcacccagatgtggccaagcagctcagcaacctggccctgctgtgccagaaccagggcaaagctgaggaggtggaatattactatcggcgggcactggagatctatgctacacgcctcgggcccgatgatcccaatgtggccaagaccaagaacaacctggcttcctgctacctgaagcagggcaagtaccaggatgcggagaccttgtacaaggagatcctcacccgcgctcatgagaaagagtttggctctgtcaatggggacaacaagcccatctggatgcacgcagaggagcgggaggaaagcaaggataagcgccgggacagcgccccctatggggaatacggcagctggtacaaggcctgtaaagtagacagccccacagtcaacaccaccctgcgcagcttgggggccctataccggcgccagggcaagctggaagccgcgcacacactagaggactgtgccagccgtaaccgcaagcagggtttggaccccgcaagccagaccaaggtggtagaactgctgaaagatggcagtggcaggcggggagaccgccgcagcagccgagacatggctgggggtgccgggcctcggtctgagtctgacctcgaggacgtgggacctacagctgagtggaatggggatggcagtggctccttgaggcgcagcggttcctttgggaaactccgggatgccctgaggcgcagcagtgagatgctggtaaagaagctgcaggggggcaccccccaggagccccctaaccccaggatgaagcgggccagttccctcaacttcctcaacaagagcgtggaagagccgacccagcctggaggcacaggtctctctgacagccgcactctcagctccagctccatggacctctcccgacgaagctccctggtgggctaatgctgaaggggcagccagtcaccagagcgcccacctggcacacccccctcaccccagccctgcgcatgggcctgctgcttgtcccgcctgtctctcccacagcccctgtcttttctgttcaatctcagggtaaccttctcccttgtcatctcagcctgagccctggaggctgggcctgcccactccagctccatcccttatttattccttccagcagggccctcttccctaggttcgggccagcaggaggtgccggctggagtctccaccatagactcagtggcctggcctccccagaccccagagccaagaacactaagcactcgccggcccttcggcaccctcgccctccctcccgactcaacccggccgttgcttctgtatatagagaaataagttattggccgcgcgcctcccttcagtccacggtactacccgggcctcccctcgtccctcttctagtggtaccgcccaggccttaatcacccccattccgtgcggtggtatctcccaggctctacattctcgggagcggcgcctcccaagggggtcctgggaccttctcgcgctcctcctggcctctgagggatgcgtcctacccgcgccatcgccccgtggcccaggacggggacctccccttagtccgtcctcccaccgccgggccctgccccgcatcccggccttatgcactgcccctcccacccggccccgcccaggcacggccgaccccgccccgggcaccgcccaccgagccatcctgcctcgcctccccccacgcctgcagcttctcgcgaggggcggcgacggtcccctggtggcaggaggggctccccctgttgcgggtgaggcggctgctctctattttcagatgttgctgtagaaataaagacggtttaaatctg

SEQ ID NO: 14840 - protein, 622 aa, Homo sapiens [sequence omitted]

SEQ ID NO: 14841 - DNA, 3251 bp, Homo sapiens
  CDS (197)..(1888)
attaaatgattataaactaaggaaaaggaagacttttgaagataatataagaaaaaacaggactgtgattagtaactggataaaatacgcacaatgggaagaaagcctaaaggagattcaaagggctcgatccatatacgagcgtgctttagatgtagactaccgaaatattacactctggctgaaatacgcagaaatggaaatgaagaatcgccaagtcaaccatgctcgaaatatctgggaccgggccataacaacgctgcctcgagttaatcagttctggtacaagtacacgtacatggaggaaatgttgggaaacgttgccggtgcccggcaggtgtttgagcgctggatggagtggcagcctgaggagcaagcctggcactcctacatcaactttgagctgagatacaaagaggtggatcgggcccgcaccatttatgagcgatttgtcctcgtgcaccctgatgttaagaactggatcaagtatgcccgctttgaagaaaaacatgcttattttgcccatgcacggaaagtgtatgagagagctgtggaattctttggagatgaacatatggatgagcacctttatgttgcctttgccaagtttgaagaaaatcagaaagagtttgaaagggtacgagtgatttacaagtatgccctggacagaatttcaaaacaagatgcccaagaactctttaaaaattataccatctttgagaagaagtttggtgataggcggggtattgaagatatcattgtgagcaaacggagattccagtacgaagaagaagtgaaggcgaatccacacaattatgatgcatggtttgattacttgcgcttggtagaaagtgacgcagaagctgaagccgtgagagaagtctatgaaagggccattgccaatgtcccacccattcaggagaagaggcactggaagcgctacatttatctttggatcaactatgcactctatgaagaattggaggcaaaggatcctgagaggacaagacaggtgtatcaagcctctttggaactaattcctcacaaaaagttcacatttgccaaaatgtggatactgtatgcacagtttgaaatacgacagaagaatctgtcattagccagaagagcattgggaacttccataggcaaatgtccaaagaacaaattatttaaagtttacatagaattggagctacagcttcgagaatttgacagatgccggaagctttatgaaaagttcctggaatttggacctgaaaattgtacctcatggattaaattcgctgaattagagacaatccttggtgatattgacagagcacgggcaatctatgaattagccatcagtcagccacgtttagacatgccagaggtgctttggaaatcatatattgattttgaaattgagcaggaagaaacagaaagaacacgaaacctttaccggcggttgcttcaacggacgcagcatgtcaaggtatggatcagctttgctcagtttgagttgtcttcaggaaaagaaggaagtttgactaaatgcagacaaatttatgaagaagctaacaaaaccatgcgaaactgtgaagaaaaggaagagagacttatgctgctggaatcttggcgaagttttgaagaagaatttggaacagcttcagataaggagagagtagacaaactcatgccagagaaagtcaagaagagaagaaaggtccagactgatgatgggtctgatgcaggctgggaagaatactttgattacatctttccagaagatgctgccaaccaacctaacctcaaactcctggccatggccaaactgtggaagaaacagcagcaggaaaaggaggatgctgagcaccatccagatgaggacgtcgatgagagtgaatcctgatctttttttcatagacaaatgttttgttatttttataaattaattgtttggaactcttgtgactcctggaagttcttatatatttcaccagtaagaaattgattggtatctttgatggctactttttaagttattttttaaatgctcttgggttagctaggggtagggattgcaagtaaaggacttttttaactgctggatttgtttttccaactgagtccaaacttttctaatgtctgtccacatcatgcattaggaaatgtaattaaggtaacattctacagttacttttcatgtcatacccataaagatagtttatgcattcatctgaaatgtgtaactttttcatgtcttcagagtcacagacttgagttcatttcccagctctgccactcatgattatataacttaattttcattttcctcattcacaaaatgggccaatagtttgacagctcattttgaagattacattataaaaggaatatacctggtgggtgcatagtaagtgctcagtaaattgtttgttctaagccacttttaaaaatggtttcattccttgtagaattgaatgcgagtggattaataatttaccttactttcttactagtgtccagttatattgttttttagaacaacacttggaaaataatttgcagtgattatatttctgaacaaggttcagaaaacattgtttactaagaatttagtctaataatttcagttaggcgctcatcagttctccagagtggttgagtttgtaataccttgtttaaagaataatggcttgttcacgtgtgtgctatgaaaaatgatgtcccatgttcacataaatttgggaaattctggactaagacttaagtctcgttaatcaaatctctttatagttaggcttctgtatattatgtatctccagtagcaatgttgccatattatttatttcccaaacttagtggacaatggagtcatttctacctagagtaccagtaaacatctcccagtgtgctatagtagaaaatgtctactcctcactgctgacatgttaaacttactcttggtttagagcatgtgtagaaacacctaaggtagctctatgctaaataatgaagagtagcacaagaatgaatgtatttgctgatacgttgctcacattctcaagcaaaaattcaactgcattaaccgatctgagagttttcctttaacctggactgtgtttctcaagcacattttttctttgttcactgcccaaggactagaactgtatttttaaggttgttttcccctaaaaggacctttagtaagcaaatttattattaaatgtgcacatcttattcacccaagggaataaaagctacttcgt

SEQ ID NO: 14842 - protein, 564 aa, Homo sapiens
MEMKNRQVNHARNIWDRAITTLPRVNQFWYKYTYMEEMLGNVAGARQVFERWMEWQPEEQAWHSYINFELRYKEVDRARTIYERFVLVHPDVKNWIKYARFEEKHAYFAHARKVYERAVEFFGDEHMDEHLYVAFAKFEENQKEFERVRVIYKYALDRISKQDAQELFKNYTIFEKKFGDRRGIEDIIVSKRRFQYEEEVKANPHNYDAWFDYLRLVESDAEAEAVREVYERAIANVPPIQEKRHWKRYIYLWINYALYEELEAKDPERTRQVYQASLELIPHKKFTFAKMWILYAQFEIRQKNLSLARRALGTSIGKCPKNKLFKVYIELELQLREFDRCRKLYEKFLEFGPENCTSWIKFAELETILGDIDRARAIYELAISQPRLDMPEVLWKSYIDFEIEQEETERTRNLYRRLLQRTQHVKVWISFAQFELSSGKEGSLTKCRQIYEEANKTMRNCEEKEERLMLLESWRSFEEEFGTASDKERVDKLMPEKVKKRRKVQTDDGSDAGWEEYFDYIFPEDAANQPNLKLLAMAKLWKKQQQEKEDAEHHPDEDVDESES

SEQ ID NO: 14843 - DNA, 2518 bp, Homo sapiens
  CDS (1)..(2220)
atgaatgaacacttatcaagcctaattaaaaaaaaacgtaaatgtatgcagcccaaagattttaattttaaaacaccagaaaatgataagagatttcagaagaaatttgagaaaatggctaaagagctacaaaggcaaaaaacaaatctagatgatgatgtacctattctcttatttgaatctaatggttcattaatatatactcccacaattgaaattaatagtagtcaccacagcgcaatggagaagagattacaagagatgaaggagaaaagggaaaatctttcccccacctcttcccaaatgattcagcagtctcatgataatccaagtaactctctgtgtgaagcacctttgaacatttcacgtgatactttgtgttcagatgaatactttgctggtggcttacactcatcttttgatgatctttgtggaaactcaggatgtggaaatcaggaaaggaagttggaaggatccattaatgacattaaaagtgatgtgtgtatttcttcacttgtattgaaagcaaataatattcattcatcaccatctttcactcacctcgataaatcaagtcctcagaaatttctgagtaatctttcaaaggaagaaataaacttgcaaagaaatattgcaggtaaagtagtcacccctcaccaaaagcaggctgcaggtatgtctcaggagacgtttgaagagaagtatcgtttgtctcctaccttatcttcaacaaaaggccaccttttgatacattcaagacccaggagttcctcagtaaagagaaaaagagtatcacatggctcccattcacctccgaaggaaaaatgcaagagaaagaggagcaccaggagatctatcatgccgaggctgcagctgtgcaggtcggaaggcaggctgcagcacgtggcgggacctgccctggaggctcttagctgtggggagtcttcatatgatgactatttttcacctgataatcttaaggaaaggtattcagagaatcttcctcctgaatctcagctgccatcaagccctgctcagttgagctgcagaagtctttctaagaaggagagaacaagcatatttgaaatgtctgatttttcctgcgttggcaaaaaaaccagaacagttgacattaccaatttcacagcaaaaaccatctccagtcctcggaaaactggaaatggtgaaggccgtgcaacttcgagttgcgtgacttctgcccctgaagaagccctaaggtgttgtagacaggctgggaaagaagacgcatgcccagagggaaatggcttttcttacaccattgaggaccctgctcttccaaaaggacatgatgatgatttaactcctttggaaggaagccttgaagaaatgaaagaagcggttggtctgaaaagcacacagaacaaaggtaccacttccaaaatatcaaactcctctgaaggcgaagcccagagtgaacatgagccatgttttatagttgactgtaacatggagacgtctacagaagagaaggaaaacttacccggaggatacagtggaagtgttaaaaatagaccaacaaggcatgatgttttagatgactcatgtgacggctttaaggacctcatcaaacctcatgaggaattgaagaaaagtgggagaggcaaaaagccaacaagaacattagtcatgacaagcatgccatctgaaaagcagaatgtcgtcatccaggttgtggataaattgaaaggcttttcaattgcaccagacgtctgtgagaccacgactcacgtgctttccgggaagccacttcgcaccctgaatgtgctgctgggaattgcgcgtggctgctgggttctctcttatgattgggtgctatggtctttagaattgggtcactggatttctgaggagccgttcgaactgtctcaccacttccctgcagctcccctgtgccgaagtgagtgccacttgtctgcagggccgtaccgcggaaccctctttgccgaccagccagtgatgtttgtctcgcctgccagcagccccccagtggccaagctctgtgaactagtccacctgtgcggaggccgggtcagccaagtcccccgccaggccagcatcgtcatcgggccctacagcggaaagaagaaagcaacagtcaagtatctgtctgagaaatgggtcttagattccatcacccagcacaaggtctgtgcccctgaaaactacctattgtcacaatgacagtgacctcactggcctgtggtgactgcacacagctcgcaaaactgtctttggatgttcaaatgagaaacaaaactgtgaagagaaggaactggcgtatacaagatgacttctgatatcatgtttgccatgtgttgtggttcttaagaactcataggtgactttctgatgactgaatgtctgtttcagagacgcttcgggcctttttatttttattttattttttattttttgagacggagtccagcctgggcaacagagtaactctccttctcaaataaataaataaataaat

SEQ ID NO: 14844 - protein, 740 aa, Homo sapiens
MNEHLSSLIKKKRKCMQPKDFNFKTPENDKRFQKKFEKMAKELQRQKTNLDDDVPILLFESNGSLIYTPTIEINSSHHSAMEKRLQEMKEKRENLSPTSSQMIQQSHDNPSNSLCEAPLNISRDTLCSDEYFAGGLHSSFDDLCGNSGCGNQERKLEGSINDIKSDVCISSLVLKANNIHSSPSFTHLDKSSPQKFLSNLSKEEINLQRNIAGKVVTPHQKQAAGMSQETFEEKYRLSPTLSSTKGHLLIHSRPRSSSVKRKRVSHGSHSPPKEKCKRKRSTRRSIMPRLQLCRSEGRLQHVAGPALEALSCGESSYDDYFSPDNLKERYSENLPPESQLPSSPAQLSCRSLSKKERTSIFEMSDFSCVGKKTRTVDITNFTAKTISSPRKTGNGEGRATSSCVTSAPEEALRCCRQAGKEDACPEGNGFSYTIEDPALPKGHDDDLTPLEGSLEEMKEAVGLKSTQNKGTTSKISNSSEGEAQSEHEPCFIVDCNMETSTEEKENLPGGYSGSVKNRPTRHDVLDDSCDGFKDLIKPHEELKKSGRGKKPTRTLVMTSMPSEKQNVVIQVVDKLKGFSIAPDVCETTTHVLSGKPLRTLNVLLGIARGCWVLSYDWVLWSLELGHWISEEPFELSHHFPAAPLCRSECHLSAGPYRGTLFADQPVMFVSPASSPPVAKLCELVHLCGGRVSQVPRQASIVIGPYSGKKKATVKYLSEKWVLDSITQHKVCAPENYLLSQ

SEQ ID NO: 14845 - DNA, 2739 bp, Homo sapiens
  CDS (67)..(1506)
cagttatattctactctgaaagaaggcaacccaccctgggaggtgacagaagcggttctctttatcatggctgctatagcaaagagtgttgatccggaaaacaatccaacacttgtggaagtcctagaaggagttgtccgcctcccggagaccgtacatacggctgtgcgttacaccagcattgaattggttggagagatgagtgaagtcgttgatcgaaatcctcagttccttgaccctgtgttgggctatttgatgaaaggcctgtgtgaaaagcccctggcttctgctgcagccaaagccattcataacatttgctctgtctgccgagatcacatggctcagcactttaatggactcctggagattgcccgctccctcgattccttcctgttgtctccagaagctgctgtgggcttgctaaaagggacagcacttgtcctagcccgattacctttggataagattaccgaatgtcttagtgaactatgttctgttcaggttatggcattgaaaaagctgttgtctcaagagcccagcaatggcatatcctcagatcccacagtgttcttagatcgccttgcagtgatatttaggcataccaatcccattgtggaaaatggacagactcatccgtgtcagaaagtcatacaggaaatatggccagttttatccgagactctaaataagcaccgagctgataatcggattgtagagcgttgttgcaggtgcctgcgctttgctgttcgctgtgtaggcaaaggatctgcagcactgctgcagccactagtcacacagatggtgaatgtgtaccacgtacatcagcattcctgcttcctgtaccttggcagtatccttgtggatgaatatggcatggaagaaggctgtcggcagggactgctagacatgctccaggcactgtgcatccccacctttcagctcctagaacagcagaatggtctccagaatcaccctgacactgtagatgacctgttccggctagccaccaggtttattcagcgtagccctgtcaccttgctgcggagccaagtggtcatccctatcttacagtgggccattgcctctactaccctggaccaccgggatgccaattgtagtgtcatgaggtttctacgagacctcattcatacaggggtagccaatgatcatgaagaagactttgaattacggaaagaactgattggacaggtgatgaaccagcttggacagcagcttgtcagccagctgctgcacacctgctgcttttgcctccccccctataccctaccagatgtggctgaagtgctctgggagatcatgcaggtcgacagaccgactttttgtcgatggttagaaaattccttaaaaggtttgccaaaggaaacaaccgtgggagccgtcacagtgacacacaaacaacttacagacttccacaagcaagtcactagtgctgaggaatgtaaacaagtttgctgggccttgcgagacttcaccaggttgtttcgatagctcacactcctgcactgtgcctgtcacccaggaatgtcttttttaattagaagacaggaagaaaacaaaaaccagactgtgtcccacaatcagaaacctccgttgtggcagaggggccttcaccgccaccagggtgtcccgccagacagggagagactccagccttctgaggccatcctgaggagttcctgtttgggggtgtgagggaaaatcagcgcggattttaaaaagatggctgtggcctgcccggcgtggtgggaggggagctggtttcctggtgaactttctaaaaggaaaaataattttaagtaaagaaaaaagaaaaaaaaggaagactaaacagaaaccagaactgaaacattcacctggtagcaaatgacacatgcacgcacacacacatacacgcacaagcgccagtgcgcacgtgtacacagaaaaacaaaaggacaagctttctgtgaaacaaaatatttacttagggataatgtggggattcacatgaattaaatagctgcaattggaagaagagggtcagggtcatttgttcaggttttctattgttttgtcctctctttcctctcctacccttccttctctttctctctcccctccttttaaatgcaaatgagtagaaatttcttctaccttccccagctgtttcttcccacctttagagttgtttagacaaggaggagtaagcaaggaacttgttctgctttctatcgtggtcacattggtgatgcccgggacctgccagggtcagaatttatggatatctgaaccctgaccccgttcattctctcagtccacttccaatccacatcagtttgttgtctgccttggagagaagagccaaaactggggtgggcgggtgggtggggagtgcaggatataaatgtgtaagtttttgttttttaaggtttttttcttagtgaattattcacccacagacatgagagaaaaaaagagggagggtgtgtggagaaaaaatgtttacagggctaacaagggatgatgtgtcatttagtatgttactaaaaagtgtggaaatgacttgattttaaggggagggtgaggccgaagagggaagcccaaagcagatcttaatgtttcaaaggagtgcagcccttcacagccatcagatatgagggcactgttctgtctggtgttgtagccatctcaagaacaaatcaacagcaacaaaagagaaagaataaatttttaaaattt

SEQ ID NO: 14846 - protein, 480 aa, Homo sapiens
MAAIAKSVDPENNPTLVEVLEGVVRLPETVHTAVRYTSIELVGEMSEVVDRNPQFLDPVLGYLMKGLCEKPLASAAAKAIHNICSVCRDHMAQHFNGLLEIARSLDSFLLSPEAAVGLLKGTALVLARLPLDKITECLSELCSVQVMALKKLLSQEPSNGISSDPTVFLDRLAVIFRHTNPIVENGQTHPCQKVIQEIWPVLSETLNKHRADNRIVERCCRCLRFAVRCVGKGSAALLQPLVTQMVNVYHVHQHSCFLYLGSILVDEYGMEEGCRQGLLDMLQALCIPTFQLLEQQNGLQNHPDTVDDLFRLATRFIQRSPVTLLRSQVVIPILQWAIASTTLDHRDANCSVMRFLRDLIHTGVANDHEEDFELRKELIGQVMNQLGQQLVSQLLHTCCFCLPPYTLPDVAEVLWEIMQVDRPTFCRWLENSLKGLPKETTVGAVTVTHKQLTDFHKQVTSAEECKQVCWALRDFTRLFR

SEQ ID NO: 14847 - DNA, 2460 bp, Homo sapiens
  CDS (465)..(773)
tagacatgcccagagttatgattacaaatttaggaggtagacggctcaggaattccctgggattgttgtgctggtggaatggcagagggaacttcacaggaaccttagtgctcttttacctcaaagccacagacaggaaatagaaagtggaaaagtaatatctccttttcttttccataaggagtttcaacactgaactttaaaaagtctatcatattccagcaatattttttctttgtcctttatgttgtaagttgtgtggaaaaactacttcggtaagaaatgttactgagataacaacaactggctaatactgcatgtagattgcttaggttttaaagtgactgcctgacttcacatgttattgctacagcctccagtatgttcgcattatctcaaactcagggaccccacaggacaggagacaccctttctgaaactgagttggaagtgaaagggtggtgatggttttggccaagcctgcgggagggaaagtattgtattgggagcacccttgggaccaggaagagggatgcccaggttcacactctgggacccctaagacattgtcagtgggtaaggtggagggccactgccagaggctgctgcagtgccctctgggaagtgccagggaccctcagctgcagacccaggggatcccaatcccttatctctgcctgaaaagtggctattgctgcttcgtatcctccagtgtcacaggaatgctgtgcctgagacatcccactttagtttttgttttccaaacctgtcactgactcttcattgtggtgacagatcctctggttcccccattgctcagcctcaggtttattttgagggtaactcagtgtctgactgcccaagtcttttaggggttagttggaccattgtgtaagcttgtttgtatgtctcacctctttctggttggtacttactgtctcacactgctctggcaaacttgtacacacacacacactctctctctctctcacctggctaaggcttttaaaattatgaagataaataatctgtttcaccagctggagagagttgcaaggaagattgctggagctactcaatctagcgctaatggtttggattcattactgcaaacctacataatttaacatatttgtttactttagtgtgacaactgatgaaaaaaaatggagcaatctgaattgtataaaataacttaagaaggaagaaaagtgatatataaatatattttgcaaatgtcacattaatttaaaaatgagtatgattgattttatttttaaagtgggcattcttcactgtttcgagacctttgtatgtatttgtgtatttttatctttttttttcaggccattattataaggtgttattttggccctctaatgtagaagttatgtttaaatacaaccaatcaggccctaagtgcaaaaaagttctgtcttggtgcttatcactggtataattattatttttttgttttcctaactttgctcttaggagcatgagcctctttgtagctttatggtaatgcaatatttctggtcatttactgtcaaaaaatttttttacattgtgttagtgaagactgtgttttcagggttaaatgattggtatcaatgtatatagagtaaaattattgcaaaatttaaaaatgatttttcttggcattctttttaaatactctgaaacatatatgcaaatgagaaacctttaatcatactaaagccagttatgttaagaatttttcctttggattttataattaagagttgcttataaatacttatgacattgagctcttactgttttagttgtcttaaaagaatgggacatgtcatgaactggtttctttttttaaaaaattcttgatgtgaattccactgttacctgaccatgtatattcagatgaatgtactctttcttgttccttgttaccagattaatctgagagaatgtggattcatcctgtcatctttctcatgctcaaatacttaaaatggttcttttgcccaaaagtctcagagtcttcattttggtacagtggagtcacaacttgtaaggtggttaggttttaaagaccgtgcctaaggacaaaattgagcatgctcagaatggtccttgaaaatctcctaaattaccaataaatttctctttgtagtcttaaagtttaaatccctgtggagtgatatgtaggtatgaatatattatgcttatattaagtacaaaaatacaaactgcatatcaagagattcttatagcattaataatttccatgcatgtgtctttttccagtaggtatggttgaatttatgtaaatttattgctaatcccatcccttacgatctagagtataagctgcgcaagggcagaagtttttatctggtttgttcatggatgtattctaagagctgagaacagggcctggacacaataagcattcaataaatatttactgaatgaatg

SEQ ID NO: 14848 - protein, 103 aa, Homo sapiens
MVLAKPAGGKVLYWEHPWDQEEGCPGSHSGTPKTLSVGKVEGHCQRLLQCPLGSARDPQLQTQGIPIPYLCLKSGYCCFVSSSVTGMLCLRHPTLVFVFQTCH

SEQ ID NO: 14849 - DNA, 2418 bp, Homo sapiens
aaaaaaaaatgaggcccctgcagcagcagcggcgtggtcagagcgagcttcggagaagcagtggtgggttccatgtgatggtggagtaggaggcaggtctccgcggttcatctgtgttgctctaaatgacactgcttcattattttgatggctggagaatatttcctagtgtatgtatatgagagtttcttgatctctttatctgtggatgaacagctactttgaaacatatggtacatttgtgttaaggctagtcaccctgctgtggaatagaaggccagaattgatcagtctcatctgagagtaactttgtacccatcactgattccttctgagactgcctccacttccccagcagcctctggtttcttcatgtggctgcagatggcaggatttcccaaaggtttctggctgaaacatattccgtggtgtatctgtacagcagtttcctcatccctgcagctgtgtttgaacaggtcatttaccatgctgtcctccaggttcaacagtatggctccaaaggatgaaatttcattctgattttctggctgaagactattctctttgtgtatgtccaccacagttactttatcccttcatctgtggatgggcagtctcgctgtattgcccaggctggagtgcagtggcatgatctcagctcactgcaagctctgcttcctgggttcacgccattctcctgcctcagcctcctgagtagctgggattacaggcacccgccaccacgcccaggaaagaaaaaagaagaaaacaaacctccatacgagaatgggtctaaaggaacttcccaaacctccatgattttgcaggaaacaagataaaggtggtttccacaagaaaaatggcacaatgtttctcagaagacaattacataagaatcagcatacttcaaattcacagcaaataatcagacaattgatgaaaatacttacccaaacactaattgtagactatgccttctgaatatgtttgtcataaacttggagtaaggaatcctcacaggcactggacaattcaaaaaacgtaaagttgtttgttagaatactggtgcttttgggtagaaaccctcatccatatcctggtaaggcttgaagttgcacaggagttttcatttgtcaaaacccagaaaaccataagctttagatttgtgaattttatattgtattatatgtgacctttctttttaaaaaatgagctgtaagcagtctcccagacagtagctcagcctccagaactctctttctgcatagttgaagacccctcttcacacaagatggtagcaacaaatcataggtgcaattgcaccaaattcacagaagatcaattgaaaatcctcatcaataccttcactcaaaaaccttacccaggttatgctaccaaacaaaaacttgctttagcaatcaatgcagaagagtccagaatccaaatttggtttcagaatcaaagacctaggcgtggattccagaaaacaccagaacctgactttagatttaagccacagccatggacaagattaacctggtgtggagtttcaaaatagagaagccagatggtgttgtaccacctatagcacctttcaattacacacagtcatccatgcatttatgaaaaacccataccctgggattgattccagagaacaacttgctgaagaaattggtgcttcagagtcaagagtccaaatttggttccagaatcgaagatctagatttcatctccagagaaaaagagaacctgttatgtccttagaatgagaagaccagagaagaccaggggcaaggtttctgagggacttcaaggtacagaagatacacaaagtggcaccagcctcactagcactctcatttctcaagagccagaacatggtgaatacagtcaagttcagtgtatttgttaatatcaatttgggccccaaatctctctcacagtcttcctgggagtctattcttcttccaaaagtgcaagctaagccttctgaagatggtaaagaacttggccgggtgtggtggctcatgcctgtaatcccagcactttaggaggctgaggctggaagattgcttgagcctaggagtttgaaaccagtctgagcaacatagtaagaccctgtctctattctaaaaaacaaaataagtaaaaaggactgtaggaggccaagacaggtacaggaggcaccacactaccctgttgacacagcctggatccagagttcagcagaccttgagacaatgaaaacaaacttagtaataatcatttttcaatcattgcagtaattattgatttggacaaaaatcaattgacgtcaaaaccttaaagtgacgtttctctgcctatggagtggtcattcttttattcctttagtttcataataaattttcttttacttaaaaaaaaaaaaaaaac

SEQ ID NO: 14850 - DNA, 2190 bp, Homo sapiens
  CDS (26)..(529)
gattgggccgccgctgctcatccccatgtatttccagtaccagatcatcatgaccatgatcgtccataagaactgggtggacctggcctgggccgtcagctactacatccggttcttcatcacctacatccctttctacggcatcctgggagccctccttttcctcaacttcatcaggttcctggagagccactggtttgtgtgggtcacacagatgaatcacatcgtcatggagattgaccaggaggcctaccgtgactggttcagtagccagctgacagccacctgcaacgtggagcagtccttcttcaacgactggttcagtggacaccttaacttccagattgagcaccacctcttccccaccatgccccggcacaacttacacaagatcgccccgctggtgaagtctctatgtgccaagcatggcattgaataccaggagaagccgctactgagggccctgctggacatcatcaggtccctgaagaagtctgggaagccgtggctggacgcctaccttcacaaatgaagccacagcccccgggacactgtggggaaggggtgcaggtggggtgatggccagaggaatgatgggcttttgttctgaggggtgtccgagaggctggtgtatgcactgctcacggaccccatgttggatctttctccctttctcctctcctttttctcttcacatctcccccatagcaccctgccctcatgggacctgccctccctcagccgtcagccatcagccatggccctcccagtgcctcctagccccttcttccaaggagcagagaggtggccaccgggggtggctctgtcctacctccactctctgcccctaaagatgggaggagaccagcggtccatgggtctggcctgtgagtctccccttgcagcctggtcactaggcatcacccccgctttggttcttcagatgctcttggggttcataggggcaggtcctagtcgggcagggcccctgaccctcccggcctggcttcactctccctgacggctgccattggtccaccctttcatagagaggcctgctttgttacaaagctcgggtctccctcctgcagctcggttaagtacccgaggcctctcttaagatgtccagggccccaggcccgcgggcacagccagcccaaaccttgggccctggaagagtcctccaccccatcactagagtgctctgaccctgggctttcacgggccccattccaccgcctccccaacttgagcctgtgaccttgggaccaaagggggagtccctcgtctcttgtgactcagcagaggcagtggccacgttcagggaggggccggctggcctggaggctcagcccaccctccagcttttcctcagggtgtcctgaggtccaagattctggagcaatctgacccttctccaaaggctctgttatcagctggccagtgccagccaatccctggccatttggccccaggggacgtgggccctgcaggctgcaggagggcactggagctgggaggtctcgtcccagccctccccatctcggggctgctgtgtggacggcgctgcctcaggcactctcctgtctgaacctgcccttactgtgtttaacctgttgctccaggatgcattctgataggagggggcggcagggctgggccttgtgacaatctgcctttcaccacatggccttgcctcggtggccctgactgtcagggagggccagggaggcagagcgggagggagtctcaggaggaggctgccctgaggggctggggagggggtacctcatgaggaccagggtggagctgagaagaggaggaggtgggggctggaggtgctggtagctgaggggacgggcaagtgagaggggagggagggaagtcctgggaggatcctgagctgctgttgcagtctaacccactaatcagttcttagattcaggggaagggcaggcaccaacaactcagaatgggggctttcggggagggcgcctagtccccccagctctaagcagccaggagggacctgcatctaagcatctgggttgccatggcaatggcatgccccccagctactgtatgcccccgacccccgcagaggcagaatgaacccatagggagctgatcgtaatgtttatcatgttacttccccacccctacattttttgaaataaaataaggaatttt

SEQ ID NO: 14851 - protein, 168 aa, Homo sapiens [sequence omitted]

SEQ ID NO: 14852 - DNA, 3046 bp, Homo sapiens
  CDS (59)..(2743)
tttattaactggaggcgacggcggctgcggcggcggcgggacccgcctcctccggggtatgaaaatcggcagtgggttcctgagtggcggcggaggtaccggcagtagcggtggtagcggctccggcggcggtggtagtggcggcggcggcggcggcggcagcagcggcaggagggcagagatggaacccacctttccccagggtatggttatgttcaaccaccgtcttcccccggtcaccagcctcacccggccggcggggtcggccgcccctcccccgcaatgcgtgttatcctcctctacctccgcagccccggccgctgagcccccccctccgccagccccggacatgactttcaagaaggagccggcggcgtcagccgcggccttcccctcgcagaggacctcctgggggttcttgcagtctttggttagcatcaaacaggagaaacccgcggatcctgaggagcagcagtcccaccaccaccatcaccaccaccactatggggggctgttcgctggagctgaagagaggtctccaggcctaggaggcggtgaaggggggagtcacggcgtcatccaggacctcagtattctccaccagcatgtccagcagcaaccagcccagcaccaccgtgacgtattactcagcagcagtagcaggactgatgaccaccatggcactgaggagccaaagcaggacactaatgtcaaaaaggcaaaaaggccaaagccagaatctcagggaatcaaagccaagaggaagccaagtgcatcttccaaaccttctttggttggagatggagaaggtgccatcctctccccaagtcagaaacctcatatctgtgatcactgtagtgctgctttccgaagctcctatcacctgcggagacatgtcctcattcatacaggagaaagacctttccagtgcagccagtgtagtatgggtttcattcagaaatacctactacagagacatgagaaaattcatagtagagagaagccatttggatgtgatcagtgcagcatgaagtttattcagaagtaccatatggagagacacaagaggacacatagtggagaaaagccatataagtgtgacacttgccaacagtatttttcaaggactgatagattgttgaagcacaggcgcacatgtggtgaagtcatagttaaaggagccactagtgcagaacctgggtcatcaaaccataccaatatgggtaatctggctgtgttgtctcagggaaatacaagttcttcaaggagaaaaacaaagtcaaaaagcatagctattgaaaataaggaacagaagaccggtaaaacaaatgaatcgcaaatttcaaataatataaacatgcagagttactcagtagaaatgcctaccgtgtcttccagtggaggcataattggcactggaatagatgaactgcagaagagggtgccaaaattgatctttaagaaaggaagcagaaagaatacagataaaaactaccttaaccttgtgtcaccattaccagacatagtaggacagaaatccttgtctggaaaaccaagtggctcacttggcatagtatcaaataatagtgtggagaccattggtcttctccaaagtacaagtggcaaacaaggtcagataagtagtaattatgatgatgccatgcagttttcaaagaaaagaagatatttaccaactgccagcagcaacagtgccttttctataaacgtaggacacatggtctcccaacagtctgtcattcagtctgcaggtgtcagtgttttggacaatgaggcaccattgtcacttattgactcctcagctctaaatgctgaaattaaatcttgtcatgacaagtctggaattcctgatgaggttttacaaagtattttggatcaatactccaacaaatcagaaagccagaaagaggatcctttcaatattgcagaaccacgagtggatatacacacctcaggagaacactcagaattggttcaagaagaaaatttgagcccaggcacccaaacaccttcaaatgataaagcaagtatgttgcaagaatactccaaatacctccaacaggcttttgaaaaatccactaatgcaagttttactcttggacacggtttccaatttgtcagtttgtcttcacctctccacaaccacactttgtttccagaaaaacaaatatacactacgtctcctttggagtgtggtttcggccaatctgttacctcagtgttgccatcttcattgccaaagcctccttttgggatgttgtttggatctcagccaggtctttatttgtctgctttggatgctacacatcagcagttgacaccttcccaggagctggatgatctgatagattctcagaagaacttagagacttcatcagccttccagtcctcatctcagaaattgactagccagaaggaacagaaaaacttagagtcttcaacaggctttcagattccatctcaggagttagctagccagatagatcctcagaaagacatagagcctagaacaacgtatcagattgagaactttgcacaagcgtttggttctcagtttaagtcgggcagcagggtgccaatgacctttatcactaactctaatggagaagtggaccatagagtaaggacttcagtgtcagatttctcagggtatacaaatatgatgtctgatgtaagtgagccatgtagtacaagagtaaagacacccaccagccagagttacaggtaaggtcccaaaagtggccaggctggaggtcttctaatgtaattttgttttattttgagaacactgccattggaatgtttctacacgatcctattaagaataatgtgatgccctttcaatgcaacttttcatatttagtttattttgttagcgtgattttagctctgtttgtattatgatttttaatcaaaatcaatagattaaaaatagtttgacattcaaagtgacaatgtttagcaatcaaatttacatgtatagatcgtcagggaatagcccaaatgttttaaacgcaaaaaaaaagac

SEQ ID NO: 14853 - protein, 895 aa, Homo sapiens [sequence omitted]

SEQ ID NO: 14854 - DNA, 2795 bp, Homo sapiens
  CDS (130)..(1812)
aaaaatgtctgtgtcttcctggttgcgacatacactgacggcctaccaactgaaagtgcagagtggttctgcaaatggttagaggaagcatccattgattttcgatttggcaaaacttacctgaagggtatgagatatgcggtatttggcctgggaaattctgcctatgctagccacttcaacaaggttggcaaaaatgttgacaagtggctctggatgcttggcgcgcatcgtgtgatgagtcgaggggagggcgactgcgacgtggttaaaagcaagcacggcagcattgaggccgacttcagagcatggaagaccaagttcatctcccagctgcaggcacttcagaaaggggagagaaagaagtcctgtggcggccactgcaagaaaggcaaatgtgaatctcaccaacatggctcagaggagagggaggaaggatctcatgagcaggatgaattgcatcatagagacaccgaggaggaagaaccctttgagagctccagtgaagaagagtttggtggtgaggaccatcagagcctaaattccattgttgatgttgaagatttgggcaaaattatggatcatgtgaagaaagaaaagagagaaaaggaacagcaggaagagaagtctggtttgttcaggaacatggggaggaatgaagatggtgaaagaagagctatgataactcctgctctccgagaagcccttactaaacaaggttatcagttgattgggagccactcgggggtgaagctttgcatgtggacaaagtccatgttccgagggagaggaggttgttacaaacacacattctatggaattgagagccatcgctgcatggaaaccaccccgagcttggcgtatgctaataaatgtgtcttctgttggcggcaccacaccaaccccgtgggcactgagtggcggtggaagatggaccagcctgaaatgatcttgaaggaagccattgaaaaccatcagaacatgattaagcagtttaaaggagtaccgggcgtcaaagcagaacgctttgaagaaggaatgacggtaaagcactgtgcattgtccctcgtgggagaaccaataatgtacccagagatcaacaggtttttgaagctactccaccagtgtaaaatttccagcttcctggtcacaaacgcacaatttcctgcggaaatcaggaacctcgagccggttactcagctgtatgtcagtgtggatgccagtaccaaagacagcctgaagagaatcgaccgcccactcttcaaggatttctggcagagattccttgacagtttaaaagccttggcagtcaagcaacaacgaactgtctacagactgacgctcgtgaaagcatggaatgtggacgagctccaggcctacgcgcagctcgtgtccctgggaaatcctgacttcatcgaagtgaagggcgttacctactgcggagaaagttcagcaagcagtcttaccatggcccacgtgccctggcatgaggaagtggtacagtttgtccgcgagctggtggatctgatccccgaatatgaaattgcatgtgaacacgaacactctaattgcctcctgatagcacacagaaagtttaaaattggtggtgaatggtggacatggatcaattataaccgcttccaggagctcatccaggaatatgaagatagtggtggatcaaaaacgttcagcgcaaaggattatatggccagaactcctcactgggcattatttggtgccagtgaaagaggctttgatcccaaggacacaagacatcagagaaagaacaaatcaaaggctatttctggatgttgagattatctgatttcaaggtactgaaggacaaaaacttggatggcctcaaaaggttcttgaacaccactgtgattctccaaggacgaattacgtaaattatactttcatacaaaggagacaataaggcagtaaacacagggacacgggggacagcgtccacactcagagggcctgggccacagccccgatgtttcttttcagaactcagcccctttcctgattttacttctaagaggaaaattattttggggaggaactacacagtcgtgattagaatttatctgatggttttgtattataacttgtaagacctgccagaatgctagtcccgagagtgtcagacaaggaagaaatccctgggcctcttccccttacccggcccttagatttcatggagcagccacttagcattgaattgcactaccctgagctaaacgtgtctgtgctttctaagataagagcttgatccctttcttctatcttaagacagcacctcctgaaaagaatcgaagttgtcacaactctcacttattttttaaatactgcatagattgagttttggtttattaccaacccttcccagaattgcgttggatctaaaactactagatctcatcccattcccatgtaaattaccacagaccgcagtaccggggctggagcggagtgaagctgtctgctgtgagaggagtggccatgtgagggcatggagtcattagtctcacaaacacactttggactgaagaggatcatttctttttgttcgtgaggtcactgtccaggcctctcatatcatgaccagacggcgggtctccatcttctttcactcctgtggccctggctgctttacacaatctgttctataaggttcaggtgttttcaggttggaacgatcataaatactcaaaattgttttcaagttagcaagttcttttaacagtcttttatgcaaaaattgaattaataaaataatcttttgt

SEQ ID NO: 14855 - protein, 561 aa, Homo sapiens [sequence omitted]

SEQ ID NO: 14856 - DNA, 2025 bp, Homo sapiens
  CDS (51)..(722)
ggctggtgtatttgtacatctctcgggacgtgaaattgacagtgaaaagtatggcagatgagcaagaaatcatgtgcaaattggaaagcattaaagagatcaggaacaagaccctgcagatggagaagatcaaggctcgtttgaaggctgagtttgaggcacttgagtcagaggaaaggcacctgaaggaatacaagcaggagatggaccttctgctacaggagaagatggcccatgtggaggaactccgactgatccgcgctgacatcaatgtgatggaaaacactatcaaacaatctgagaatgacctaaacaagctgctagagtctacaaggaggctgcatgataagtataagccactgaaagaacatgtggatgccctgcgcatgactctgggcctgcagaggctccctgacttgtgtgaagaagaggagaagctttccttggattactttgagaagcagaaagcagaatggcagacagaacctcaggagccccccatccctgagtccctggccgctgcagccgctgccgcccaacagctccaagtggctaggaagcaggatactcggcagacggccaccttcaggcagcagcccccacctatgaaggcctgcttgtcatgtcaccagcaaattcaccggaatgcacctatatgccctctttgcaaggccaagagtcggtcccggaaccccaaaaagccgaaacggaagcaggatgaataaagaaagggagagcacatgaagctttgctaattataacccctcaccttgaccagagtcattgatgtcctgatgtgaaacaacccttgcccaaccccacgaagtctcctatttaatgtgatggaagcacaacccctctctcactttgctcctatttctttctgctcttgggatttctggtttaggaagagatgtggttcaggtgctaaacagtgtgtctgatgatcccttctctcccactcacatttcaacccctgcccttgtttggagctaagggaagggcaaaaggctcagatatgattctctatctcttgcgcctgaggcctggagcctaaggagctgtagggtctgaggggcaggggaggcccatatcttgtttcaggtaaaggacccagtatttcccctccttgtacttttgccttaggttctcaagggacaatagtcttcatgttggattctccaacaggctgggtgcatgtatccccctactcctaccctcatctcatccttaaggcccagaggtagcttggacaagccctccttttcataatcatttgggaggcatggctgtaattctttagctttctccacttctgtctcccacatatactaaaattcttaggtactaggctgtgtgtcttgggatcttaagatcaatgaacctttccccaatatctagtctttgcaaattctagtagaagatttccacagtgaaatcagtgagccagaccaactctacatctcctgcctaacctactgcctaagtcattagggctgagggctcggctgtaggggcttccttaggctgagagtgcccccaggctgacatctgtgttggcttttgttcagaaccattactctggcacatgctcaatggtatattgcagggaggagaggagtagatttagatttgagtaaatgccaatcactttacacatgaaggtgggtgggactttccttccattcatcccttgctctcttggatctgaactcttctggagcctcagctcaggatagctgctggccactcctgtcctgtggattgtgcaggtggcctttcctcccaaaagaaaaggcatcaggctccccaagccccacagctctcctttccaccaaagccaggtttcctggtaaggtcactcgaagataagggatggggatgggggctgactgacaaaaaattttagccccaggtctcagtacctggctggggagggggatatttttccttccttaagtagttttacattgccacagtgtgtatgtgttcactatataaaatgttcctctgctctttgaaagt

SEQ ID NO: 14857 - protein, 224 aa, Homo sapiens [sequence omitted]

SEQ ID NO: 14858 - DNA, 2416 bp, Homo sapiens
  CDS (90)..(899)
acctgaagtccaaggcactgcgggagcgctggctgctggaggggacgccgtcctcggcctcagagggggatgaggacctgaggaggcagatgcaggacgacgagcagaagacacggctgctggaggactcggtgtccaggttggagaaggaaattgaggtgctggagcgtggagactccgccccagccgctgccaaggagaacgcggcggccccgagcccagtccgggccccagccccgagtccagccaaggaggagcgcaagacagaggtggtgatgaattcacagcagacgccggtgggcacgcccaaagacaagcgagtctccaacacgcccctgaggacggttgacggctcccccatgatgaaggcagtggtccatgctgtggacggcaccgccgagaacgggatccaccccctgagctcctccgaggtggacgaactcatccacaaagcggacgaggtcacgctgagcgaggcagggtccacggccggggcggcagagacccggggggctgtggagggggcagcccggaccacgccctcccggcgggagatcaccggtgtgcaggcacagccaggcgaggccacgtccggcccgccggggatccagcccggccaggagcccccggtcacaatgatcttcatgggttaccagaacgtggaggatgaggccgagaccaagaaggtgctgggccttcaagataccatcacggcggagctggtggtcatcgaagacgcggctgagcccaaggagcctgcaccacccaacggcagtgctgccgagcctcccacggaggccgcctccagggaagagaatcaggcggggcccgaggccaccaccagcgacccccaggacctcgacatgaagaagcaccgttgtaaatgctgctccatcatgtgagccggcccccgagaccccggcccccaccccacaccacagacacccaccagcccggcccctcccggcgcctgcccaccctccacccacagcctcacgggtccaggacttggcgtgttgttacatgttccttccgagttttctttcgctggaaagagggacaggggcccccacccgtcaccacgccccaacactccccccgaaccagagccgtgcacttgtgcctggtaggagagagacaggacagacccgcttttcccgagacaaggaccccccatgtcacggcagcttcacagacgcggctcgcgcccaccggggtcctggcgggtgggacccgcggcctccacgcggcccaggccagcctgccaccctctgggcctcctacctgtgcctttctctgaggggacaccccgccagagagggccccgggagccgggggtgggtactgaggcctgctcaggccctggaagtgaggctctatggggttccctggccaaggcgctggccccccaatctcaggcagttggggtgaggccgtgcctctttgggggctaaaggtcttgggtggaggacaggcccctctgctgtgcccctatgccctgtgtgggcccaaccagtggacaatggagtctgggggagggggaaccccggggacatgccctcacccgggaggggccggtaacccctgggctatcttctagacggggcgaaccaggggtcattgacctgccccctgcacagggcagggaccgagtgagccactccttgtcccgagctcccgcccccactgggccctcctccctcctggtgctaatttggggaccccaggggccgcccccggcctcttctccatcctgcttggaccagggtcctgggtcttcccaaccataccccgagatcaggccccacctgccagctctactgggcttggagcacgtccgggcagtggagggagggacacagcctgggacaggaagcctcttgggttggagcaggagaccctcatttgccacccagaccaatgtgagcctgcccccagccccctctcattggaagtggcaaggggcttccctcctgggggcagctacactcgtccccagaggcacattcgtgcacattctcacagacaccgtctcacacgttggctttggacaaccaggccccaacttggtccctgccctagggacctccagcctggtgcccagtgctcaggccacctcctggtccagtcaccacctgcagcctcggcagggcaggtacaggggccacctcggatgggagcctgggtccctgcctccgctctgcccctgggtggctgggaggagaggccctctcgggggtgacctgggcgtcagccgtggaaccccctcctcctccctggagtctgcctgagtccctcgagccgcgagccttcgctgaagtgcccttgctataaccccctctgcttctggtgtgtgacgaggcccccgatgttcttggttttcccagagaagcaaataaacagcgtgaacagcccc

SEQ ID NO: 14859 - protein, 270 aa, Homo sapiens [sequence omitted]

SEQ ID NO: 14860 - DNA, 2343 bp, Homo sapiens
  CDS (61)..(2022)
aaattgttcagttactgcgtgaaggtgaaagtcaaccggcagcaactggtcaaactggaaatgaacaccttgaacgtcatgctggggaccctaaacctggcccttgtagctgaacaagaaagcaaggacagtgggggtgcagctgtggctgagcaggtgcttagcatcatggagatcattctagatgagtccaatgctgagcccctgagtgaggacaagggcaacctcctcctgacaggtgacaaggatcaactggtgatgctcttggaccagatcaacagcacctttgttcgctccaaccccagtgtgctccagggcctgcttcgcatcatcccgtacctttcctttggagaggtggagaaaatgcagatcttggtggagcgattcaaaccatactgcaactttgataaatatgatgaagatcacagtggtgatgataaagtcttcctggactgcttctgtaaaatagctgctggcatcaagaacaacagcaatgggcaccagctgaaggatctgattctccagaaggggatcacccagagtgcacttgactacatgaaaaagcacatccctagcgccaagaatttggatgccgacatctggaaaaagtttttgtctcgcccagccttgccatttatcctaaggctgcttcggggcctggccatccagcaccctggcacccaggttctgattggaactgattccatcccgaacctgcataagctggagcaggtgtccagtgatgagggcattgggaccttggcagagaacctgctggaagccctgcgggaacaccctgacgtaaacaagaagattgacgcagcccgcagggagacccgggcagagaagaaacgcatggccatggcaatgaggcagaaggccctgggcaccctgggcatgacgacaaatgaaaagggccaggtcgtgaccaagacagcactcctgaagcagatggaagagctgatcgaggagcctggcctcacgtgctgcatctgcagggagggatacaagttccagcccacaaaggtcctgggcatttataccttcacgaagcgggtagccttggaggagttggagaataagccccggaaacagcagggctacagcaccgtgtcccacttcaacattgtgcactacgactgccatctggctgccgtcaggttggctcgaggccgggaagagtgggagagtgccgccctgcagaatgccaacaccaagtgcaacgggctccttccggtctggggacctcatgtccctgaatcagcttttgccacttgcttggcaagacacaacacttacctccaggaatgtacaggccagcgggagcccacgtatcagctcaacatccacgacatcaaactgctcttcctgcgcttcgccatggagcagtcgttcagcgcagacactggcgggggcggccgggagagcaacatccacctgatcccgtacatcattcacactgtgctttacgtcctgaacacaacccgagcaacttcccgagaagagaagaacctccaaggctttctggaacagcccaaggagaagtgggtggagagtgcctttgaagtggacgggccctactatttcacagtcttggcccttcacatcctgccccctgagcagtggagggccacacgtgtggaaatcttgcggaggctgttggtgacctcgcaggctcgggcagtggctccaggtggagccaccaggctgacagataaggcagtgaaggactattccgcttaccgttcttcccttctcttttgggccctcgtcgatctcatttacaacatgtttaagaaggtgcctaccagtaacacagagggaggctggtcctgctctctcgctgggtacatccgccacaacgacatgcccatctacgaagctgccgacaaagccctgaaaaccttccaggaggagttcatgccagtggagaccttctcagagttcctcgatgtggccggtcttttatcagaaatcaccgatccagagagcttcctgaaggacctgttgaactcagtcccctgaccaccacacagcagctgcggcggcgaagacgaagctggcttgccttccaccctctgttctccctccttgtgcattaagttccctccgcgggatgctgcattgttaccccgccctcccctctctcatttttcttggtgtggcttggggtttttaggcttcctgttttatctcgtgtgtgtggtgcaccagctatgaggttgtctgtaacccaagccatcaaagggcctgtacatacctaggagccatgagttgtcccggccagcttcatacttgagtgtgcacatcttgagaaataaacaagtgacttaacacacattg

SEQ ID NO: 14861 - protein, 654 aa, Homo sapiens
MNTLNVMLGTLNLALVAEQESKDSGGAAVAEQVLSIMEIILDESNAEPLSEDKGNLLLTGDKDQLVMLLDQINSTFVRSNPSVLQGLLRIIPYLSFGEVEKMQILVERFKPYCNFDKYDEDHSGDDKVFLDCFCKIAAGIKNNSNGHQLKDLILQKGITQSALDYMKKHIPSAKNLDADIWKKFLSRPALPFILRLLRGLAIQHPGTQVLIGTDSIPNLHKLEQVSSDEGIGTLAENLLEALREHPDVNKKIDAARRETRAEKKRMAMAMRQKALGTLGMTTNEKGQVVTKTALLKQMEELIEEPGLTCCICREGYKFQPTKVLGIYTFTKRVALEELENKPRKQQGYSTVSHFNIVHYDCHLAAVRLARGREEWESAALQNANTKCNGLLPVWGPHVPESAFATCLARHNTYLQECTGQREPTYQLNIHDIKLLFLRFAMEQSFSADTGGGGRESNIHLIPYIIHTVLYVLNTTRATSREEKNLQGFLEQPKEKWVESAFEVDGPYYFTVLALHILPPEQWRATRVEILRRLLVTSQARAVAPGGATRLTDKAVKDYSAYRSSLLFWALVDLIYNMFKKVPTSNTEGGWSCSLAGYIRHNDMPIYEAADKALKTFQEEFMPVETFSEFLDVAGLLSEITDPESFLKDLLNSVP

SEQ ID NO: 14862 - DNA, 2455 bp, Homo sapiens
  CDS (58)..(2259)
gactggcggcaggctcgccgcggcgcggagtcccggctgcgggatagaccgagggccatggccgcctctcccggacccgccggcgttggcggcgccggagcagtctacggctccggctcttcgggcttcgccctcgactcgggactggagatcaaaactcgctcggtggagcagacgctactcccgctggtttctcagatcaccacgcttattaatcataaagataataccaaaaagtctgataaaactctgcaagcaattcagcgtgtaggacaagctgtcaacttggcagttggaagatttgttaaagtaggagaagctatagccaatgaaaactgggatttgaaagaagaaataaatattgcttgtattgaagctaaacaagcaggagaaacaattgcagcacttacagacataaccaacttgaaccatctggaatctgatgggcagatcacaatttttacagacaaaacaggagtgataaaggctgcaagattacttctttcttcagtgacaaaagtgttgttgctggcagaccgagtagtcattaaacagataataacatcaagaaataaggttctcgcaactatggaaagactagagaaagtgaatagctttcaagagtttgtccaaatattcagtcaatttggaaatgaaatggtggagtttgcacatctgagtggagatagacaaaatgatttgaaagatgaaaagaaaaaggcaaaaatggcagcagctagggcagttcttgaaaagtgtacaatgatgcttctcacagcttcaaagacatgtctgaggcatcctaactgcgaatcagcccataaagacaaagaaggagtatttgaccgtatgaaagtggcattggataaggtcattgaaattgtgactgactgtaaaccgaatggagagactgacatttcatctatcagtatttttactggaattaaggaattcaagatgaatattgaagctcttcgggagaatctttattttcagtccaaagagaacctttctgtgacattggaagtcatcttggagcgtatggaggactttactgattctgcctacaccagccatgagcacagagaacgcatcttggaactgtcaactcaggcgagaatggaactgcagcagttaatttctgtgtggattcaagctcaaagcaagaaaacaaaaagcatcgctgaagaactggaactcagtattttgaaaatcagtcacagtcttaatgaacttaagaaagaacttcatagtacagcgacacagctggcagcagatctattaaaataccatgctgatcatgtggttctaaaagcattaaaacttactggagtagaaggaaatttagaagctttggctgaatatgcctgtaaactctctgaacagaaagagcagcttgttgagacctgtcgattgttacgacacatatctgggacagaacctctggaaataacctgtatacatgcagaggagacatttcaggtgactggccaacagataatttctgctgctgaaacattgacattgcatccatctagtaaaattgctaaagaaaacctagatgtattttgtgaagcttgggaatcccaaattagtgacatgtcaacactgctgagagaaatcaatgacgtgtttgaaggaagacgaggagagaagtatggctacctttcacttccaaagccaatgaagaataatgcaaacctgaaatcattaaagccagacaagcctgactctgaggagcaagccaagatagcaaagcttggacttaagctgggtttgctcacctctgacgctgactgcgaaattgagaagtgggaagatcaggagaatgagattgttcaatatggacggaacatgtccagtatggcctattctctgtatttatttactagaggagaggggccactgaaaacttcccaggatttaattcatcaactagaggtttttgctgcagagggtttaaagcttacttccagtgttcaagctttttcaaaacagctgaaagacgatgacaagcttatgcttctcctggaaataaacaagctaattcctctatgccaccagctccagacagtaactaagacttctttgcagaataaagtatttctaaaggttgacaagtgtattacgaagacaagatccatgatggctctcttagtccaacttctttcactttgttataaactgctgaagaagcttcagatggaaaataacggatgggtctcagttacaaataaggacactatggatagtaaaacttgagaagcttttggggtcagatctctggaacatcatgtgatgaagctgacatttttaaaaatcaaatgatcctttatcttttcagaaattcatcaattttataaagaaaacaatattgaaattttgctctattttctgatcatgaaactgattgtaaagctttttgacaactaataaatgtcttggtaattgctag

SEQ ID NO: 14863 - protein, 734 aa, Homo sapiens [sequence omitted]

SEQ ID NO: 14864 - DNA, 2724 bp, Homo sapiens
atttcttaaggtggagtctcgcactgtcacctgggctggagtgcagtggcatgatctcggctcactacaacctttgcctcttgggttcaagtgagtctcctgtctcagcctcccaagtagctgggattacaagtgcccaccaccacgcccagctaattttttgtatttttagtagagacagggtttcaccatgttggccaggctggtctcaaactcctgaccttgtgatttgcctgacttggcctcccaaagtgctgggattacaggcttgagccaccatgcccggccaagactattttttagaaccataaccacaatacagttaccacacttttgaaagtcgatgggaattccttaatatttaaatttctcaataggctaatttttatttttagggatgggggcttgctgtattgacgagactggagtgcagtggctattcctgagtattgtcatagtgactacacctcaaacacctgggctcacatgatcctcctgcctcagtgtcccgagtagtagtgcagggactgtaggcacttaccgctgtgatctgcttagctcatacattttaaaaaaatagttggttcaaatcaggatccaaaaaagttacataaattgtgtttgattaatgcgtatcttgggtctcttttagatctagagtgtctctcatcttttttaagaaacattatttgttgaagaaaatgagtaattctgtataattccccacattctagactttactgattgtatccccatgatttctctgcctcttgtgtttcctgttaactatagtaactataagttaaatacggaagtttgtgattaaggtgtttttttattttttttttttatttttatttttttttgggagacaagatctttctctgttgcccagggtggagtgcagtggtgccatctcggctcattgaacctctgattgctgggctcaagcaatcctcccacctcatcctcctgagtagctgggactacaggcgtgtaccaccaagcccagccaacatttatattttttgtagagatgggatctcaccatgttgcccatgcttgatttttaataagaatacttcattggtggtatttatagattttgatttatttccaaattgttctttcaagtttcattttatctagtcattttacaggacagcttttatcagttcctggtataaaatccttttagcctcagccttataatatgaatatctatacatacataatacttcatacacacacgatatacatatattcccatgtatatatatgtgtgtgtgtcagccacttacatgtcctgttactcttctatgaatcttaaatttgatattgctgttttgaatctacttcatcccctatgccttctatattctctctgcttgaaatctaccctcactatcttgaatgatgaagcctggtgacaactttttagataattttatgtaagataattatttgctaagtcatccagtgacatactcgggtattgtttgtctccctaccagcagcatctagtaggtacttcaaaatcagagcactttattctgtatttttaattttttctgtctttgcctcttacccaggaatgcaaactcagatgtctatccacagaggcctaaagtgggctgtaacatggtttggcaaactttttctgtaaatagccagatagtaaatatttttagcttttgagtagttttgtgggcaactactcaaccctgtactctgctgttgttgcttgaaagcagccatagacaaaccgtaaacaagtgaggctgactttgttccaatttatcccatttctttgcttttaaaaaaatacctgtgtattcgcttagctggagttggtctacaggctgtagtttgctgaccccaggactagaggtttgttgccatgtgtgaatttgtacttaatctactcagattaaaagaaagaaaagctggaaaatcactgtatttggtgaaatatcccattgtataagtgttcccaaattagcctagaatgttatgaaatattatgagccagtaatgtctataggcttatttctgcctgaaggctactagttttatcttgagaatctcatcctcatttcctggcaaaatgagcacagaataaatgcttgttgaataaataaataaatgaacttcatacattattaatttgtttttgttttctcaaactactaggaaattttgtctgtggctaaaaaaaataaaaaggagaatgaggatgaaaactcctcctctactaatctctgtgtggaagatcttcagaaaaataaagattcgaatagtataattaaagatagattgtctgaaacggttaggcagaatactaaattcttttttgacccagtccggaagtgtaatggtcagccagtaccttttcaacaaccaaagcacttcactggaggagtgatgcgatggtaccaagtagaaggcatggaatggcttagggtaatgaattggaatttttaatacaagatactggttttatttctatagtagcctaatgatttgaggtaccacaacttgagtcatttctatcatgtttcactattatacatttgtatgtggatacttgctttctgatttctttaccctgaatttttagaagtagaaattaccttgttaatggcttccagcacttttatggctttgataaaggactttcctgtgttgttataatttatggtgtgaatatatcagctttaacat

SEQ ID NO: 14865 - DNA, 2014 bp, Homo sapiens
  CDS (72)..(1139)
aagatgcacaagtacctttaaccaaccataagaaatcagaaaagcaagataaagttcagcacacagtatgtatggattgcagtagctacagtacatactgttatcgctgtgatgattttgtggttaatgacaccaagctgggactggtacagaaagtcagagaacacttacagaacttggaaaactcagctttcacagctgacaggcataagaaaagaaaacttttggaaaactcaacactaaacagcaagttattaaaagtaaatggaagcaccactgccatttgtgccacaggccttcggaatttggggaacacatgtttcatgaatgccatccttcagtcactcagtaacattgagcagttttgctgttatttcaaagaactgcccgccgtggagttaaggaatgggaaaacagcaggaaggcggacataccacaccaggagccaaggggataacaatgtgtctttggtagaagagtttagaaagacactctgtgctttatggcaaggcagccagactgcatttagcccagagtccttattttatgttgtttggaagattatgccaaactttaggggctatcaacagcaggacgcccatgaattcatgcgctaccttttggaccacctacacttggaacttcagggcggtttcaacggtgtttcccgctcagcaattctgcaggagaattctactctgtctgcaagtaacaagtgttgcataaatggagcatctactgttgtcacggctatattcggaggcattctccaaaatgaggttaactgcctcatatgtgggacagaatctagaaagtttgatccattcctagacctttcattagatattccaagtcagttcagaagtaagcgctctaagaatcaagaaaatggaccagtttgttcgttacgagattgtcttcgcagttttaccgacttagaagaacttgatgagacagagttatatatgtgccataaatgcaaaaagaaacaaaagtccacaaaaaagttttggattcaaaaactacccaaggtgctatgcttacatttgaaaagatttcattggacagcatatttaagaaataaagttgatacatacgtagaatttccactgagaggcctagacatgaaatgctactactagagcctgagaacagtggcccggagagctgcctgtatgacctcgccgctgtggtggtgcaccatggttccggggttggttctggacattacacagcatacgcaactcacgaaggccgctggttccacttcaatgacagtactgtaacactgactgacgaggagactgtggtgaaggcgaaggcctacatccttttctacgtggaacaccaggccaaagctggatcggataaactttaatacctcctccaaatcatcattcaccaaccataccagagaaacatttccagttttccacaaatacttgatacaagatttaatttcattatgcacttttcaatttcctattttggatttagttttgtcaatggtagtgacttactgaacatgggcaccaactaattttgttgttgttctaccagaaaacctcagcagatgttttgatttgctgctttagttgtaataattcaatttttataggtagttgtaagaacttagtcttatttgacttttttattttatgttaatgttttcagttctcactttgaggcacatttacatcaatgcttttgttcctctcacatgctgaaagcaagatgtgttccttattgtgaagagcgacacaactgcctgctgcctttccacagctataatggacatcaggttgactctaaatcaaggatcatgtgtgcacaatacttgtggcccacaaaatttcacaatgactgctgaggaatcattctttttgcctgtaaaatataacaaagggcatcattaagtagaccaggtaattactgcttgtctctcaaggctgctgtctttatcagcactaactaaataaatttgttggttcagttgtacttgtcctgcaaatac

SEQ ID NO: 14866 - protein, 356 aa, Homo sapiens [sequence omitted]

SEQ ID NO: 14867 - DNA, 2748 bp, Homo sapiens
  CDS (204)..(2600)
tcgacaagaaggacgaggagtctggtagtggctccaatcctttccagcatctggagaagagtgctgttttacaggaggctcgtatattcaatgaaactccaatcaatccaagaagatgtttgcatattcttacaaagattctttacttactgaaccagggtgaacactttggaacaacggaagctacagaagccttctttgcaatgacgcgattgtttcaatctaatgatcaaacattgaggagaatgtgctaccttaccatcaaagaaatggctaccatctctgaggatgtgataattgtcacaagcagtctgactaaagacatgactggaaaagaagatgtataccgaggcccggccatcagagctctctgcaggatcaccgatggaacaatgttgcaagccattgaaagatacatgaagcaggccattgtggataaagtttccagtgtatccagttcagcactggtatcttccctgcacatgatgaagataagctatgatgtggttaagcgctggatcaatgaagcccaagaagctgcatcaagtgataatattatggtccagtaccatgcattgggagtcctgtatcaccttagaaagaatgatcgacttgctgtttccaagatgttgaataagtttactaaatctggtcccaagtcacagtttgcttactgcatgctgatccgaattgccagtcgcttactaaaagaaactgaggatggccatgaaagtccactgtttgatttcattgagagctgcttgcgaaataaacatgaaatggttatttatgaagctgcttcagctatcatccatcttcctaactgcactgcaagagagttggcacctgctgtttcagttcttcaacttttctgtagttctcctaagccagccttgagatatgcagctgtgaggaccttgaacaaggtggcaatgaagcacccctctgctgttactgcctgcaatctggacttagaaaacttaatcacagactcaaacagaagcattgctaccttagccattactacactcctcaaaacaggaagtgagagcagtgtggaccggctcatgaagcagatatcttcttttgtgtctgaaatctcagatgagttcaaggtggtggttgtacaggcaattagtgctctctgtcagaaataccctcgaaagcacagtgtcatgatgactttcctctccaacatgctccgagatgatggaggctttgagtacaagcgggccattgtggactgtataatcagcattgtggaagagaaccctgagagtaaagaagcaggcctagcccacctttgtgaattcattgaggactgtgaacacactgttctggctactaagattctacacttgttgggcaaagagggccctagaacgcctgtcccctccaaatatatccgttttatttttaatagggttgtcctggagaatgaggctgtcagagctgctgctgtgagtgctttggctaaatttggggctcagaatgagagtcttctcccaagcatccttgtactcttacagaggtgtatgatggatactgatgacgaggtacgagacagagctaccttctatctgaatgtgctgcagcagaggcagatggcactaaatgccacatatatctttaatggtttgacggtctctgtaccagggatggaaaaagccttacaccagtacacgctggagccttcagaaaaaccgtttgacatgaaatcaattcctcttgctatggctcctgtctttgaacagaaagcagaaatcacacttgtggctactaagccagagaagttggctccttccaggcaagacattttccaagaacaattggctgccattcctgagtttctgaatataggacccttgttcaagtcttctgagcctgttcaacttacagaagcagagacagaatattttgttcgatgtatcaagcacatgtttaccaatcacatcgtgttccagtttgactgcaccaacactctcaatgaccagctgctggaaaaagtgacagtgcagatggagccatcagattcctatgaagtgctgtcttgtatcccagcccccagccttccttataaccaaccaggaatatgttacactcttgttcgtttgcctgatgatgaccctacagcagttgcaggctcctttagctgcaccatgaagtttacagtccgggactgtgaccctaacactggagttccagatgaggatgggtatgatgatgagtatgtgctggaagatctcgaagtgactgtgtctgaccatattcagaaagtactgaagcctaactttgctgctgcttgggaagaggtgggagatacctttgagaaagaggaaacctttgccctcagttctaccaaaacccttgaagaggctgtcaacaatatcatcacatttctgggcatgcagccatgtgagaggtccgataaagtacctgagaacaagaattcccattcgctctatctggcaggtatattcagaggtggctatgatttattggtgaggtccaggctggccttagccgatggagtgaccatgcaggtgactgtcagaagtaaagagagaacacctgtagatgttatcttagcttctgttggataaatgcttactggacaagaggaaactgatgcacactacatggtcagtgggcttttaggctagtggcatcagtttcccagaatcagacttttgaagatgaacgactttggagaagcaaattaaacatttggccctgagccagcagatc

SEQ ID NO: 14868 - protein, 799 aa, Homo sapiens [sequence omitted]

SEQ ID NO: 14869 - DNA, 2520 bp, Homo sapiens
  CDS (7)..(1914)
gctgcgatggcggaggccgtggagcgcactgacgagctggtccgggagtacctgctcttccgcgggttcacgcacacactgcggcagctggacgccgagatcaaggcggacaaggagaaggggttccgggtggataagattgtggaccagctgcagcagttaatgcaggtgtatgacttggctgcccttcgggattattggagctacttggagcgtcggctcttcagccgcttggaggatatatacagacccacaatccacaagctgaaaaccagcctgtttcgattttatcttgtctacacaatccagacaaacagaaatgacaaggctcaggagttctttgcaaagcaggccacggaactccagaaccaggctgagtggaaggattggtttgtcctgcccttcctgccatccccggacaccaaccccacctttgctacctacttttctcgacagtgggctgacaccttcattgtgtccctgcacaacttcctgagcgtcctgtttcagtgcatgccagtccctgtgatcctgaactttgatgcggagtgtcagaggactaaccaggttcaagaagaaaatgaagttctgcgtcagaagctttttgcattgcaagctgaaatccaccgactgaagaaagaggagcaacagccagaagaggaagaggccttggtccaacacaaattgcctccttatgtctccaacatggaccgcctgggggactcggaacttgccatggtgtgcagccaaaggaatgcctccctctcccagtcacctcgtgtgggcttcctgtcctcgctgctgcctcagagtaagaagagcccctcaaggttgtcgcctgctcagggccctcctcaacctcagagctcggccaagaaagagtccttcggtggtcagggcaccaagggaaaggacccgacgtccggagccaaggatgggaagagcctcctcagcgggctggccactggggagtccggttggtcacagcaccggcagcggcgcctgcaggaccatggcaaggagaggaaggagcttttctccacaaccacttcccagtgtgcagagaagaaaccagaagccagtggcccagaggctgagccctgcccagagctccacacggagccagtggagccactgactcgggcatcctcggcaggccctgagggtggaggagtccgccccgagcagccctttattgtgctgggacaggaggagtacggggaacaccactcatccatcatgcactgcagagtggactgctctgggaggagagtcgccagcttagacgtagatggggtcatcaaagtgtggtccttcaaccccatcatgcagaccaaagcatcctccatttccaaatcaccgctgctgtctttggaatgggccaccaaacgggacagactgctcttgctgggcagtggtgtgggaacagtgcgtctctatgacacggaagccaagaagaatctctgtgaaatcaatatcaacgacaacatgcccagaatcctgtctcttgcgtgcagccccaacggggcctctttcgtctgttcggcagcagctccgagcctcacttcccaggtggacttctcagcaccagacatcggcagcaagggcatgaaccaggttcctggcaggctgctgctgtgggacacgaaaaccatgaagcagcagctccagttctccctggatccagaacccattgctatcaactgtacagccttcaatcacaacgggaacctgctggtcacaggggcagctgatggcgtcatccggctgtttgttcatccagtggaacatccacaagagtggcctcaaggtatccgagtacagcctcccctcagatgccacgggcccctttgtgctgtctggatacagcggctacaagcaggttcaagtccccaggggccgactcttcgcttttgactcggagggaaattacatgctgacatgttctgccacaggcggcgtcatctacaagctgggtggcgatgagaaggttctggagagctgcttgagcctaggtggccaccgagcccctgtggtcaccgtggactggagcactgccatggactgtgggacctgcctcaccgcctccatggatggcaagatcaagctgaccaccctcctggcccataaagcctgatgacttgccccaagggccacccgaggaagcagtattatctgcggtggggggaggagatataggacaggaaaaccacgtgctccactccagctccctgccagtgcagtgactctgcagggaaagactggcaaggaggctcaggtgcttccatctgtggtgactggaatgggacccacgtggagtaggtgacatatgcttcccagagactggtattgtggctgtgccaggagtacatgtgagactatgggaggaaagctccggaagaaggagaaacattgcagtggctactgtgttggcccagtagaaattgacagtattttgtatatatgtgcccatttatctttttcttttttaaaaaaagagaatactcttgtggccccctg

SEQ ID NO: 14870 - protein, 636 aa, Homo sapiens
MAEAVERTDELVREYLLFRGFTHTLRQLDAEIKADKEKGFRVDKIVDQLQQLMQVYDLAALRDYWSYLERRLFSRLEDIYRPTIHKLKTSLFRFYLVYTIQTNRNDKAQEFFAKQATELQNQAEWKDWFVLPFLPSPDTNPTFATYFSRQWADTFIVSLHNFLSVLFQCMPVPVILNFDAECQRTNQVQEENEVLRQKLFALQAEIHRLKKEEQQPEEEEALVQHKLPPYVSNMDRLGDSELAMVCSQRNASLSQSPRVGFLSSLLPQSKKSPSRLSPAQGPPQPQSSAKKESFGGQGTKGKDPTSGAKDGKSLLSGLATGESGWSQHRQRRLQDHGKERKELFSTTTSQCAEKKPEASGPEAEPCPELHTEPVEPLTRASSAGPEGGGVRPEQPFIVLGQEEYGEHHSSIMHCRVDCSGRRVASLDVDGVIKVWSFNPIMQTKASSISKSPLLSLEWATKRDRLLLLGSGVGTVRLYDTEAKKNLCEININDNMPRILSLACSPNGASFVCSAAAPSLTSQVDFSAPDIGSKGMNQVPGRLLLWDTKTMKQQLQFSLDPEPIAINCTAFNHNGNLLVTGAADGVIRLFVHPVEHPQEWPQGIRVQPPLRCHGPLCAVWIQRLQAGSSPQGPTLRF

SEQ ID NO: 14871 - DNA, 2867 bp, Homo sapiens
ttcacatgatcaaggaagtttatggatgcgtttgtggaaatcttactctatgaacttgttggattagatgctgttttattctctactaagtgaaaagtgctttatttcagtgctttcccatggttgggagagagtagctgttaactattctgggtaatgggggtgagtatgttgaggaagagatttagaaccagaagagtgaagagactcaaactgttccataacaaggaaagctttaaagaccttgtatttcacagtctggagaactagagggatctgactcttggtcagttcatgtaacaaattatttattgagtacttgctgggctctcaagattcatgctttgagcacaggcagtcattcagtttccagtccacctgattacatcagcatgcacttagttttctttcttgttcacaaggacttttgatcatgcaagacctggccaagtcttctataatccagatgggtttcctggggctgttacttgagtattcctgtcaaaatattttcgtgaaccctgcctctcttagcaaacactacttcataagtgttaacaaacatccttttaataatctattccagaatattctccaggagtaagtttactggttgggatttgtggaagccattttctcatgtttcccaaataagatatgtagtcttcagctgattcctcaaagatgattgacagggagtttcacccatctttgtggtagtttgtgagttcctaggcatgtaagtgattaaaagattgagtacctgctctcctaatatctacccacttttaccatgtcagtgttttatgaattagatcacttaccaagagaaagcagaaacgaaatacttgaatctgacaatatccgactggcccttttcattgctctggatttattttccacatcaatctctttggggtggccctagcctattattcctgtgggttcagctgaggcatggttagcctgggtttataattcagtttacgttaaacattccctgtgcagcaacagctgttcatttaggtactctttttttttttctccttattacagttacttttggtattatgtgctttatctttaaaagctttctagctctaggaaattgttttccctgtttgtgtctattttattgcatcttgtgtaacactgtggttatatctataccaacaactttttgttgctatggataccacagattgtcctgaattaaaaccctaacataataaatgtctgtttagccgttactttactgagtaataatactatattgtggcagtatggccctttaatactaaggaggtatggtgtagaaattatttgaacactcatatccaaatgttattaatgatgtttgacagttttctcaatgcttaatgatattcctcactcctcattccagggtagaggagggtttggtcccaggctatggacaaactgctaatttgtttgaagtttgaattatttttcatgggaaagggaagtgataggaaatgaccaagaccatccacttttgacttgagtatggatcgagtataagtaatagtttcctagcctcactgattgtaccatgaactgacagacctaccagtcaaattcatgtacccagataatggtctctcacatggcaacaaagtacacagcagtttgcagtatgtgtctcttttaaagccagttcagtgttttcaccttgacgaccactcctgcaaacagttctcatagagctcttctctgctccccaaatcaatatattttgaagctatgtcaaatatttacatagaaaggaaataaagttgtatgtgctttgaaaccagcaaaatcctttgtacaacacctctcttctccttctatgtttatgaatagagttcgtggaatattgccatagtgcaaataatgacttccgtgtatcacttataccctgtaggggtgagctttcaccttaggtgtggttatatcctagcagtgtatcaagcccactcaaataatggtctatatttaaaagtatgtgtctagtttacttatttatgtcatttaacatccataaatgtacatctctcagttgtatatcatgattgtaaatcagaaattttgatggcaaaaatattctaaaacaacattcttcaggggaaagaaaaacatggataccttatctagcattgctcataaaagtactcatgttcatcctttttggaaactattaatcatgctagccttagatcattttaagctcctttgctcaaaccaatcattgatgtgcagtatgaccagcagctagtaagtctgtggtgctaccagtatagcttggaagatggttctgaattaatacctcagaatgatatcaaaagtaaaagagtggttctattgctaaatatattgactagctttcttataacaattttactttgaaattcaaagttccaaagctaaatgtctaaaagaagtaactgcagcttgttctgctgattttggaaaatagtattaaccatgtaagatctttggggttggagtgaaggtcttatctgcattaattttgttaatgcacattgtagatgtggagaacatcttgacctgcataaggattgcgtctcattttattgtgtagtgctttttcgaaatatttacatttctttggttcccatgttcatgtattctggagaagtaaaatttcttgattactgggcagaccctaaaactactaagagaaacataacatgtagttagctgtctgctcatggtttgttcaaatctaagctaaccttaatggtgctgtgtccgctgtccacagaaaacgcccttaagtagccctaccttactccttagagcttattttgcttttgtatttaataaaagctgtcttaaatgtt

SEQ ID NO: 14872 - DNA, 2442 bp, Homo sapiens
  CDS (144)..(1199)
aaaaaaatcgctgggcgactgatttcgagtttccggtcaggttaggccgggggggtgcggtcctggtcggaaggaggtggagagtcgggggtcaccaggcctatccttggcgccacagtcggccaccggggctcgccgccgtcatggagagcggagggcggccctcgctgtgccagttcatcctcctgggcaccacctctgtggtcaccgccgccctgtactccgtgtaccggcagaaggcccgggtctcccaagagctcaagggagctaaaaaagttcatttgggtgaagatttaaagagtattctttcagaagctccaggaaaatgcgtgccttatgctgttatagaaggagctgtgcggtctgttaaagaaacgcttaacagccagtttgtggaaaactgcaagggggtaattcagcggctgacacttcaggagcacaagatggtgtggaatcgaaccacccacctttggaatgattgctcaaagatcattcatcagaggaccaacacagtgccctttgacctggtgccccacgaggatggcgtggatgtggctgtgcgagtgctgaagcccctggactcagtggatctgggtctagagaccgtgtatgagaagttccacccctcgattcagtccttcaccgatgtcatcggccactacatcagcggtgagcggcccaaaggcatccaagagaccgaggagatgctgaaggtgggggccaccctcacaggggttggcgaactggtcctggacaacaactctgtccgcctgcagccgcccaaacaaggcatgcagtactatctaagcagccaggacttcgacagcctgctgcagaggcaggagtcgagcgtcaggctctgcaaggtgctggcgctggtttttggctttgccacatgtgccaccctcttcttcattctccggaagcagtatctgcagcggcaggagcgcctgcgcctcaagcagatgcaggaggagttccaggagcatgaggcccagctgctgagccgagccaagcctgaggacagggagagtctgaagagcgcctgtgtagtgtgtctgagcagcttcaagtcctgcgtctttctggagtgtgggcacgtttgttcctgcaccgagtgctaccgcgccttgccagaacccaagaagtgccctatctgcagacaggcgatcacccgggtgatacccctgtacaacagctaatagtttggaagccgcacagcttgacctggaagcacccctgcccccttttcagggatttttatctcgaggcctttggaggagcagtggtgggggtagctgtcacctccaggtatgattgagggaggaattgggtagaaactctccaaacccatgcctccaatggcaggatgctgcctttcccacctgagaggggaccctgtccatgtgcagcctcatcagagcctcaccctgggaggatgccgtggcgtctcctcccaggagccagatcagtgcgagtgtgactgaaaatgcctcatcacttaagcaccaaagccagtgatcagcagctcttctgttcctgtgtcttctgtttttttctggtgaatcgttgcttgctgtggacttggtggaggactcagaggggaggaaaggctgggccccgagtacaacggatgccttgggtgctgcctccgaagagactctgccgcagcttttcttctttttcctcatgccccgggaaacagtctttcttcagaattgtcaggctgggcaggtcaacttgtgttcctttcccctcacctgcttgcctccttaacgcctgcacgtgtgtgtagaggacaaaagaaagtgaagtcagcacatccgcttctgcccagatggtcggggccccgggcaacagattgaagagagatcatgtgaagggcagttggtcaggcaggcctcctggtttcgccactggccctgatttgaactcctgccacttgggagagctcggggtggtccctggttttccctcctggagaatgaggcgcagaggcctcgcctcctgaaggacgcagtgtggatgccactggcctagtgtcctggcctcacagcttccttgcaaggctgtcacaaggaaaagcagccggctggcaccctgagcatatgccctcttggggctccctcatccagcccgtcgcagctttgacatcttggtgtactcatgtcgcttctccttgtgttaccccctcccagtattaccatttgcccctcacctgcccttggtgagccttttagtgcaagacagatggggctgttttcccccacctctgagtagttggaggtcacatacacagctctttttttattgcccttttctgcctctgaatgttcatctctcgtcctcctttgtgcaggcgaggaaggggtgccctcaggggccgacactagtatgatgcagtgtccagtgtgaacagcaggaattaaacatgttgcaacc

SEQ ID NO: 14873 - protein, 352 aa, Homo sapiens
MESGGRPSLCQFILLGTTSVVTAALYSVYRQKARVSQELKGAKKVHLGEDLKSILSEAPGKCVPYAVIEGAVRSVKETLNSQFVENCKGVIQRLTLQEHKMVWNRTTHLWNDCSKIIHQRTNTVPFDLVPHEDGVDVAVRVLKPLDSVDLGLETVYEKFHPSIQSFTDVIGHYISGERPKGIQETEEMLKVGATLTGVGELVLDNNSVRLQPPKQGMQYYLSSQDFDSLLQRQESSVRLCKVLALVFGFATCATLFFILRKQYLQRQERLRLKQMQEEFQEHEAQLLSRAKPEDRESLKSACVVCLSSFKSCVFLECGHVCSCTECYRALPEPKKCPICRQAITRVIPLYNS

SEQ ID NO: 14874 - DNA, 2570 bp, Homo sapiens
  CDS (42)..(1439)
agttgaaagaggccatcaagatcctggagagcctcaagaacatgactgtggagcagctgctgacgggctcgcccacctctccgactgtggagcctgagaagccaactcgggagaagaagtttctggatgacatcaagaagctacaggaaaacctcaagaagaccctggacaatgtggccattgtagaggaggagaagatggaagcagtgcccgacgtagagcgcaaggaggacaagcccgaggggcagtcacctgtgaaggctgagtggcccagcgaaaccccggtgctgtgccagcagtgtggcggcaagcctggcgtcaccttcaccagcgccaagggcgaggtcttctccgtactggagtttgcaccctcaaatcattcttttaagaaaattgagttccagcctccagaagccaagaagttcttcagcacagtgcggaaggagatggcgctgctggctacctcactgcctgagggcatcatggtcaagacttttgaagatagaatggacctcttctcagctctcatcaagggccccactcgaaccccctacgaggatggcctctacttgtttgacatccagctccccaacatctacccagccgtgcccccccacttctgctacctctcccaatgcagtggccgcctgaaccccaacctgtatgacaatgggaaggtgtgtgtcagcctcctgggcacctggattggaaaggggacagagaggtggacaagcaagtccagccttctccaggtgctcatctccatccaaggtctgatcctggtaaatgaaccatactacaacgaagccggcttcgacagtgaccgaggcctgcaggaaggctatgaaaacagtcgctgttacaatgagatggcgctgatccgcgtggtgcagtccatgacccagctggtgcggcggccccccgaggtctttgagcaggagatcaggcaacactttagcactggtggctggcggctggtgaaccgtatcgagtcctggctggaaacccataccctgctggagaaggcccaggcactgcccaacggggtgcccaaggccagcagctcgccagagcccccagctgtagccgagctgtcagactccggccaacaagaacctgaggatggagggccagccccaggagaggcctcccagggctcagactcagagggcggtgcccagggcctggcctcagctagcagggaccacacagaccagacttcggagaccgcaccagacgcatcggtgccacccagtgtgaaaccaaagaagcggagaaagagctaccggagcttcttacctgagaagagtggctaccctgacatcggcttccccctcttcccaccttccaagggtttcatcaagagcatccggggtgtcctgacgcagttccgggctgccctgctagaggcaggcatgccggagtgcacagaggacaagtagctgccaggcacagaggaaagagcatcaccgtgggagaggccagccgccgcctgctcactcccccccggaatcacccctcttcccatgcccctctgtccccactgcaaacccactgccctcttctccccaaggtgagtttgatgctgaagtgcaagaagtgtgttgagatgctgccgtttctattttgaagcgagctttcaacaggcgggtcccctgtggcaaagaaaatcggaaccctgttgccgattttccatttgtcaccccagcagaatgtccggcacttgctcccttgctgccccttctcaggtcagaggcgggtgttccagggcctgccgcggggctctctgggccggttccctgcagacccgcaggagagcacatgtgccttgcatgaagtgtgggttgcgccaacaattcccctggtccctttcaacctgtttagttcaactcaagcctccctgtgtcccagaccctcctgctgccaccaccacccaggtcctccctagtcctccagcgtcaacactatcccttgggagttgtagctgctgtcactgactcccggctatacatggcctgtcgaccacgttatagccctcaggcctgttgaacttgctctctaagagaggttgggaccaggctaggttccgggtgacgcccaggagaggtggtggccttcacacatgcacatggagttgaggaccagggagctgcagggaaagcaacagctataggtgccttgctcttctgtcggaggctgctgggggcaagagcagctgcacaaggccagggcaagtgctagggcccctcccccatcacatggtcacactgggacaggcgtgcagctcactgaactccaagcgagccagccctctcttggactagaaggcctactgtcagcccttcgcttacaaactgcaggctcaatccgaaggggacggccggcgggggctctcctagtgcccagagacaggcccagaggtttacaagttttctaagcttttgataatgtgaagctccaggccgagaggatgctgttgagcacattgcagctatgtaatttttggtgtatgtatgtaatatttaaggttggaaaaaaaactcaaaagcaaagatattaactcttattag

SEQ ID NO: 14875 - protein, 466 aa, Homo sapiens [sequence omitted]

SEQ ID NO: 14876 - DNA, 2656 bp, Homo sapiens
  CDS (46)..(2520)
gctgcgggcccgggccatggccgccgccgatgccgagagacacctatggctgccgatgaaggctcagcagagaaacaggcaggagaggcccacatggctgcggacggtgagaccaatgggtcttgtgaaaacagcgatgccagcagtcatgcaaatgctgcaaagcacactcaggacagcgcaagggtcaacccccaggatggcaccaacacactaactcggatagcggaaaatggggtttcagaaagagactcagaagcggcgaagcaaaaccacgtcactgccgacgactttgtgcagacttctgtcatcggcagcaacggatacatcttaaataagccggccctacaggcacagcccttgaggactaccagcactctggcctcttcgctgcctggccatgctgcaaaaacccttcctggaggggctggcaaaggcaggactccaagcgcttttccccagacgccagccgccccaccagccacccttggggaggggagtgctgacacagaggacaggaagctcccggcccctggcgccgacgtcaaggtccacagggcacgcaagaccatgccgaagtccgtcgtgggcctgcatgcagccagtaaagatcccagagaagttcgagaagctagagatcataaggaaccaaaagaggagatcaacaaaaacatttctgactttggacgacagcagcttttaccccccttcccatcccttcatcagtcgctacctcagaaccagtgctacatggccaccacaaaatcacagacagcttgcttgccttttgttttagcagctgcagtatctcggaagaaaaaacgaagaatgggaacctatagcctggttcctaagaaaaagaccaaagtattaaaacagaggacggtgattgagatgtttaagagcataactcattccactgtgggttccaagggggagaaggacctgggcgccagcagcctgcacgtgaatggggagagcctggagatggactcggatgaggacgactcagaggagctcgaggaggacgacggccatggtgcagagcaggcggccgcgttccccacagaggacagcaggacttccaaggagagcatgtcggaggctgatcgcgcccagaagatggacggggagtccgaggaggagcaggagtccgtggacaccggggaggaggaggaaggcggtgacgagtctgacctgagttcggaatccagcattaagaagaaatttctcaagaggaaaggaaagaccgacagtccctggatcaagccagccaggaaaaggaggcggagaagtagaaagaagcccagcggtgccctcggttctgagtcgtataagtcatctgcaggaagcgctgagcagacggcaccaggagacagcacagggtacatggaagtttctctggactccctggatctccgagtcaaaggaattctgtcttcacaagcagaagggttggccaacggtccagatgtgctggagacagacggcctccaggaagtgcctctctgcagctgccggatggaaacaccgaagagtcgagagatcaccacactggccaacaaccagtgcatggctacagagagcgtggaccatgaattgggccggtgcacaaacagcgtggtcaagtatgggctgatgcgcccctccaacaaggccccgctcctcgtgctgtgtgaagaccaccggggccgcatggtgaagcaccagtgctgtcctggctgtggctacttctgcacagcgggtaattttatggagtgtcagcccgagagcagcatctctcaccgtttccacaaagactgtgcctctcgagtcaataacgccagctattgtccccactgtggggaggagagctccaaggccaaagaggtgacgatagctaaagcagacaccacctcgaccgtgacaccagtccccgggcaggagaagggctcggccctggagggcagggccgacaccacaacgggcagtgctgccgggccaccactctcggaggacgacaagctgcagggtgcagcctcccacgtgcccgagggctttgatccaacgggacctgctgggcttgggaggccaactcccggcctttcccagggaccagggaaggaaaccttggagagcgctctcatcgccctcgactcggaaaaacccaagaagcttcgcttccacccaaagcagctgtacttctccgccaggcaaggggagcttcagaaggtgctcctcatgctggtggacggaattgaccccaacttcaaaatggagcaccagaataagcgctctccactgcacgccgcggcagaggctggacacgtggacatctgccacatgctggttcaggcgggcgctaatattgacacctgctcagaagaccagaggaccccgttgatggaagcagccgaaaacaaccatctggaagcagtgaagtacctcatcaaggctggggccctggtggatcccaagatacagaaaacttctaaagtttatacggagtctcaagagacccagagaagccaaacaattttgtgaaagaacagagttggagaactcacacttgctgatttcaaaacttactatatacggccacagtaatgaaaacagtgtgggactggcataaagacagaaatagagaccaatggaataaaataaaaagcccagaaat

SEQ ID NO: 14877 - protein, 825 aa, Homo sapiens
MAADEGSAEKQAGEAHMAADGETNGSCENSDASSHANAAKHTQDSARVNPQDGTNTLTRIAENGVSERDSEAAKQNHVTADDFVQTSVIGSNGYILNKPALQAQPLRTTSTLASSLPGHAAKTLPGGAGKGRTPSAFPQTPAAPPATLGEGSADTEDRKLPAPGADVKVHRARKTMPKSVVGLHAASKDPREVREARDHKEPKEEINKNISDFGRQQLLPPFPSLHQSLPQNQCYMATTKSQTACLPFVLAAAVSRKKKRRMGTYSLVPKKKTKVLKQRTVIEMFKSITHSTVGSKGEKDLGASSLHVNGESLEMDSDEDDSEELEEDDGHGAEQAAAFPTEDSRTSKESMSEADRAQKMDGESEEEQESVDTGEEEEGGDESDLSSESSIKKKFLKRKGKTDSPWIKPARKRRRRSRKKPSGALGSESYKSSAGSAEQTAPGDSTGYMEVSLDSLDLRVKGILSSQAEGLANGPDVLETDGLQEVPLCSCRMETPKSREITTLANNQCMATESVDHELGRCTNSVVKYGLMRPSNKAPLLVLCEDHRGRMVKHQCCPGCGYFCTAGNFMECQPESSISHRFHKDCASRVNNASYCPHCGEESSKAKEVTIAKADTTSTVTPVPGQEKGSALEGRADTTTGSAAGPPLSEDDKLQGAASHVPEGFDPTGPAGLGRPTPGLSQGPGKETLESALIALDSEKPKKLRFHPKQLYFSARQGELQKVLLMLVDGIDPNFKMEHQNKRSPLHAAAEAGHVDICHMLVQAGANIDTCSEDQRTPLMEAAENNHLEAVKYLIKAGALVDPKIQKTSKVYTESQETQRSQTIL

SEQ ID NO: 14878 - DNA, 3046 bp, Homo sapiens
  CDS (86)..(2464)
gaattcagtggccaaaggagtatttttggagtgccttgagccatatattttaagtgataaattggtgggaatcacaccccaagtaatgaaagacttgattgttcatttccaagataaaaaattaatggaaaatgtggaagcgctcattgtacatatggatatcaccagcctagatattcagcaggtagttctcatgtgttgggaaaatcgtttatatgatgctatgatctatgtctacaacagaggcatgaatgaatttattagtccaatggagaaacttttcagagtcattgctcctcctctgaatgcaggaaaaacactaacagatgaacaagttgttatgggcaataagctccttgtatatattagctgttgtctagcaggtcgtgcctatccccttggtgacatccctgaagatctggttcccttggttaaaaaccaggtttttgaatttctaattcgcctgcattcatcagaggcttctcctgaggaagaaatctatccttacattcggactttgctacattttgacacaagagaatttctcaatgtattggcactgacttttgaagattttaaaaatgacaagcaagctgtggaatatcaacagcgaattgtggatattttgttgaaagttatggtggagaattcagactttaccccctcacaagtaggatgtctctttaccttccttgctcggcagcttgcaaagcctgacaacaccttgtttgtaaacagaacactttttgatcaggtccttgaattcctttgtagtcctgacgatgactcccgacactctgaaagacagcaggtccttttagaattgctgcaggctggaggcatagttcaatttgaagagagtcgactcatccggatggcagaaaaagctgagttctatcaaatttgtgaatttatgtatgaaagagaacaccaatatgacaaaattattgattgctacttacgtgaccctctgcgagaggaagaagtctttaattacattcacaatatcttatccattcccggacacagtgcagaggagaagcagtctgtatggcagaaagcaatggatcatattgaggaactcgtgtccctgaagccttgtaaagctgcggagctggttgccacccacttttctggacatattgaaacggtcattaaaaaacttcagaaccaggttttgcttttcaaatttttgaggagtcttcttgacccaagggaaggtattcatgtaaatcaagaattactgcaaatatctccttgtatcacagagcagttcattgagctgttgtgtcagttcaacccagcccaagttatagagactctgcaagtccttgagtgctaccgtctggaagaaactattcagattactcagaagtatcaacttcatgaagtcaccgcttatctattggaaaagaaaggagatattcatggtgccttcctaataatgttagagagactacaaagcaaacttcaagaggtaacacatcaaggtgaaaataccaaagaggatccctcattgaaggatgttgaagatactatggtggagaccattgctctttgccagagaaattcacataatttgaaccagcagcaacgtgaggccctttggttcccgttattggaggcaatgatggcccctcagaagctgtccagttcagccattcctcatctacactctggagctctgaagtctttgaccatgcaagttttaaatagcatggcagcatttattgcccttccatcaatcttgcaaagaatcttacaggatccagtttatggaaaaggaaaacttggagaaatccagggacttatcttgggaatgttagatacctttaactatgaacaaaccctgctggaaacaacaaccagccttctaaaccaagatctccattggtcattgtgtaacctgagagcttcggtcaccagaggactgaatcccaaacaagattactgctctatatgtttgcagcagtacaagagacgccaagaaatggctgatgaaataattgtctttagctgtggccatttgtatcactcattctgcctacaaaacaaagaatgcactgtggaatttgagggccaaacaagatggacatgctacaaatgcagttcaagtaacaaagtaggaaaactcagtgaaaattcatctgaaattaaaaagggaaggataaccccatcacaggtaaaaatgtctccatcgtatcatcagtccaaaggggatcccactgctaaaaagggaacctcagaacctgttctggatccacagcaaatccaagcatttgatcagctttgccgtctctaccgaggaagctccaggctggctctcctcacggaactctcccagaatcgcagcagcgagagctataggccattcagtggctcgcagagtgctcctgctttcaacagcatcttccagaatgagaacttccagctgcagctcattcctccacctgtgactgaggattgatgactccatggagcctggcccaggagaaccagagatgatcccgaggcagctggggagaggccccgcctctggtgggcttggcctccaccacctcccacgcttctgagaagaggttccaaattgggcttctgtgcccagagcgtccacagcaccattcccagtgtagactcccagtcttctccacattgctgtcatggcgtcagttcaccagactcattgattttgttttgcttgttaagcaaaggaatgtcacatacctctgtccagctttttaggaaatacatttcgcctattgcgactttttccatttaccctgaagcctagaaagtaggtggaactcacacaaatggcattccagagtctgccatactccgtctcctccagctgctggataatacagaggaacttcaacttctacagggaacagtggttggccaggctgcagtataactgaagcatgccttggagagagcagacactgtgggggccagggccatctccctttaatgtgttcatgttaaaacctatttgagtgtaagacttgccctttctaacaataaatgctccgtgtttaagttc

SEQ ID NO: 14879 - protein, 793 aa, Homo sapiens [sequence omitted]

SEQ ID NO: 14880 - DNA, 2514 bp, Homo sapiens
  CDS (111)..(1367)
aggaagaggataaaagccagatctcctttgataacctcactccaagtgggacgctggggaaagactaccataagtcagtggaggtttttcccttaaaggcaagaaaatctatggaaagagaaggctacgagtcctcgggcaatgatgactacaggggtagttacaacaccgtgctctcacagcctttatttgaaaagcaggacagagaaggtccagcctccacgggaagcaaactcaccattcaggaacatctgtaccccgcgccttcatcacctgagaaagaacagctgctggaccgcagacccactgaatgtatgatgtcgcgatcagtagatcacctcgagagacctacgtccttcccacggcccggccagttaatctgctgcagttctgtcgaccaggtcaatgacagcgtttacaggaaagtactgcctgccttggtcatcccggctcattatatgaaactccccggggaccactcctatgtcagccagcccctcgtcgtcccggctgatcagcagcttgagatagaaagactacaggctgagctgtccaatccccatgccgggatcttcccacacccgtcctcacagatccagccccagcccctgtcttcccaggccatctctcagcagcacctgcaggatgcgggcacccgggagtggagccctcagaacgcatccatgtcggagtctctctccatcccagcttccctgaacgacgcggctttggctcagatgaacagtgaggtgcagctcctgactgaaaaggccctgatggagcttgggggtgggaagccgcttccgcacccccgggcgtggttcgtctccttggatggcaggtccaacgctcacgttagacattcatacgttgatctccaaagagctggaaggaacggaagtaatgatgccagtttggactctggcgtagatatgaatgaaccaaaatcagcccggaagggaaggggagatgctttgtctctgcagcagaactacccgcccgtccaagagcaccagcagaaagagcctcgagccccagacagcacggcctacacgcagctcgtgtacctggatgacgtggaacagagtggtagcgaatgtgggaccacggtctgtacccccgaggacagtgccctgcgatgcttgttggaggggtcgagtcggagaagtggtggccagctgcccagcctgcaggaggagacgaccagacggactgcggatgccccctcggagccagcagccagcccccaccagagaagatctgcccacgaggaagaggaagacgatgatgatgatgaccaaggagaagacaagaaaagcccctggcagaaacgggaggagaggcccctgatggcgtttaacattaaatgagctatcgcagacccacctgactgtggaatataaaattgccaaatatcctttctcatggaagcgcgtacccgttcgtggaggaaacggaacggcagcccagccgtgggacggacgtggacgtttactgcattcctgtttgccgtgtaaatgttagaaaggaattaaagttattactcggaataaaggatgactttggcggatgtcgcccctgcaaggaggtggctgaaagtggtgtccagatgtccttccgaggactcggcgtatccgccaccagggacattaagaaaccgcacgtgatgtcgctatgctctaacgatcacctcagttctccctcggattctgggaacagatgaaactttttgcatcgcttgagtcatttttatcacaataatcctactgtgaagctgtcgttgagaacttaggttggcacgtagcgtctcaaggtatgcgttctctcaaaggaaagctatgcatcgctgcttcgttgtctgattttgcttagattttgctttggttaggttgcgttttggggtttgcctttttttgttgtcgcttaaatgcaatttggttgtaaagatttgattcctttgtgttcatctgttccgcttctcagcggtccatctcagcgtctcccttcaggaaccgctgagtgtcctctcttaacatccaagccttttaatgaaatcgtactgaaatctgtatcagctaagagtcctccaatcctggtcccattaactccaagtgcctttttgacagtgacaacagacagtccctcgctttttgttgttgttggttttcttaacccctttaatggaactgcctggattttatacagttattaaaggatgtctcttttgctttaaactgcatgctgccaagtgccatttggggtcagcatcctcgtttcaacacagtgtgctctctagttatcatgtgtaacgtgggttctgtttagcgaagatagactagaggacacgttagagatgcccttccctgctccatccctgtggcaccattatggttttttggctgtttgtatatacggttacgtattaactctggaatcctatgggctcatcttgctcacccaatgtgggagtctggtttgagcaagcgagctgaatgtgactattaaaaaaaattt

SEQ ID NO: 14881 - protein, 419 aa, Homo sapiens [sequence omitted]

SEQ ID NO: 14882 - DNA, 2387 bp, Homo sapiens
  CDS (316)..(1800)
attcagttctcgagctccagccctcagcgcatgcgcaagacgagtcgcctgagggaactgatctcagctcgggcccgcgttacatcctcctcctcttcttccttcggcccagctttccttaggggctgcaacccggacgccgaggccggtttcggagtggggagtgcccattttctctccttcccacgttcctggcccccagacgccatttgcaggcgggtggcttgggtcagcctccccgcccccacccgactcccgtcacgggagagcgcacaccgcgccccgagaaccaatcagcagccgcgttaggtaaccatgtctgagtctggacacagtcagcctggactctatgggatagagcggcggcgacggtggaaggagcctggctctggtggcccccagaatctctctgggcctggtggtcgggagagggactacattgcaccatgggaaagagagagaagggatgccagcgaagagacaagcacttccgtcatgcagaaaacccccatcatcctctcaaaacctccagcagagcggtcaaaacagccaccacctccaacagcccctgctgccccgcctgctccagcccctctggagaagcccatcgttctcatgaagccacgggaggaggggaaggggcctgtggccgtgacaggtgcctctacccctgagggcaccgccccaccaccccctgcagcccctgcgccacccaagggggagaaggaggggcagagacccacacagcctgtgtaccagatccagaaccggggcatgggcactgccgcaccagcagccatggaccctgtcgtgggtcaggccaaactactgcccccagagcgcatgaagcacagcatcaagttggtggatgaccagatgaattggtgtgacagtgccatcgagtacctgttggatcagactgatgtgttggtggttggtgtcctgggcctccaggggacaggcaagtccatggtcatgtcattgttgtcagccaacactccagaggaggaccagaggacttatgttttccgggcccagagcgctgaaatgaaggaacgagggggcaaccagaccagtggcatcgacttctttattacccaagaacggattgttttcctggacacacagcccatcctgagcccttctatcctagaccatctcatcaataatgaccgcaaactgcctccagagtacaaccttccccacacttacgttgaaatgcagtcactccagattgctgccttccttttcacggtctgccatgtggtgattgttgtccaggactggttcacagacctcagtctctacaggttcctgcagacagcagagatggtgaagccctccaccccatcccccagccacgagtccagcagctcatcgggctccgatgaaggcaccgagtactacccccacctagtcttcttgcagaacaaagctcgccgagaggacttctgtcctcggaagctgcggcagatgcacctgatgattgaccagctcatggcccactcccacctgcgttacaagggaactctgtccatgttacaatgcaatgtcttcccggggcttccacctgacttcctggactctgaggtcaacttattcctggtacccttcatggacagtgaagcagagagtgaaaacccaccaagagcaggacctggttccagcccactcttctccctgctgcctgggtatcgtggccaccccagtttccagtccttggtgagcaagctccggagccaagtgatgtccatggcccggccacagctgtcacacacgatcctcaccgagaagaactggtaagagctctttgcagagggggtcaatttgaggcaccccaccctggtgtagagagaagggggcgtcccttagatcggcatgaccttgtgaagcccctcctctccagatcccaggttccttttctggaacagtgatgattgctactgtcttgtaagcatctcacccatgtggcaacatgctgtttcctgtgactttgaatcctcctaatcagccagcatcatgtaggtccttgtcaccagttttcctggtggggaaatttaggctcggggaaaagtgttacatagcaaggccacacatctgtggctaggagtcatttgattgctaggagtaggaccagtgaccagatttagcttaaggaagatttattccagggacctgatcacagaaagcagggccctgcagcagatgggaaccaggaagccatcagggtctcattcctcacacttctgcatttgtcttgtttcctgcctctggctttctctccctgctttcacttggcccggcactagctctgtggcccctactttacattacttctttgtccagagctctcagcatatgagtccaggtcttcctcatcttacttc

SEQ ID NO: 14883 - protein, 495 aa, Homo sapiens
MSESGHSQPGLYGIERRRRWKEPGSGGPQNLSGPGGRERDYIAPWERERRDASEETSTSVMQKTPIILSKPPAERSKQPPPPTAPAAPPAPAPLEKPIVLMKPREEGKGPVAVTGASTPEGTAPPPPAAPAPPKGEKEGQRPTQPVYQIQNRGMGTAAPAAMDPVVGQAKLLPPERMKHSIKLVDDQMNWCDSAIEYLLDQTDVLVVGVLGLQGTGKSMVMSLLSANTPEEDQRTYVFRAQSAEMKERGGNQTSGIDFFITQERIVFLDTQPILSPSILDHLINNDRKLPPEYNLPHTYVEMQSLQIAAFLFTVCHVVIVVQDWFTDLSLYRFLQTAEMVKPSTPSPSHESSSSSGSDEGTEYYPHLVFLQNKARREDFCPRKLRQMHLMIDQLMAHSHLRYKGTLSMLQCNVFPGLPPDFLDSEVNLFLVPFMDSEAESENPPRAGPGSSPLFSLLPGYRGHPSFQSLVSKLRSQVMSMARPQLSHTILTEKNW

SEQ ID NO: 14884 - DNA, 2410 bp, Homo sapiens
  CDS (248)..(2410)
taaagaacgaacttttgatccggagagagtggagagagagagacgcttaatacggaaggaaaaagtggaaaaggacaaaactgacaagcagaaacgcaaaggaaaggttcactcccctagttctcagtcttcagaaacggaccaagaaaatgagcgagagcaaagccctgaaaagcccaggagttgtaataaactgagcagagagaaagctgacaaagagggaatagcgaaaaaccgcctggaactcatgccttgcgtggttttgactcgagtgaaagagaaagagggaaaggtcattgaccacactcctgtggaaaagttgaaagccaagcttgataatgacactgtcaaatcttctgccctggaccagaaacttcaggtctctcagacggagcctgcaaaatctgacttgtctaaactggaatcagttagaatgaaagtaccaaaggaaaaggggctttcaagccatgttgaagtggtggagaaggaagacaggcttaaagccaggaagcacctcaagcctgagcagcctgcagatggggtaagtgctgtggatctggagaagctggaagccaggaaaaggcgctttgcagattccaatttaaaagcagaaaagcaaaaaccagaggtcaagaaaagcagtccagagatggaggatgctcgcgtgctttcaaaaaagcagcctgacgtgtcctctagagaggtcattctgctgagggaaggagaggctgaaagaaagcctgtgaggaaagaaattcttaaaagagaatctaaaaaaatcaaactggacagacttaatactgttgccagccccaaagactgtcaggagcttgccagtatttctgttgggtctggctcaaggcccagctcagacctacaagcaagactgggagaaccagcaggtgaatctgtggaaaatcaagaagtccaatcaaaaaagcccattccctcaaaaccacagctcaaacagctgcaggtattagatgatcaaggaccagagagagaagacgttaggaaaaactattgcagtcttcgtgatgaaacacctgaacgtaaatcaggccaagagaaatcacattcagtaaatactgaagaaaaaattggcattgacatcgatcacacgcagagttaccgaaaacaaatggaacagagtcgtaggaaacagcagatggaaatggaaatagccaagtctgagaagtttggcagtcctaaaaaagatgtagatgaatatgaaagacgtagcctcgttcacgaggtaggcaaaccccctcaagatgtcactgatgactctcctcctagcaaaaagaaaaggatggatcatgtcgattttgatatctgcaccaagcgagaacggaattacagaagttcacgccaaatcagcgaagattctgaaaggactggtggttctcccagtgtccgacatggttccttccatgaagatgaggatcccataggctcccctaggctactgtcagtaaaagggtctcctaaagtagatgaaaaagtcctcccctattctaacataacagtcagggaagagtctttaaaatttaatccttatgattctagcaggagagaacagatggcagatatggccaaaataaaactatctgtcttgaattctgaagatgaactaaatcgttgggactctcagatgaaacaggatgctggcagatttgatgtgagtttcccaaacagcataattaagagagatagccttcgaaaaaggtctgtacgagatctggaacctggtgaggtgccttctgattctgacgaagatggtgaacacaaatcccactcacccagagcctctgcattatatgaaagttctcgattgtcttttttattgagggacagagaagacaagctacgtgagcgagatgaaagactctctagttctttagaaaggaacaaattttactcttttgcattggataagacaatcacaccagacactaaagctttgcttgaaagagctaaatccctctcttcatctcgtgaagaaaattggtcttttcttgattgggactcccgatttgcaaattttcgaaacaacaaagataaagaaaaggttgactctgctccaagacctattccatcctggtacatgaaaaagaagaaaattaggactgattcagaagggaaaatggatgataagaaagaggaccataaagaagaagagcaagagaggcaggaattgtttgcttctcgttttttacacagctcaatctttgaacaagattccaagcgattgcagcatctagagagaaaagaggaagattctgacttcatttctggtaggatctatgggaagcagacatctgagggagcaaacagcacaactgattccattcaagaaccagtagttctgttccatagcagatttatggagctcacacggatgcaacag

SEQ ID NO: 14885 - protein, 721 aa, Homo sapiens
MPCVVLTRVKEKEGKVIDHTPVEKLKAKLDNDTVKSSALDQKLQVSQTEPAKSDLSKLESVRMKVPKEKGLSSHVEVVEKEDRLKARKHLKPEQPADGVSAVDLEKLEARKRRFADSNLKAEKQKPEVKKSSPEMEDARVLSKKQPDVSSREVILLREGEAERKPVRKEILKRESKKIKLDRLNTVASPKDCQELASISVGSGSRPSSDLQARLGEPAGESVENQEVQSKKPIPSKPQLKQLQVLDDQGPEREDVRKNYCSLRDETPERKSGQEKSHSVNTEEKIGIDIDHTQSYRKQMEQSRRKQQMEMEIAKSEKFGSPKKDVDEYERRSLVHEVGKPPQDVTDDSPPSKKKRMDHVDFDICTKRERNYRSSRQISEDSERTGGSPSVRHGSFHEDEDPIGSPRLLSVKGSPKVDEKVLPYSNITVREESLKFNPYDSSRREQMADMAKIKLSVLNSEDELNRWDSQMKQDAGRFDVSFPNSIIKRDSLRKRSVRDLEPGEVPSDSDEDGEHKSHSPRASALYESSRLSFLLRDREDKLRERDERLSSSLERNKFYSFALDKTITPDTKALLERAKSLSSSREENWSFLDWDSRFANFRNNKDKEKVDSAPRPIPSWYMKKKKIRTDSEGKMDDKKEDHKEEEQERQELFASRFLHSSIFEQDSKRLQHLERKEEDSDFISGRIYGKQTSEGANSTTDSIQEPVVLFHSRFMELTRMQQ

SEQ ID NO: 14886 - DNA, 3413 bp, Homo sapiens
  CDS (333)..(2207)
aaaaaggaactgggatcgcgccgcggcggttcctgtccttacagttgcgctgcccagggaccgatgttgcgcgaggaaaatgcgggacgcccaggtcggtgctcggcccagacttatgcccgtgttttcacagcccacactcgtgcccgaagccccttaccccgccccgggctgtggtctgtgggctgtgggacgagctgcggcgcgggccatttctgagcagtggaggtttcaagtaatccactaacaaccagttccaaattctgtcatcaaatcctgtgctgctgttcctcgtggtaatagatgcatattatttcttttatttaaaagaaatgaatgtgactagtattgcattaagagctggaacttggcttttagctgcatggcatgttaaagtacctccgatgtggctggaagcttgtattaactggattcaagaagaaaataataatgttaacttgagtcaggcccaaatgaataaacaagtgtttgagcagtggctccttactgatctgagggatttggagcatcctcttttacccgatggcattttagaaattccaaaaggagaattaaatggattttatgctctgcagattaattccttggttgatgtaagtcagcctgcatactcccagatacagaagttgagaggaaagaatacaacaaatgatctagttacagctgaagcacaagtaaccccaaaaccttgggaagcaaagccttcacgaatgttgatgctgcagctaactgatggaatcgtacaaatacagggaatggaatatcagcctattccaattcttcatagtgatcttcctccaggtacaaaaattttgatttatggaaatatatctttccgtcttggtgttctcttattgaaaccagaaaacgtgaaagtgttaggaggtgaagtagatgctcttttagaagaatatgcccaagaaaaagtacttgcaagattaataggggaacctgatcttgtagtttcagtcataccaaacaattctaacgaaaacattcccagagttacagatgttctagatcctgcattaggtccttctgatgaagaactcttggcaagtcttgatgaaaatgatgagcttacaacaaataatgacacttcctcagaacgatgtttcaccacaggtagttcctcaaataccattcccacaagacagtcaagttttgagccagaatttgttatttctccaagaccaaaagaggaaccatcaaacctatctatacatgtaatggatggagaattagatgacttttcactggaggaggccttgcttttagaagaaactgtccagaaagaacagatggaaactaaggaattgcaaccattgacttttaacagaaatgccgatcgaagtatagagagattttcacataatcctaatactacgaataacttttctttgacttgcaaaaatggaaacaataattggagtgaaaaaaatgtatctgaacaaatgactaatgaagacaaatcatttggttgtccatctgttagagaccaaaacaggagtattttttcagttcattgtaatgtacccttagcccatgattttacaaataaagaaaagaacttagagacagataataaaataaaacaaaccagcagttcagatagccattccttaaataataaaatattaaatagagaggtggtcaactatgtacagaaaaggagttcacaaatttctaatgaaaatgattgtaatttacagagttgttctttaagatcatcagagaatagcattaatctttctattgccatggatttgtattctccaccctttgtctatttgtctgttctaatggccagcaaaccaaaggaagttacaacagtgaaagtgaaagcatttattgtaaccttaactggaaatctctcaagttctggtggtatttggagtataactgcaaaggtgtctgatggtactgcatatctagatgtagactttgtggatgaaatacttactagcttgatagggttctcagtaccagaaatgaaacagtcaaaaaaggatcctcttcaataccaaaagttcctggaagggttgcagaaatgtcaaagagatctaatagatttgtgctgtctaatgactatttcatttaatccttccttgtctaaagcaatggtactggcattacaagatgttaatatggaacaccttgagaatctaaagaagcggttaaataaataattaaactaaaatagtattaggaacaattaaaaacaacaaggaaatatttagaatttgttcacaattttacttatgatactttgtgtaaaaaggaaaaatgaaatttcatagcttatttcagtttaattttaaagtgtttaatcatgtttgttatatgtggagcttttgaaaataagttaatctttttttttttttttaatgtcagggtattgctctgttgcccaggctagagtgcagtggcatgatcataggttattgcatcaacctcttgagctcaagcgatcctcctgccttagcctcttgagttgctgggactataggcatgtaccaccatgcccagctaatttataattactattattgttttgtagggacagagttttgctatgttgcccagattggtctcaaactcctggcctctcactcctgccgtcatggcctccaaagtttaatttttttaaaagtaactgttagatggaggaatatggtgacccactattgttgagaaatttgttttccacttgtcacgtcacataagatgattgctaaaatattgtactggtgttcggtggtgagtcatatttttgaaagttaataattataaataggtaatttccttctaatatgttggtactgtctatggccataccaccctgaacatgcctgagcttgtcataatatgttgagtacccaaaagatttgtttatattgttaatcttagggaaaaaaaattaaaatccagtagatcagaacatcaggctttcagatacaaattgatttactggtttttattttgctgattataatatttggtatatttaaggtaatctagttaactagatgctatttcatagattatattgaatgatttaaaactttattttcaaggatagtttattttaaatggcatattgaaaacatcattattaagatccagtaggtaggacatttattggattaaaatgaagcatttatctatgtctttaggtgtcattgttccctttctgaattagctgtacatataagccttcctttggttttaagtactgatttttttttaaaaaaagagggactgtttaccattcttccactgtgctgttataaagttgtatttgaaaggtaatgttgtttttattaatcttttgtcttaaaataatttaaagtgctttgaattttaaaacattaaacaaatccttaaataac

SEQ ID NO: 14887 - protein, 625 aa, Homo sapiens
MNVTSIALRAGTWLLAAWHVKVPPMWLEACINWIQEENNNVNLSQAQMNKQVFEQWLLTDLRDLEHPLLPDGILEIPKGELNGFYALQINSLVDVSQPAYSQIQKLRGKNTTNDLVTAEAQVTPKPWEAKPSRMLMLQLTDGIVQIQGMEYQPIPILHSDLPPGTKILIYGNISFRLGVLLLKPENVKVLGGEVDALLEEYAQEKVLARLIGEPDLVVSVIPNNSNENIPRVTDVLDPALGPSDEELLASLDENDELTTNNDTSSERCFTTGSSSNTIPTRQSSFEPEFVISPRPKEEPSNLSIHVMDGELDDFSLEEALLLEETVQKEQMETKELQPLTFNRNADRSIERFSHNPNTTNNFSLTCKNGNNNWSEKNVSEQMTNEDKSFGCPSVRDQNRSIFSVHCNVPLAHDFTNKEKNLETDNKIKQTSSSDSHSLNNKILNREVVNYVQKRSSQISNENDCNLQSCSLRSSENSINLSIAMDLYSPPFVYLSVLMASKPKEVTTVKVKAFIVTLTGNLSSSGGIWSITAKVSDGTAYLDVDFVDEILTSLIGFSVPEMKQSKKDPLQYQKFLEGLQKCQRDLIDLCCLMTISFNPSLSKAMVLALQDVNMEHLENLKKRLNK

SEQ ID NO: 14888 - DNA, 2741 bp, Homo sapiens
  CDS (256)..(2487)
gtgaggcggaagctgtgtatggcgggaggctgtggcggtcccttggtggggaagctgttgctgttgctagacgacgggaactagctctcgtcacttcctcagcccgccgtctgcccactcctctagccggaacctgggggcccggagccggggtaggcacagagttgtcctcggaggtccaggacagcggccagcccggcggcgggagtcagggccacgccacctgcagggaagaacccgagtcgaagcgggaagatggctgcagacaagcctgcagatcagggagcagagaaacatgaaggcacaggtcagtcctctgggatcactgatcaagagaaggagttatccaccaatgctttccaagctttcacatctggaaattatgatgcctgtctacaacaccttgcctgtctacaagatataaacaaagatgattataaaataattttgaatacagcagtagctgagttttttaaaagtaaccaaacaacaacagataatttgagacaaacacttaaccagctgaagaatcaggtccactcagctgttgaagaaatggatggattagatgatgttgaaaacagcatgttgtactataatcaagcagtcattctttatcatctgcggcagtatacagaagccatatcagttggtgaaaaactttatcagttcatagagccttttgaagaaaaatttgcccaagcagtgtgttttttgcttgtagacctgtatatattaacctaccaagctgagaaagctttgcatcttcttgctgtcctagaaaaaatgatttcacagggtaacaataacaaaaatggaaagaatgagactggtaataacaacaacaaagatggatctaatcataaagctgaaagtggagctctaatagaagctgcaaaatcaaagatacatcagtacaaagtacgagcttatatccaaatgaagtctctgaaagcatgtaaaagggaaatcaagtcagtcatgaatacagctggaaattccgcaccctctctctttcttaaaagcaattttgagtacttaagaggtaattatcgaaaagccgtgaagctattaaatagttcaaacattgctgagcatccaggattcatgaaaacaggtgaatgcttgagatgcatgttctggaataaccttggttgcatccattttgccatgagcaagcacaatttgggaatattctactttaaaaaggctctgcaagagaatgacaatgtctgtgcacagctcagtgcaggtagcactgatccaggcaaaaaattttcaggaagacccatgtgtacgttactaaccaataagagatatgagttgctgtataactgtggaattcagcttcttcacattggaaggcctcttgctgccttcgaatgtctgattgaagctgttcaggtttatcatgcaaatcctcgcctctggctacggctggctgaatgctgcattgctgccaataaggggacttctgaacaagaaactaaaggccttcccagcaaaaaaggaattgtacagtctattgttggtcaaggctatcatcgtaaaatagttttggcatcacagtctatacagaatactgtttataatgatgggcagtcttcggccattcctgtagccagtatggagtttgcagccatatgtctcagaaatgccttgttgctgctacctgaagaacagcaagatccaaagcaggaaaatggggctaaaaatagtaatcaattaggtgggaacacagagagcagcgaaagcagtgaaacttgcagcagtaaaagccatgatggagataaattcattccagctccaccttcttctccattgagaaaacaggaattagaaaacttaaagtgctccatacttgcttgcagtgcctacgtggctctggctttgggtgataacctcatggctttgaatcatgcagataaacttcttcagcagcccaagctgtcaggatctcttaagtttttgggacatttatatgctgcagaagccctcatctctctcgacagaatatctgatgccattactcacttgaacccggagaatgtcactgatgtctccttagggatctcttcaaatgagcaggaccaaggatcagacaaaggtgaaaatgaagcaatggaatcctctggtaagcgggcccctcagtgctaccccagttccgtcaactctgccaggactgtgatgctgttcaaccttggcagcgcttactgcctgaggagcgaatatgacaaagcccgaaagtgtctccaccaggcggcttcaatgatccatcctaaagaggtgccccctgaggccatcttgctggcagtctaccttgaactgcagaatggtaatactcagctggccttacagatcatcaaaaggaatcagctgctccctgcagtgaaaacacactctgaagtgagaaagaagccagtgtttcagcctgtccacccgatccagcccatccaaatgccggctttcaccactgtgcagagaaagtgatacttcacttttggaaaactgttacctgagacccaggggagaatttactggccattttagttgtatcacagcagaatgaataaaagatggtgaaggctgttaattttgagtcaattctacccctgacttttggccaaaagcttacttaaaattaaggatttactaagtcatcatcagctgtttttcttaatttcagccagactattaattttgagccattatgtaatatatgccataggcaattaaaacat

SEQ ID NO: 14889 - protein, 744 aa, Homo sapiens
MAADKPADQGAEKHEGTGQSSGITDQEKELSTNAFQAFTSGNYDACLQHLACLQDINKDDYKIILNTAVAEFFKSNQTTTDNLRQTLNQLKNQVHSAVEEMDGLDDVENSMLYYNQAVILYHLRQYTEAISVGEKLYQFIEPFEEKFAQAVCFLLVDLYILTYQAEKALHLLAVLEKMISQGNNNKNGKNETGNNNNKDGSNHKAESGALIEAAKSKIHQYKVRAYIQMKSLKACKREIKSVMNTAGNSAPSLFLKSNFEYLRGNYRKAVKLLNSSNIAEHPGFMKTGECLRCMFWNNLGCIHFAMSKHNLGIFYFKKALQENDNVCAQLSAGSTDPGKKFSGRPMCTLLTNKRYELLYNCGIQLLHIGRPLAAFECLIEAVQVYHANPRLWLRLAECCIAANKGTSEQETKGLPSKKGIVQSIVGQGYHRKIVLASQSIQNTVYNDGQSSAIPVASMEFAAICLRNALLLLPEEQQDPKQENGAKNSNQLGGNTESSESSETCSSKSHDGDKFIPAPPSSPLRKQELENLKCSILACSAYVALALGDNLMALNHADKLLQQPKLSGSLKFLGHLYAAEALISLDRISDAITHLNPENVTDVSLGISSNEQDQGSDKGENEAMESSGKRAPQCYPSSVNSARTVMLFNLGSAYCLRSEYDKARKCLHQAASMIHPKEVPPEAILLAVYLELQNGNTQLALQIIKRNQLLPAVKTHSEVRKKPVFQPVHPIQPIQMPAFTTVQRK

SEQ ID NO: 14890 - DNA, 2172 bp, Homo sapiens
  CDS (191)..(1111)
taaacagcaatatgatattgagataacaagaataaaaattgaattggaggaagccctagtcaatgtgaaaagctcccagtttaagttagaaactgctgaaaaggaaaaccagatattggggataacattacgtcagcgtgatgctgaggtgactcgactaagagaattaaccagaactttacagactagcatggcaaagcttctctccgatcttagtgtggacagtgctcgctgcaagcctgggaataaccttaccaaatcactcttgaacattcatgataaacaacttcaacatgacccagctcctgctcacacttccataatgagctatctaaataagttagaaacaaattacagttttacacattcagagccactttctacaattaaaaatgaggaaaccatagagccagacaaaacctatgaaaatgttctgtcctccagaggccctcaaaatagtaacactaggggcatggaggaagcatctgcacctggaattatttctgccctttcaaaacaggattctgatgaagggagtgaaactatggctttaatagaagatgagcataatttggataatacaatttacattccttttgctagaagcactcctgaaaagaaatcaccactttctaagagactatcccctcagccacaaataagagcagctacaacacagctagtcagcaacagtggacttgctgtctctggagaagaaaataaactgtgtacacctgtaatctgttcctcttcaacaaaggaagcagaagatgcacctgaaaaactttccagagcatctgatatgaaggacacacagctcctcaagaaaataaaggaagcaattggtaagatccctgctgccaccaaggagccagaggaacaaactgcatgtcatggcccatcaggttgtcttagcaacagccttcaagtgaaaggcaatactgtctgtgatggtagtgttttcacttctgacttgatgtctgactggagcatctcttcgttttcaacgttcacttctcgtgatgaacaagacttcagaaatggccttgcggcattagatgccaacatagctagactccagaagtctttaaggactggtcttctggagaaatgaattcagaagaaaattcatcaggtgcttctttttaaaactagaacttggctatattgaatgtgtatttttctttagtgaaatgatgttttatgttattatgtgtgaagtaatatattgtacaagtaataaatgtattgttgagatatattgacactgaggagcttataaaaacaagtcatcttaagttcacaattgctacaagaagaaagttgtggataactaggaaattattgtaagtaatgttttatttcagtacttagcaattagagttcttttattaagatgtatctgctggattaagggtacaggttgaaatagttctgtggctgtcctaagaaataatgggaaaagaatctctggatgtaagtttttctgttgaaactagagggttttttttttctgtttacatatacttttttttaatagcaatgtgtttttattaaacatgctgtgtgccacaggccagtgttgttggtgaaatatataaacatttatttaaagagaaaagttaccagtatctacacctcttaaaaaacattgattggtctaaaaaatatatagataacatcctaagttaacatatggcttcttaaaacttgggcacttttatttgtttttatcccaaattcatgttttaaggcctttaaagaatagtcagactgataaagaagtgctaacagataagctatagttggggaaatttgtgggttttttttaaataagaaatgtttatttttgtccttatatttaaacatgatggaatttgtaaatcttggcattgattgtaattctgcctttttggaagaattttttctcccagcatgttagctgagaatattctctattttataaataatatgaagtaggttggtctctctgcttctctataccaggacttcttagctcagtatcatctcccttcatgtaagcagcacgttttaactcttaggaagctgaatgttgtgttatcactaatactttgtacaggtcacctgcctactctaattgtccttagtacttggacaggctttatcattaaagagtgttctcctaatccc

SEQ ID NO: 14891 - protein, 307 aa, Homo sapiens [sequence omitted]

SEQ ID NO: 14892 - DNA, 2440 bp, Homo sapiens
  CDS (96)..(899)
gctcgggcgcggggcgttcttggtgcgccgggccgtggtgagtccgggctcccgtggccgcgtgctgggaggagactggagcccggttaggaagaatggagttggcgactcgctaccagatccctaaagaagtggctgacatctttaacgcccccagtgatgatgaagagtttgttggcttccgagatgatgttcccatggaaaccctctcgtcagaggagagctgcgatagttttgactcactagagtcagggaaacagcaggatgtgcgctttcattccaaatacttcacagaagagctaagaagaatttttatagaggacactgactcagagactgaggattttgcaggatttacgcagagtgatctgaatggaaagactaacccagaagtaatggtcgtggagtcagatttgagtgatgatggcaaagcatctttggtgagcgaggaagaggaagatgaagaagaagataaggctacccctagaagaagcaggtctagaagaagtagtattggtcttcgagtagcctttcagttccccaccaagaagctggccaacaaaccagataaaaacagttcttccgagcagttgttttctagcgcacgcttacagaatgagaaaaaaacaattcttgaaagaaagaaagactgtagacaggtgatacaaagggaagattctacctctgagtctgaggatgactctcgggatgagagccaggagagttcagatgctttgctgaaaaggaccatgaacatcaaggagaacaaagccatgcttgcccagttattggcggaattgaactcgatgccagatttcttcccagtacgaaccccaacctcagcttctaggaagaagacagtgaggcgggccttccggagggacagatcacgcggcgtatgaacccaacccggagtgcgcggcctcctgagaagtttgctctagagaacttcactgtctcagccgctaaatttgcggaagagttttacagcttccgaagaaggaagacaattggggggaaatgccgggagtacagacgacgtcaccgtatatcttcttttcggccagtggaggatatcaccgaagaggacttagaaaatgttgccataactgttcgagataaaatctatgataaagttctgggtaacacgtgccatcagtgtcgacaaaagaccatcgacaccaagacagtgtgtcggaaccagggttgctgtggtgtgcgaggacagttctgtggaccatgcctgcggaaccgctatggggaggatgtcagatcggcattgctggacccggattgggtgtgtcccccctgtcgtgggatctgcaattgcagctactgtcggaagcgtgacggccgctgtgccacaggaatcctcattcatctggccaagttttatggttatgacaatgttaaggaatatctggagagcttacaaaaggagctggtagaagacaattaagaggaaaacaaacagaaccagccacctcaccatagagtactccaacaagacatgcataccattggtgcctaagatttattaaaacttgactgaacaaaaggggaccatcaacattgtagacactggaggccttacagagtgctagcctcttccttcaggactcacctggggcctgctgcttttatattttgaaagagtttaagggctaataatttaatttgttgtttgttaaaaattaaaatctccgttctttccggctgcattgcttttgcatgttcacatatgatgtacttttatgatgtacttttttttttttgagatggagtcttgttctgttgcccaggagggagtgcagtggtgcaacctcggctcactgcaacctttgcctcctaggttcaagtgattctcctacctcctgagtaactgggattacagtcgtgtgccaccacgctcagccctgagttagtttctagtatttttttctgactttcactctaaggatagcgttgaaaaaagaatgcacgtgtgagttactaaaaagttagaataatgtgcatgggaacagtgcagcaacatgctagaaaatcctcactgcactccagcagaggctagaggaatgccagtgttaccttacgcttctagaagcagagccactccagccagaacccattttgcagtcttctcttcgctcttcagcctgaaggtccagatgtagctggggcctctcagtttggttctatacacagggcactcgtaggtctgtttggtttcttgtctgtccacgggggtggcttttgcaaagatgaccggcatagggcatgccagctccttgagacgggcttcaacaatggttcctgcttgggtgtcccagcgggcgcctatggcaaaaacacagcggttgcaattgtgtggcagcttgctactaatgataatgatcaagttgtttgatgcaataaacattcaacattctggttttgtcat

SEQ ID NO: 14893 - protein, 268 aa, Homo sapiens
MELATRYQIPKEVADIFNAPSDDEEFVGFRDDVPMETLSSEESCDSFDSLESGKQQDVRFHSKYFTEELRRIFIEDTDSETEDFAGFTQSDLNGKTNPEVMVVESDLSDDGKASLVSEEEEDEEEDKATPRRSRSRRSSIGLRVAFQFPTKKLANKPDKNSSSEQLFSSARLQNEKKTILERKKDCRQVIQREDSTSESEDDSRDESQESSDALLKRTMNIKENKAMLAQLLAELNSMPDFFPVRTPTSASRKKTVRRAFRRDRSRGV

SEQ ID NO: 14894 - DNA, 2541 bp, Homo sapiens
  CDS (196)..(1725)
aggcgcagtttgccggccgccatcgcgcactggggctccgggcggctgggaccggcctggggtagctgcgcagcaggtctgtgggttctggcaccacctgagcccactgggcatctggtcatccctggcacctctcctttggagccaccttgtccctggctagacagtcacattttccagtgccgttttggaaagatgttgcctttggagaaggcgtttgcctcccccaggagctccccagccccgccggatctgcccacgccggggtcagcagccggagtccagcaggaagaacccgagaccatccctgagaggacccctgctgacctggagttctcccgcctgcgtttccgggaatttgtctaccaggaggctgccgggccccaccagaccctggcccggctgcatgagctgtgccgccagtggctgatgcctgaggcgcgctccaaggagcagatgctggagctgctggtgctggagcagttcctgggcatcctgcctgataaggtccggccctgggtggtggcacagtaccctgagagctgcaagaaggcagcctccctggtggagggcctcgctgatgtcctggaagagccagggatgctgctgggctcccctgcgggctcatcctcaattcttagcgatggagtgtacgagaggcacatggaccctctgctgctaccaggcgagctcgcgagccccagccaggcccttggagctggggagatcccggcaccttctgagacaccctggctttctccggaccccctgtttctggaacagaggagggtcagagaagcaaagaccgaagaggacggccctgccaacaccgagcagaagctgaagtcctttccagaggaccctcagcacctgggggagtggggccacctggaccctgccgaggagaacctgaagagctaccggaagctgctcctgtgggggtatcagctttcccagcctgacgctgcctccaggctggacactgaggaactccggttggtggaaagagatccacaaggaagcagcctcccagaaggcgggaggcggcaggagagcgctgggtgcgcctgcgaggaggccgcccccgcgggggtgctgcctgagctgcctacggaggcgccccctggggacgcccttgccgatcccccgtcgggcaccactgaggaggaggaagagcagcctgggaaggccccggacccgcaggacccccaggacgcggagtccgactctgccaccggatcgcagaggcagtccgtcatccagcagcctgccccggacaggggcacggcgaaactgggaaccaagaggccgcaccccgaggatggggacgggcagagcctcgagggcgtctctagctccagcgacagcgcagggctggaggccgggcagggccctggggctgacgagccgggcttgtcccgcgggaagccctatgcctgcggcgagtgcggggaggccttcgcgtggctctcgcacctgatggagcaccacagcagccatggcggccggaagcgctacgcctgtcagggctgctggaagaccttccacttcagcctggccctagccgagcaccagaagacccacgagaaggagaaaagctacgcgctggggggcgcccggggcccccaaccgtccacccgcgaagcccaggcgggggctagggcgggcggtcccccagagagcgtggagggcgaggctccccccgcacccccagaggcgcagaggtgagccgctgtgctgtcccgttccggaggggccgctttgccggccgtgaatcccagacgaggcattgggcctttccacgcccctgggtggcggcttcctgtggtgtttgtggacgtcctctgcctgtgccctgaatccgctcctgaggctaagcgctcccaacgagaagggtccacgggaagccctcacctctgtaaacacaccctgggccagcgctcgcatccgaggggagccgccggatgtggaagaagactcggctttcctgcagccatttagtgccgccccatgctaggttatttgacattgtgcagtgtagagttgccttaaagtgcgtgatctgccagtgctttcttcaagtcacccttgccccgattcctcatgtttgcgctccccagggttgctcaagtggaaattttgtcagctgtttagccttttcgtacttggcgtgatgtcaacttcacttctaatctgcaaaagcagaagctgtttcctagtttacctcgcgtgtgtttacctatatggagtagctcgcagagatcacagaaatgcttgcagcctaaggcagggttttcagaccgtgggtcccagcccatttagtaaaatgggaaatcaattagcaagtggtcaccagcattacacagcaatggagcagaataaagtaggccagaatgcatcatgtagtaaaggcaaatactgttttgtgaaacttttcacccatacatctaaatgtgagaactggttgcaatgtaagacatttcttgctgggaagttgtgagcaaaataagttgaaaacactaataaagatctgtctgtctg

SEQ ID NO: 14895 - protein, 510 aa, Homo sapiens
MLPLEKAFASPRSSPAPPDLPTPGSAAGVQQEEPETIPERTPADLEFSRLRFREFVYQEAAGPHQTLARLHELCRQWLMPEARSKEQMLELLVLEQFLGILPDKVRPWVVAQYPESCKKAASLVEGLADVLEEPGMLLGSPAGSSSILSDGVYERHMDPLLLPGELASPSQALGAGEIPAPSETPWLSPDPLFLEQRRVREAKTEEDGPANTEQKLKSFPEDPQHLGEWGHLDPAEENLKSYRKLLLWGYQLSQPDAASRLDTEELRLVERDPQGSSLPEGGRRQESAGCACEEAAPAGVLPELPTEAPPGDALADPPSGTTEEEEEQPGKAPDPQDPQDAESDSATGSQRQSVIQQPAPDRGTAKLGTKRPHPEDGDGQSLEGVSSSSDSAGLEAGQGPGADEPGLSRGKPYACGECGEAFAWLSHLMEHHSSHGGRKRYACQGCWKTFHFSLALAEHQKTHEKEKSYALGGARGPQPSTREAQAGARAGGPPESVEGEAPPAPPEAQR

SEQ ID NO: 14896 - DNA, 3044 bp, Homo sapiens
  CDS (125)..(1777)
tgagccctgcagccagccctctggggacagatccctccaaaccaccagtcccccagtcgtggcccctggaaatgagaacggcctggcagtgcctgtgcccctgcggaagtcccgacccgtgtcaatggatgccagaattcaggtagcccaggagaagcaagttgctgagcagggtggggacctcagcccagcagccaacagatctcaaaaggccagccagagccggcccaacagcagcgccctggagaccttgggtggggagaagctggccaatggcagcctggagccacctgcccaggcagctccagggccttccaagagggactcggactgcagcagcctctgcacctctgagagcatggactatggtaccaatctctccactgacctgtcgctgaacaaagagatgggctctctgtccatcaaggacccgaaactgtacaaaaaaaccctcaagcggacacgcaaatttgtggtggatggtgtggaggtgagcatcaccacctccaagatcatcagcgaagatgagaagaaggatgaggagatgagatttctcaggcgccaggaactccgagagcttcggctgctccagaaagaagagcatcggaaccagacccagctgagtaacaagcatgagctgcagctggagcaaatgcataaacgttttgaacaggaaatcaacgccaagaagaagttctttgacacggaattagagaacctggagcgtcagcaaaagcagcaagtggagaagatggagcaagaccatgccgtgcgccgccgggaggaggccaggcggatccgcctggagcaggatcgggactacaccaggttccaagagcagctcaaactgatgaagaaagaggtgaagaacgaggtggagaagctcccccgacagcagcggaaggaaagcatgaagcagaagatggaggagcacacgcagaaaaagcagcttcttgaccgggactttgtagccaagcagaaggaggacctggagctggccatgaagaggctcaccaccgacaacaggcgggagatctgtgacaaggagcgcgagtgcctcatgaagaagcaggagctccttcgagaccgggaagcagccctgtgggagatggaagagcaccagctgcaggagaggcaccagctggtgaagcagcagctcaaagaccagtacttcctccagcggcacgagctgctgcgcaagcatgagaaggagcgggagcagatgcagcgctacaaccagcgcatgatagagcagctgaaggtgcggcagcaacaggaaaaggcgcggctgcccaagatccagaggagtgagggcaagacgcgcatggccatgtacaagaagagcctccacatcaacggcgggggcagcgcagctgagcagcgtgagaagatcaagcagttctcccagcaggaggagaagaggcagaagtcggagcggctgcagcaacagcagaaacacgagaaccagatgcgggacatgctggcgcagtgtgagagcaacatgagcgagctgcagcagctgcagaatgaaaagtgccacctcctggtagagcacgaaacccagaaactgaaggccctggatgagagccataaccagaacctgaaggaatggcgggacaagcttcggccgcgcaagaaggctctggaagaggatctgaaccagaagaagcgggagcaggagatgttcttcaagctgagcgaggaggcggagtgcccaaacccctccaccccaagcaaggccgccaagttcttcccctacagttctgcggatgcttcttaacaaccgcccggggctgtggctggcagcttggtgggccccagggctttctccttcattctctgtgaacatgtaactcaggaccccttttccctcttgcgtctgtgccagctcaaatccagcccctcgccctgtgccaccccaactgtgcctgatagacctgccccagcgttcctgacttcttgctggcctgtggagggtgaggtgtaattatttgtcacctgaacctaatgtatattctccttgagccccagatcccttcaagctggaagggatggggctgttggtggggtcagggtccaagaggaatgggtgttctgtggcctcgagtcctctcctgtttgcgaaaataccagttttgctctctgtgggacaaagcactgctgatgaagtccccgtgggctcatccgggctggaattcttggtttttcagccattccctgcagagtcactcaatcatcaagtccctcacagccatttctgttcccagaggagccaggcctgcagctggctgctcaggagatggcctcattcctcctgttctcccagtttgctttccacttaagacaaagccttgtctatgtggggggcggggaccggggaaagagggaggctgaaatgtttattctgcttctcccgtgtttcatgccatctcgcgtcccccttcctgcacatgggtgtgaatgcacacacatacgcgtacacacaggacttggtctgctggcctggcctcttctgcccaggtgggttggaacacgtttgctgcctgtgcctgtgccactgagcatgttaggtggagcagttggtgtggcacgtgcggggtgttggcaccggaggcatggaaaagcacaggctgtactgccaggctgcgatgcgtgctggcccccgcacaggctcctgtgtgcagggactgattcctcagcacacgaggcttccacaacccagtctgctccatagcactctggcccaccctgtctgcaggtgaaacaggagggctgtttgcctctgccccatccccccgactgtgttcaggagtcccaccctgcatttcagacctgggctggcagtctgttggacttctcttcaggaagagaaagcatcagggggaaatggaatgcccctgccccaggaacatggcagaagcacaggttctgtacctcagatggactcctgctgggccttcggggtctcagttggcttcccccagattctgattctacagctgcagaatgtatataacgcaataaaagcaaatgtttgaaccagt

SEQ ID NO: 14897 - protein, 551 aa, Homo sapiens [sequence omitted]

SEQ ID NO: 14898 - DNA, 3129 bp, Homo sapiens
  CDS (72)..(1181)
agtgcggcggcgccgcctctgctctcagtgccccggatcggaggccgtccatcgcccctcgggccgacgccatgaagatcaaagatgccaagaaaccctctttcccatggtttggcatggacattgggggaactctagtaaagctctcgtactttgaacctattgatatcacagcagaggaagagcaagaagaagttgagagtttaaaaagtattcggaaatatttgacttctaacgtggcatatggatccaccggcattcgggatgtacaccttgaactgaaagatttaacactttttggccgaagagggaacttgcactttatcaggtttccaacccaggacctgcctacttttatccaaatgggaagagataaaaacttctcaacattgcagacggtgctatgtgctacaggaggtggtgcttacaagtttgaaaaagattttcgcacaattggaaacctccacctgcacaaactggatgaacttgactgccttgtaaagggcttgctgtatatagactctgtcagtttcaatggacaagccgagtgctattattttgctaatgcctcagaacctgagcgatgccaaaagatgccttttaacctggatgatccctatccactgcttgtagtgaacattggctcaggagtcagtattttagcagtccattccaaagacaactataaacgagtgactgggacaagccttggagggggtacctttctgggtttatgcagtttattgactggctgtgaaagttttgaagaggctcttgaaatggcatccaaaggtgatagcacacaagctgacaagctggtccgtgatatttatggaggagattatgaaagatttggtttgccaggttgggctgtagcatctagttttgggaatatgatttataaggagaagcgagaatctgttagtaaagaagatctggcaagagctactttagttactatcaccaataacattggttctgtggcacgaatgtgtgctgttaatgagaaaataaacagagttgtctttgttggaaactttttacgtgtcaataccctctcaatgaaacttttggcatatgcactggattactggtcaaaaggtcaactaaaagcattgtttctagaacatgagggttactttggagcagttggtgcacttcttgggctgccaaatttcagctaaagcatcaggtctctctctctgctaataaatgtcatccaagaggaactaaaaccagaggcattattactgcattgtttgtcactgggaaccaaaggataaaagagtagcataagctgctgaatgttgccatattaaaggagagaacttggtaacgtgaagtatttctcattgaaatgctttcccttttgtatatagccagtgttaaatccttaaatgcaatacagcctctgattattgagcttcctcttaaaaagatttttttattttatgtagccaacattgcagtactgtatgctcaaacacaaatcttaaagtatcggaactgtttagcttatgaaaataatcgactctgaatatttgttacaagtctgttttatgtgttttgattactagtgagcagaaaataacataccctgtattcaaaattactgaaatggcaatcaaagatgatcatttttatgtgattttagaaatgttaaggcaatactactaattattgtaggtttttttaacgtatcacccaaagcatgtatgtgatctttccccattagtatctttttctcaaatgccataattaactgaaatactattattaaattttcatgagaattctaaaatgaatcctgggaaatgcacgtttggtgatgttgcactttctgtattttacaggaattagtcaatacatgttgaaatgtttaacattttaagattggaggcttaattactgggagtctgtctaatgaagtcctgggactattgtaatggaatatgatttgagttcactgtgctcttttgtttgtttgttttggtcatatatacattcagaacttttattttaaaacaaccacaataacattaataatagaaaattcatctgtaaatattcacagtctagtcactgaaaaatgggaaaacctctaccatgccttattattaccctttgctgtttgaggagccagaaatagaggtgcagttagaggacggtcactttttccaacaaaacccactccatagccatgtggatttttatccaaaggctcaacaaccagagggaatggtgagacctgataactaaaatactgttattggcaagggtttgaaatgtgtaagaacctaggagggaaaggaagattgagcaacataggaaaaggggaagagaggctgagtgtcaccaaggtccaaactccatttataaaaatactgcaaaaccaggagttgatggtagaagtgcatatgatccatggcaggagtaaatctctccacctcctctaactctctgaaaactctagagttggagcaagtcttccatttgcttcttatccccttaaaagaatgccttccacttcccaacagcccccatcaagggaccccaagaggccaccatgctcttatctcgcactttctttcctattccccttgcctgaatctggagtggggttgagccctctgccttcaaccttaagatttaggaagttctttccccaactgtctaacttggaaaggtagatgagtctgaattttgaagtaacgaatgcaaattccactcagcagaggcaatgttatttatgtacatagggatagtggaatgagttttaatagattctgtccaaaaggggtttgttcctcttatttcctctatgtaggaagttgtgtcttaggcaactttatcagtatcaatggaaaaatgataggcactacaatgaaatggcaggatgccaatatgagatatttcaggaataataagaaatacagtttgtttgtataaaataaactatctcaagaaagttttcaacgacagtgatagtgttcatttgtaagagagagttctagaacttcgatgtccagtgcagtagccactacccatatgtagctgttgagcatttgaaatatggttagtccaaattgagatgtgctctaaaggacaataaaaggttaaatatctcct

SEQ ID NO: 14899 - protein, 370 aa, Homo sapiens
MKIKDAKKPSFPWFGMDIGGTLVKLSYFEPIDITAEEEQEEVESLKSIRKYLTSNVAYGSTGIRDVHLELKDLTLFGRRGNLHFIRFPTQDLPTFIQMGRDKNFSTLQTVLCATGGGAYKFEKDFRTIGNLHLHKLDELDCLVKGLLYIDSVSFNGQAECYYFANASEPERCQKMPFNLDDPYPLLVVNIGSGVSILAVHSKDNYKRVTGTSLGGGTFLGLCSLLTGCESFEEALEMASKGDSTQADKLVRDIYGGDYERFGLPGWAVASSFGNMIYKEKRESVSKEDLARATLVTITNNIGSVARMCAVNEKINRVVFVGNFLRVNTLSMKLLAYALDYWSKGQLKALFLEHEGYFGAVGALLGLPNFS

SEQ ID NO: 14900 - DNA, 3692 bp, Homo sapiens
  CDS (139)..(624)
agacgctctgtactagaaaagaatcttataaaagtaactgttgcaccatttaatccaacagtttgtgatgctctgcttgataaggacgagactgattcgtccaaagatactgaaaaactctcttcccttggagaagagatgagagaagatggtcttagcccaaatgaaagcaaactttgtactgaatctgaagggatcagccccaataactctgcctggaatgggccccagctctcttcttcaaacaataactttcaacagactgtctctgataaaaatatgcctgacagtgagaaccctacgtctgtattctctcggatctcagaccattcagagactcctaatatggagttatcctgcagaaatggtggttcacacaagtcaagttgtgaaatgagatctctggttgtttccacctcatcaaacaaacaggatgttcttaacaaggattctgggaagatgaaaggccatgagagaagactaggcaaagtcattcctgttctacaaactaagaccaggactaatgttccgacgttttcacagtcaaatctagaacagcagaagcagctttatctcaggagtctcattgctcatatagaagacccagaggacactaaccaaggatgaatccctagaagtggaattgctgggtatctcgggggagctttgtgccttgatggatcaagttcatcatatgcagcactcaaaatggcagcatccttcggacctcaccacgcgaaactacgcccgccgacagaaacatctgcaaagatacagtctgactcagtgggttgacaggaacatgcgaagccaccatcggttccagcgtctcccagacttctcgtacagttaatttgtgtcatcccatcagcaatgaaggtccctatccagggtcttgcttggagcagcatttcatgttcttttgctgttttgtgctttgccgattttggattttatttttcacaaaatttttatttaaaaaactcgtcaccttttggaaatgcccattgccgacttgaatttttttgtatgaagtccctcctgattttgtgtgtgtgtgtctgtgtttaagcaagcgttcggttggtatagtttttttttgtttttttaatttaaattgaaggtagctgcctcctgaaagccagcattaagccagaacacccaggttcaagcaaaagacccacctctctgcagaggcaaagtctactttctggtacctcaaagaaatcattgttcaatcttccataaggaagagattctttaccaggctgtgagccagtgttagataacttgtgaatggatataagttacttttaacaacccctcttacttttttatttgaatcctctgaatacctgtcagtattttaaagttggcaatccaggacattataagtaggatggagcaggagaagaatcctattgaaaggacaaattaaaatagtaaatcctctcctctcccttctgtaggtactagctgccttgatttttttttgtgggtgggggggattttttcattccttattgaacttattttgcacaatagtgtttacaaatcttatacatcttactttgacagaagacttataataccttgtggtcttgagactggttgtctcctttgcctttcttcaaggattttcctttttctttttaccccccagtgaccactctgctctttaggattctagtggcagtattcttgtaacctgttagacgtggatatacctcttcaggatggcctccttgctgtctttattgaagagctgcccacccagagtcttgactctagggcaggctagtgctattgtggtgtcagttgatatttagtttcatttgctgaaccccaaatttgagtgttagttagggagcctccattctgtgggagagtgtggaaaggcactcttttttctccatattagttaacaagaggtgtctttaggccctggatgttaccatctcatttggtcaagcccctgatacctagtttcacatggatgctaacgtggatgtaatatagttgtgacagcctatgcacaaaagcattacctgatcttaaggtttggtattctaaccaaagttgacagactgtgcgtctgtcttaatggatgtcttaggagttggttattctctctttttttttgagacggagtttcgctgttgttgcccaggctggagtgcaatggcgtatctccactcaccacaacctccgcctcctgggttcaagggattctcctgtcttagcctcctgagtagctgtgattacaggcatgcgccaccatgcctggctaatttcatattttttagtagagacaggatttctccatgttggtcaggctggtcttgaactcctgacctcaggtgatctgcccacctcggcctcctaaagtgctgggattacaggcatgagccactgcacctggccggttattctctctttacagatagctatagacatcattttaggaagtgttgcagtctggcatttgtgctattgttcattctctgtgaaggctgttcatagttgctatagcctgtgtttagttttgtgatttcatcaatcccatctttctgtgtgagtaatgcattctaaacatcctaccccactttagaaacggacgtggggaacgcttggtcatttaagccaacaataaatttaggtgaatgtccctaagtgtttactgtttttatccagtcaaggatttgcttttccttgaacatttgttttaaattctggggccaaaatgcaaaggagaagttctattcaaaggcagtagttgaaatctattattttagttagcctacttggcatttactacatcggtcacttctccaggctgccctaaattaggttgatggagtgagacatgccaaacatccacctttgggaccatagcatagttaaaattaaatgtagttggaatagctagcattgcagctacagtagggaactgtagtctagttccctacagaaaacccaaggagtgaagggacaggattttgcctaggcaaaaatctaagactcgtgccctcctggtacatggggttttaagactgaatgtgtaataggagcactgcctttgccaaatcaaatgagtgacaggttaactagaaaatgtgacaatcacatttcctcttagctcaaataattctgtttttccaaagctttagcagcttaattaaatctgttggactgggggaggagagagctgttctctagtggttaacatggtattctttaagaagaaaaaacaaagccaaggaaaactcattatctggcatgttcgccttaaagatggtactgggtagaatctggagttttcatctcttttcaaagctgcatatctctcatatttggtattggcctctaagtctaatattgcagttggaattcttgctgtattattttttaagcaagtgttaggtgcatttaactgctttcttcatccatgacgacattcccaccatgggggtcttgacaaagcagagtaaaaatatgctgtttacattgtttacttacaagtaaggagcctgaaataacctgtagtttcgaatgcaggccctgatttactggcgttgtcagtttcaattatgaaactgaagtttggtgcctcctctttatcatgttttttcccttgtagcagttgtgtttaatgtcattaaaaagaaataaaagttctttgtcagtgacat

SEQ ID NO: 14901 - protein, 162 aa, Homo sapiens
MREDGLSPNESKLCTESEGISPNNSAWNGPQLSSSNNNFQQTVSDKNMPDSENPTSVFSRISDHSETPNMELSCRNGGSHKSSCEMRSLVVSTSSNKQDVLNKDSGKMKGHERRLGKVIPVLQTKTRTNVPTFSQSNLEQQKQLYLRSLIAHIEDPEDTNQG

SEQ ID NO: 14902 - DNA, 2522 bp, Homo sapiens
  CDS (196)..(1821)
tatgaactctctggagattctgatctagacctgcttggtgattgtagaaatcccagactggatttggaggattcttatactttaagaggtagttacaccaggaaaaaagatgttcccacagatggctatgagtcgtcgttgaacttccacaacaacaaccaagaggactggggctgctctagctgggttccaggcatggagacgagcctccctcccgggcactggactgctgcggtaaagaaagaagagaagtgtgtgccgccttacgtccaaatccgagatctccacgggatcctcaggacttacgccaacttctctataacaaaagaactcaaagataccatgagaacttcacacggcctgaggaggcacccgagtttcagtgcaaactgtggcctgcccagctcctggacaagcacttggcaggtggcagacgacctcacccagaacactttagacctggagtatctgcgttttgcacataaactaaaacagaccataaagaatggggattctcagcattctgcctcctctgccaatgtctttccaaaggagtcaccaacccagatctccattggtgctttcccttcgacaaaaatctctgaggccccatttctgcatcctgcacctaggagcagaagcccccttctggtaacagttgtggagtcagatcccagaccacaggggcagcccaggagaggctacacagccagcagtctggacagctcttcctcttggagagagagatgtagtcataatagagatcttagaaattctcaaagaaatcacactgtttcattccacctcaacaaactgaaatacaacagtactgtgaaggaatctcggaatgatatttcacttattctcaatgagtatgctgaattcaacaaggtgatgaagaatagcaaccaattcattttccaagacaaagagctaaatgatgtttctggagaagccactgctcaagagatgtatctgcctttcccaggacggtcagcctcctatgaagacataatcatagacgtgtgcaccaatttgcacgtcaaactaagaagtgttgtgaaagaggcttgtaaaagtaccttcctgttctaccttgtcgaaacagaagacaaatcattctttgtaagaacaaagaaccttctgaggaaaggaggccatacagaaattgaacctcagcacttctgtcaagctttccacagagagaatgatacactaatcatcatcatcagaaatgaagatatatcatcacatttgcatcagattccttctttgctgaagctgaagcatttccccagtgtcatctttgctggagtagacagccctggagatgttcttgatcacacctaccaagaactgtttcgtgcaggaggctttgtgatatcagatgacaagatactagaagctgtaacattagttcaactgaaggaaattatcaaaatcctggaaaaactaaatggaaatggaagatggaagtggttgcttcactacagggaaaataaaaagctaaaagaagatgaaagagtggattcaactgcacataagaagaacataatgttgaagtcatttcagagtgcaaatatcattgaattgcttcattatcaccagtgtgactctcgatcatcaacaaaagcagaaattctgaaatgtttgctaaacctgcaaattcagcatattgatgccaggtttgctgtcctcctaacagacaagcctactatccccagagaagtctttgaaaataatggaatccttgttacagatgtaaataactttatagaaaacatagaaaaaatagcagctccatttaggagtagctattggtgactcaactacagcctgcctggatatggatgatgccaataaaaaattagtattttccctttggaaaacttgtgaacatgtgaatacacatgtgaacagtcttacatttgaaaaaccaatgttctacaacttggaaagttttcattttttatattttgctgaaatatgtcacagtggcattgcagttgtctgttagctttgggttgcagtgctagatattgttttaaattattttcattttaaacaagatgccttctaagctattgagcttattaaaaataattttacatgtttacttagttggagcaaaaataagtctattttaacaaatagctttgtttttgcatgctaatgtcagaaaggcatacgatgcacattatgctgttttaaaggttttaccacccttgtaaaaactataatctcaaatggttttatttgctgttacacaaacaacactacataaaacattttttcctaaatggtacaaatttataaactatcatttttcacttacggtatttgtaaatactacactacaaaaatcagctttctgagaaagaaataatcatttatttatgatattgaaaatttctacagtaaacactcaaaaccaagcaaaaaacatttgtaagatacacggtatctatttggagcaacggtttttgtaactaatgtgtttcattttttaaataaagacaact

SEQ ID NO: 14903 - protein, 542 aa, Homo sapiens
METSLPPGHWTAAVKKEEKCVPPYVQIRDLHGILRTYANFSITKELKDTMRTSHGLRRHPSFSANCGLPSSWTSTWQVADDLTQNTLDLEYLRFAHKLKQTIKNGDSQHSASSANVFPKESPTQISIGAFPSTKISEAPFLHPAPRSRSPLLVTVVESDPRPQGQPRRGYTASSLDSSSSWRERCSHNRDLRNSQRNHTVSFHLNKLKYNSTVKESRNDISLILNEYAEFNKVMKNSNQFIFQDKELNDVSGEATAQEMYLPFPGRSASYEDIIIDVCTNLHVKLRSVVKEACKSTFLFYLVETEDKSFFVRTKNLLRKGGHTEIEPQHFCQAFHRENDTLIIIIRNEDISSHLHQIPSLLKLKHFPSVIFAGVDSPGDVLDHTYQELFRAGGFVISDDKILEAVTLVQLKEIIKILEKLNGNGRWKWLLHYRENKKLKEDERVDSTAHKKNIMLKSFQSANIIELLHYHQCDSRSSTKAEILKCLLNLQIQHIDARFAVLLTDKPTIPREVFENNGILVTDVNNFIENIEKIAAPFRSSYW

SEQ ID NO: 14904 - DNA, 3080 bp, Homo sapiens
  CDS (16)..(2940)
gatattgctgtccatatgacttacaatactggtcagacagttgtggcatttcatagtccttattggatggtcaataaaactggccgcatgttacagtacaaagcagacggaattcatcgaaagcatccacctaattataaaaagccagttctcttttcttttcagccaaatcacttttttaataacaataaggttcaacttatggtaactgatagtgagttgtccaatcagttttcaattgatactgttggtagtcatgaagctgttaaatgtaaaggcctgaaaatggactatcaagttggtgtcactatagacctgagcagttttaacattactagaattgtgacatttacccctttttatatgattaaaaacaaaagcaaataccatatatcagtggctgaagaaggaaatgataaatggctctctcttgatttggagcagtgtatccccttttggcctgagtatgcttctagtaaacttcttattcaagtcgaaaggagtgaagatcctcccaaaaggatatattttaacaagcaggaaaattgtattctattgcgtctagataacgagcttggaggtattatagcagaagtgaatttggccgagcattctacagttattacatttttagattatcatgatggagcagctagattcctcttaataaatcacacaaagaatgaacttgttcaatacaatcaaagttctctcagtgaaatagaagattccctccctcctggtaaagccgtgttttatacatgggctgatccggtgggctctagaaggctgaagtggagatgtagaaaaagccatggtgaagtaacacagaaggatgatatgatgatgcctatagatttgggggaaaagacaatatatttagtttcattctttgaaggtttacaacgcattattttattcactgaagatccaagggtatttaaagtaacatatgaaagtgagaaagcagagttagcagagcaagaaattgcagtggcattacaagatgttggaatttctcttgtcaacaattacacgaagcaagaagtagcctatataggcattacaagttctgatgtggtttgggaaacaaagcccaagaagaaggcaagatgggagccaatgagtgtaaagcacactgagaagttagagagagaatttaaggaatatactgaatcttctccttcagaagataaggttattcagttggacactaatgttccggttcgcctaacccctactggtcataacatgaaaattctgcagccgcatgtaatagctctacgaagaaattatcttccagcattaaaagtggaatataacacatctgcacatcaatcatcatttagaattcagatttacagaatacagatccaaaatcagatacatggtgctgtatttccctttgtgttttatcctgttaaacctccaaagtcggtcaccatggattcagcaccaaagccctttacagatgtcagtattgtcatgagatctgcaggacattcccagatatcacgtattaagtatttcaaagtattgattcaagaaatggatctcaggttagatcttgggtttatctatgctttaacagaccttatgacagaagctgaggtgactgaaaatacagaggttgagctttttcataaagatatagaagctttcaaagaagaatataaaacagcctcattagtagatcaatcacaagtcagcctctatgaatattttcatatatctcctatcaagttacatttaagtgtttcactgagttccggcagagaagaagctaaagattcaaaacaaaatggaggactgattccagttcattctttaaatcttttgctgaagagtattggtgccacactgacagatgtacaagatgtagtttttaagcttgcattttttgaactcaactatcagttccatacaacatccgatctacagtctgaagtcataagacactattcaaaacaggccattaagcagatgtacgtactcattcttggacttgatgttttgggaaatccatttggcttaattagagaattttctgaaggtgtagaagcatttttttatgaaccttaccagggagccatccagggtcctgaagagtttgtggaaggaatggcactaggacttaaggcactagttggtggagctgttggtggattggctggtgctgcctccaaaatcaccggtgctatggctaagggggtagcagctatgaccatggatgaagactaccaacagaagagaagagaagccatgaataagcaaccagctggttttagagaaggcatcactcgtggaggaaaaggcttagtttctggatttgttagtggcataacaggaattgttacaaaaccaatcaaaggagctcaaaaaggaggagcagctggtttctttaaaggtgttgggaaaggtttagtaggagcggtagcaaggccaactggaggcatcatagacatggctagcagtacatttcaggggataaaaagagctacagagacttctgaagtggagagtctgcgacctcctcggttcttcaatgaagatggagttatcagaccgtacaggttgagggatgggactggaaatcaaatgttacaggtcatggaaaatggaagatttgcaaaatacaaatattttacccatgtcatgatcaataagacagatatgctaatgataaccagacgtggtgtattgtttgtaacaaagggaacatttggacaactcacgtgtgagtggcagtatagttttgatgaatttaccaaagagccattcattgttcatgggagaagattgcgcattgaagcaaaggaacgagtgaagtctgtatttcatgccagagagtttggaaaaataattaacttcaagaccccagaggatgccaggtggatcctcacaaagctacaagaagcaagagaaccttctccgagcctctgacagagaacactgcctgaagacacacagcaataagtgattacagctcctagactaccttccaaaacctgtttgggaagcatattacagaaatgatttcaagtaccctgtattctggatgctaaaaaacaaaaacaaac

SEQ ID NO: 14905 - protein, 975 aa, Homo sapiens [sequence omitted]

SEQ ID NO: 14906 - DNA, 2510 bp, Homo sapiens
  CDS (38)..(1357)
ttcaagacttcccagctgtgaagttttgggggcaggaatgaagatggaccagcaagctgtctgtgagctgttgaaagtggagatgcctacaagactgccagaccggtcagtggcctggccttgccctgacagacatctccgggagaaaccttccttagaaaaggtcactttccagattggaagctttgcatctccagagtctgactttgaaagccgcatgaaaaaaatggaggaacgggtgaaggcctgtggcccctccttggaggccagtgaggctgctgatgtggctcaggacccgcaggtttctaggagcccttttaaacctggctttcaggagaatgtttgctgtcctcagaatcggctttcagagggggatgaaggcgagtctgacaagggttttgcagaggacagaggcagcagaaacgacatggcagcagatattgctgggcagctcagccacgctgctgacttgggcacagcctcccacggtgcaggaggaacgggagggaggaggctggaggccactagaggtttgtatgtgaaggctgcggaaggacctgtgctggagcctgttgcccccaggtgtgtccagcggggccctggcctcgtggctggtgcgaatatcccctgtggggatgacaacaagaaggccaacttcaggactgaaggagacattccccgaaatgaaagctcagatagcgccctgggagacagtgacgacgaagcctgcgcttcagccatgctagatctgggtcacggtggtgacaggactggagggtccttggaagtggagctgcctctgccaaggtctcagagcatcagcacccagaatgtaaggaactttggccgctcacttctggcgggctactgccccacatacatgcctgatcttgtgcttcatgggaccggcagtgatgagaagctgaagcagtgcctggtggccgaccttgtccacacagtccatcatccagtcctggatgagccaatagctgaagctgtctgtattatcgcagacacggataaatggagtgtgcaggtagctacaagtcagaggaaagtgacggacaacatgaaactaggccaggatgtcctggtctctagtcaggtgtccagtttgcttcagtccattttacagctctataagcttcacctccctgctgatttttgcatcatgcatcttgaagatagactacaggagatgtaccttaaaagtaaaatgctatctgaatatctccggggacacacacgagtccatgtgaaagaattaggtgtcgtactggggattgaatccaacgacctgcctctgttgactgctattgccagtactcattctccttatgtggctcaaatactcttataagctaaagctcaggacagttcttccttggaagaaaaaaatcaaattctcaactgaaggagaaaggaataagctctctgtgatgtcaaaagcatgagaagagcaaacagaaacagtcattccacctttttgttttgtgtttttgctgtcaagctgatgcttcattgaagacttaggtttacttgacataatagcatttgtgattgtcgtgaacactttaggccatttgttacccatgaatcaacaaagaaactgacctttttggtaggaggaaacataagcactaaacactaagctgttgcaacagattcccttgtgctgtttgggcagaataaagacaagtgacttgagcggggtggtcagcagtgtacataatattccagtaggaaactgcttccaagtttaagcatgagctccccaaactggagaaaacatattttgctattctgagacaacaatcagaatacagactttggattccaggtcacagtttgctttttagacaaggtaaagcaaagaaagccacattgtgccatcttcagctccagtggctttagcagtgactgtttgacataaaacatgtaagaattgcttgttgggaagagtgctttagggacccactgttttcatttcttcttggagtttaccttgtttcagatgcagccatgggtaggtcagagatggattgttggtgcaataaacccaagaatcaatgtagcctcttaatcccatcaagatgtagtttgtagcagcaaagtgtacagtctgaaaccgtatgttttatccttatattttagagctttcagcagcctttttaagagaggccacttaccaaagttatttctataagctcaagagtgtttcggttggtaagttcttccagctgaagccactttttccttatagttaatacaaatgactatttttactttaaaaggcacagctgtcctggtgggaaatgaaacctgcagcagttcaggatgactaatgaaagcaattagcttgaacatttagaaaaaattcatatatgatctaaatttttatattaccatttctgtgccttctaattcctgcatcctgttcaaaacatctttccagacattaacttacacattgtataaaaccgaccaaaatgatttcctaaagttcatgc

SEQ ID NO: 14907 - protein, 440 aa, Homo sapiens
MKMDQQAVCELLKVEMPTRLPDRSVAWPCPDRHLREKPSLEKVTFQIGSFASPESDFESRMKKMEERVKACGPSLEASEAADVAQDPQVSRSPFKPGFQENVCCPQNRLSEGDEGESDKGFAEDRGSRNDMAADIAGQLSHAADLGTASHGAGGTGGRRLEATRGLYVKAAEGPVLEPVAPRCVQRGPGLVAGANIPCGDDNKKANFRTEGDIPRNESSDSALGDSDDEACASAMLDLGHGGDRTGGSLEVELPLPRSQSISTQNVRNFGRSLLAGYCPTYMPDLVLHGTGSDEKLKQCLVADLVHTVHHPVLDEPIAEAVCIIADTDKWSVQVATSQRKVTDNMKLGQDVLVSSQVSSLLQSILQLYKLHLPADFCIMHLEDRLQEMYLKSKMLSEYLRGHTRVHVKELGVVLGIESNDLPLLTAIASTHSPYVAQILL

SEQ ID NO: 14908 - DNA, 2076 bp, Homo sapiens
  CDS (54)..(1631)
agtcttgtttcgggttccggctgcgttgggcttgcgtgcggctcgctaagactatggcgtccgggcctcattcgacagctactgctgccgcagccgcctcatcggccgccccaagcgcgggcggctccagctccgggacgacgaccacgacgacgaccacgacgggagggatcctgatcggcgatcgcctgtactcggaagtttcacttaccatcgaccactctctgattccggaggagaggctctcgcccaccccatccatgcaggatgggctcgacctgcccagtgagacggacttacgcatcctgggctgcgagctcatccaggccgccggcattctcctccggctgccgcaggtggcgatggcaacggggcaggtgttgtttcatcgttttttctactccaaatctttcgtcaaacacagtttcgagattgttgctatggcttgtattaatcttgcatcaaaaatcgaagaagcacctagaagaataagagatgtgattaatgtattccaccacctccgccagttaagaggaaaaaggactccaagccccctgatccttgatcagaactacattaacaccaaaaatcaagttatcaaagcagagaggagggtgctaaaggagttgggattttgtgttcatgtcaagcatcctcataagatcattgttatgtatttacaagtcttagaatgtgaacgtaatcaaaccctggttcaaactgcctggaattacatgaatgacagtcttcgaaccaatgtgtttgttcgatttcaaccagagactatagcatgtgcttgcatctaccttgcagctagagcacttcagattccgttgccaactcgtccccattggtttcttctttttggtactacagaagaggaaatccaggaaatctgcatagaaacacttaggctttataccagaaaaaagccaaactatgaattactggaaaaagaagtagaaaaaagaaaagtagccttacaagaagccaaattaaaagcaaagggattgaatccggatggaactccagccctttcaaccctgggtggattttctccagcctccaagccatcatcaccaagagaagtaaaagctgaagagaaatcaccaatctccattaatgtgaagacagtcaaaaaagaacctgaggatagacaacaggcttccaaaagcccttacaatggtgtaagaaaagacagcaagagaagtagaaatagcagaagtgcaagtcgatcgaggtcaagaacacgatcacgttctagatcacatactccaagaagacactataataataggcggagtcgatctggaacatacagctcgagatcaagaagcaggtcccgcagtcacagtgaaagccctcgaagacatcataatcatggttctcctcaccttaaggccaagcataccagagatgatttaaaaagttcaaacagacatggtcataaaaggaaaaaatctcgttctcgatctcagagcaagtctcgggatcactcagatgcagccaagaaacacaggcatgaaaggggacatcatagggacaggcgtgaacgatctcgctcctttgagaggtcccataaaagcaagcaccatggtggcagtcgctcaggacatggcaggcacaggcgctgactttctcttcctttgagcctgcatcagttcttggttttgcctatctacagtgtgatgtatggactcaatcaaaaacattaaacgcaaactgattaggatttgatttcttgaaaccctctaggtctctagaacactgaggacagtttcttttgaaaagaactatgttaatttttttgcacattaaaatgccctagcagtatctaattaaaaaccatggtcaggttcaattgtactttattatagttgtgtattgtttattgctataagaactggagcgtgaattctgtaaaaatgtatcttatttttatacagataaaattgcagacactgttctatttaagtggttatttgtttaaatgatggtgaatactttcttaacactggtttgtctgcatgtgtaaagatttttacaaggaaataaaatacaaatcttgttttttct

SEQ ID NO: 14909 - protein, 526 aa, Homo sapiens
MASGPHSTATAAAAASSAAPSAGGSSSGTTTTTTTTTGGILIGDRLYSEVSLTIDHSLIPEERLSPTPSMQDGLDLPSETDLRILGCELIQAAGILLRLPQVAMATGQVLFHRFFYSKSFVKHSFEIVAMACINLASKIEEAPRRIRDVINVFHHLRQLRGKRTPSPLILDQNYINTKNQVIKAERRVLKELGFCVHVKHPHKIIVMYLQVLECERNQTLVQTAWNYMNDSLRTNVFVRFQPETIACACIYLAARALQIPLPTRPHWFLLFGTTEEEIQEICIETLRLYTRKKPNYELLEKEVEKRKVALQEAKLKAKGLNPDGTPALSTLGGFSPASKPSSPREVKAEEKSPISINVKTVKKEPEDRQQASKSPYNGVRKDSKRSRNSRSASRSRSRTRSRSRSHTPRRHYNNRRSRSGTYSSRSRSRSRSHSESPRRHHNHGSPHLKAKHTRDDLKSSNRHGHKRKKSRSRSQSKSRDHSDAAKKHRHERGHHRDRRERSRSFERSHKSKHHGGSRSGHGRHRR

SEQ ID NO: 14910 - DNA, 3402 bp, Homo sapiens
  CDS (115)..(2619)
acgggcggccggatttgcccggaggccgcacccgcctccggcggggctctcagtgaaaaatgtactctgacctgaatcctgaattttccttgatggtcaaaagattaagaaatcatgagtggaggatctcaagtccacattttttggggtgctccaattgctccactgaaaatcacagtatcagaagacacagcttctttaatgtctgttgctgacccctggaaaaaaattcagcttttatacagtcaacattctttatatctgaaggatgaaaaacagcacaaaaatcttgaaaactataaagtcccagaatctattggttctccagatcttagtggtcatttcttagcaaactgtatgaatagacatgttcatgtgaaagatgactttgtacgttctgtttctgaaacacagaatatagaatcccagaagattcactcctctagactgagtgatataactagctctaatatgcaaatatgtggatttaaaagcacagttccgcatttcaccgaagaagaaaagtatcaaaagcttctcagtgaaaataaaattagagatgaacagcctaaacatcagccagatatatgtggtaagaactttaacacaaatttgtttcagttgggccataaatgtgcagctgtgttggatttggtttgtagtactgaaaaaattaatatagggcctgaagtggtacaaagagagtgtgtgccaacagaatatcatgaaatacaaaaccagtgtttgggattattttcctcgaacgcagtagataagtcaaggtctgaagcagcagttaggaaggtctcagaccttaaaatatcaactgatacagaatttctcagtataattacctccagccaggttgcttttttagctcaaaagaaagataaaaggcggagtcctgtaaataaagggaatgtaaacatggagactgaaccaaaggcaagttacggggagataagaatacctgaagagaattcgattcagcttgatggttttacagaagcatatgaaagtggacaaaaccaagcatattcccttgaactttttagtcctgtttgtcctaaaacagaaaatagccgcattcacataaactctgataaaggtcttgaagaacatacaggatctcaagaacttttcagttctgaagatgaactgccaccaaatgagatacgtattgagttgtgtagctcaggaatactgtgttcccaactaaataccttccacaaaagtgctattaaaagaagctgtacctctgaagataaagtgggccagtctgaagctctatctagagtccttcaagtagctaagaaaatgaagttgatttctaatggaggagattctgctgtagaaatggatcggagaaatgtgtctgaatttaagagtattaaaaaaacatcattaataaaaaactgtgattctaaaagccagaagtataattgtttagtcatggtgctatctccatgccatgtgaaggaaataaacataaaattcggaccaaattctggctctaaagtgcctttagcaacagttacagtaattgatcaatcagaaactaagaagaaggtttttctgtggaggactgcagcattttgggcatttacagtgtttcttggagatataattttactcacagatgttgttattcatgaggaccaatggattggcgagacagtactacaatcaacatttagcagtcagttattaaatcttgggagttattcatctattcagcctgaagaatattccagtgtagttagtgaagttgtacttcaagacttactggcatatgtgtcctcaaaacattcctacctcagagatcttcctccgaggcagcctcagagggtgaacagtatagactttgtagaattggagcaccttcaacctgatgtattagtccacgcagtactaagagttgttgatttcactatactgacagaggcagtatacagttatagaggacagaagcagaaaaaagttatgttaacagtggaacaggcccaagatcaacattatgcgcttgtattatggggtcctggagcagcctggtaccctcaacttcaaaggaaaaaaggagtggttctgattaaagcccagatttcagagctggcatttcctattacagcatctcagaagatagcgctaaatgctcacagttctctgaagagtattttttcttctcttcccaacatcgtatatactggctgtgcaaaatgtggattggaactagaaacagatgagaacaggatctacaaacaatgttttagctgcttgccacttactatgaagaaaatatattataggccagcgttaatgactgccattgatggaagacatgatgtttgtatccgtgtagaatcaaagctgatagagaagattcttctcaacatttctgcagactgcctcaacagagtgatagttccttcctcagagatcacctatgggatggtcgtggcagacctgttccactccttgttggcagtcagcgcagaaccttgtgtattaaagattcagagcctttttgtgttagatgaaaacagctatccattacaacaagatttctccctcctggatttttatcctgacattgtaaagcatggagccaatgcccgtctctgaggccagaggaagaaattgcaggcatttcaaggaagaagtactgaaatgatttgtcttttgaaataaatgaatgacagggcttttgctttggattttttatgaaatatattttataaagagaattgcactagatatataaattaaaacttttttctaagaaaatcctgtgaggtttaaaaagattgtttttgtcttttggtttcttcctttctcctggagaaatgatctaccagtcaaggcaatatgtagcagatccctgggaattaaaggtttgcccatttgttcactgtatttagtccctgctacattccaggcattgtactaagtatggggaaccacagagaagacattccctcagaaactgctgcagtgctttcgcttatccctacctaaaaaaccgtcaatgtgaaatcatttccttgattataactataatgataatggattagtttatataaacctatgtttagacaagttcaagacaagcgtgtctttctataaaaagtattgaaaatgaaggaaatgagatcatgtttcaatttattaaagcagggaagagcgttctgtggttagttcgtgtctaggatttgagtgccttactgaatgcatttaccagcaaacatgtagcaatctgttctctcattgtgattgtggaagaagctcatgtaaaatgatagtcattaatgaggaagtatggcgtggtacttattctgtaagttcagagtatgctgagtgttaatagattatcatattgcctgaaaataaattcatgatgacatg

SEQ ID NO: 14911 - protein, 835 aa, Homo sapiens
MSGGSQVHIFWGAPIAPLKITVSEDTASLMSVADPWKKIQLLYSQHSLYLKDEKQHKNLENYKVPESIGSPDLSGHFLANCMNRHVHVKDDFVRSVSETQNIESQKIHSSRLSDITSSNMQICGFKSTVPHFTEEEKYQKLLSENKIRDEQPKHQPDICGKNFNTNLFQLGHKCAAVLDLVCSTEKINIGPEVVQRECVPTEYHEIQNQCLGLFSSNAVDKSRSEAAVRKVSDLKISTDTEFLSIITSSQVAFLAQKKDKRRSPVNKGNVNMETEPKASYGEIRIPEENSIQLDGFTEAYESGQNQAYSLELFSPVCPKTENSRIHINSDKGLEEHTGSQELFSSEDELPPNEIRIELCSSGILCSQLNTFHKSAIKRSCTSEDKVGQSEALSRVLQVAKKMKLISNGGDSAVEMDRRNVSEFKSIKKTSLIKNCDSKSQKYNCLVMVLSPCHVKEINIKFGPNSGSKVPLATVTVIDQSETKKKVFLWRTAAFWAFTVFLGDIILLTDVVIHEDQWIGETVLQSTFSSQLLNLGSYSSIQPEEYSSVVSEVVLQDLLAYVSSKHSYLRDLPPRQPQRVNSIDFVELEHLQPDVLVHAVLRVVDFTILTEAVYSYRGQKQKKVMLTVEQAQDQHYALVLWGPGAAWYPQLQRKKGVVLIKAQISELAFPITASQKIALNAHSSLKSIFSSLPNIVYTGCAKCGLELETDENRIYKQCFSCLPLTMKKIYYRPALMTAIDGRHDVCIRVESKLIEKILLNISADCLNRVIVPSSEITYGMVVADLFHSLLAVSAEPCVLKIQSLFVLDENSYPLQQDFSLLDFYPDIVKHGANARL

SEQ ID NO: 14912 - DNA, 2415 bp, Homo sapiens
  CDS (25)..(2319)
tccggaagtggcttctgcgacaacatgcttgcggacctcggcttaatcggaaccataggcgaggatgacgaggtgccggtggagcccgagtctgactccggggacgaggaagaggaggggcccattgtgctgggcagacgacaaaaagctttggggaagaaccgcagtgctgatttcaaccctgatttcgttttcactgagaaggaggggacgtacgatggcagctgggccctggctgatgtcatgagccaactcaagaagaagagggcagccactacattagatgagaagattgagaaagttcgaaagaaaaggaaaacagaggataaagaagccaagtctgggaagttggaaaaggagaaagaagcaaaggaaggctctgaaccaaaggagcaggaagaccttcaagagaatgatgaggaaggctcagaagatgaagcctcggagactgactactcatcagctgatgagaacatcctcaccaaagcagatacactcaaagtaaaggatcggaagaagaagaagaagaaaggacaggaagcaggaggattttttgaagatgcatctcagtacgatgaaaacctctcgttccaggacatgaacctttcccgccctcttctgaaggccattacagccatgggcttcaagcagcccaccccgatccagaaggcgtgcatacctgtgggtctattggggaaggacatctgtgcctgtgcagccactgggacaggtaaaactgccgcctttgccctgcctgttttggagcgtctgatttataaaccccgccaggctccagtcacccgcgtgctggtgctagtgcccacccgagagctgggcatccaggtgcactctgtcaccagacagctggcccagttctgcaacatcaccacctgcctggctgtgggcggcttggatgtgaagtctcaggaagcagctcttcgggcagcgcctgacatcctcatcgccaccccaggccggctcatcgatcacctccacaactgcccttccttccacctgagcagcatcgaggtgctcatcctggacgaggctgacaggatgctggatgagtactttgaggagcagatgaaggagatcatccgaatgtgttcccaccaccgccagaccatgctcttctcggccaccatgacagacgaggtgaaagatctggcttctgtctccttgaagaatcctgtccggatatttgtgaacagcaacacagatgtggctcccttcctgcggcaggagttcatccggatccggcctaatcgtgaaggagaccgggaagccatcgtggcagctttgttgacgaggaccttcactgaccatgtgatgctgttcacgcaaaccaagaagcaggcccaccgcatgcacatcctcctggggctcatggggctgcaggtgggtgagctccatggcaacttgtcacagacgcagcggctggaggccctccggcgttttaaggatgaacagattgacatcctcgtggccactgatgtggcagcccgtggacttgacattgagggggtcaaaacggtaatcaacttcacaatgcctaataccatcaaacattatgaccaccgggtggggcgaacagcacgtgctggcagggctgggcgctcagtctctctggtgggagaagatgagcggaagatgctgaaggagattgtaaaagctgccaaggcccctgtgaaggccaggatacttccccaagatgtcatcctcaaattccgggacaagattgagaaaatggagaaagatgtgtatgcagttctgcagctagaggcggaggaaaaagagatgcagcagtcagaagcccagatcaatacagcaaagcggctcctggagaaggggaaggaggcagtggtccaagagcccgagaggagctggttccagaccaaagaagagaggaagaaggagaaaattgccaaagctctgcaggaatttgacttggccttaagaggaaagaagaaaaggaagaagtttatgaaggatgccaaaaaaaagggggagatgacagcagaggaaaggtctcagtttgaaatcctcaaggcgcagatgtttgctgaacggctagcgaagaggaatcgcagagccaagcgggcccgagcaatgcccgaggaggagccagtgagaggtcctgccaagaagcaaaagcaggggaagaaatctgtatttgatgaagaactcaccaacacaagcaagaaggccctgaaacagtatcgagctggcccttcctttgaagaaaggaaacagttgggcttgccccaccagagacgaggaggaaactttaaatctaaatccagatacaagaggaggaagtagctgtcgtggcctgaagaaattcatgggggcagcccttaaatcccttccctgtgggaagtcatcctggctggtctgtcttttctccatttgttt

SEQ ID NO: 14913 - protein, 765 aa, Homo sapiens [sequence omitted]

SEQ ID NO: 14914 - DNA, 3472 bp, Homo sapiens
  CDS (23)..(2281)
agccaacaccgcctttctcagcatggagacctttgagcccatcagccaagagcccctcagccaagccagctatgacaaagccccagacccagttcctgagctccaagactcgttctatgcagaactgcaacgtgcagagagcctccaagagaagagcataaaagaggccaagaccaaatgcaggacaattgcatccctgctcactgcagcccccaacccccactccaaaggggtacttatgtttaagaaacggcggcagagagccaagaagtacaccctggtgagcttcggggctgctgctgggacaggcgctgaggaggaggacggcgttccccccacgagtgagtccgagctggacgaagaagccttctctgacgcccgcagcctcaccaatcaatctgactgggacagtccctatctggacatggagcttgccagggcgggctcaagagcatcagagggccagggctctgggctgggagggcagctgagtgaggtctctgggcgaggggtgcagctctttgaacagcagcgccagcgcgcagactccagcacccaggaactggcacgggtcgaaccagcagccatgctcaacggggaaggcctgcagtcaccacctcgggcccagagtgctcccccagaggcagctgtgctcccacccagccccttgccggcgcctgtagccagccccagacccttccaaccaggtggtggagccccgaccccagctccaagcatctttaaccggtcagccaggccctttaccccgggcctacaagggcagcggccaactaccacctcggttattttccggcctttagcccccaaaagggcgaacgacagcctggggggcctcagccccgccccaccccccttcttgtcttcgcaggggcccacccctctgcccagcttcacttcaggggttcccagccacgcgccagtctctggttcccccagcaccccacgctcctcgggccctgtgacagccaccagctccctgtacatcccagcccctagtcggcctgtcaccccaggtggagctccagagccccccgctcctcctagcgcagctgccatgacctccaccgcttctatcttcctatctgcgcctttgcgaccctctgcgcgcccagaggcgcctgccccaggcccaggggctcctgagccccccagcgctcgcgagcagcgcatctctgtgccagctgcccgcacgggtatcctgcaggaggcccggcgccgggggacccggaagcagatgttccggccgggaaaggaggagacgaagaactcgcccaaccccgagctgctatcgctggtacagaacctggatgaaaagcctcgggccgggggtgcagaatctggtcctgaagaagatgctctgagcctcggggctgaagcctgcaacttcatgcagccagtaggggccaggagttacaagaccctgcctcacgtgacacctaagaccccccctccaatggctcccaagaccccgccccctatgactcctaagactccacccccagtggctcctaagcccccatctcgagggctccttgatgggctcgtgaatggggcagcctcttcggctggaacccctgagccaccaaggctgcagggcaggggtggggagctgtttgctaagcggcagagccgtgcggacaggtatgtggtggaaggtacacctggtcctggtcttggccctcggcctagaagtccttctcctaccccgtctctgcccccttcctggaaatattcacccaacatccgtgccccgcctcctattgcttacaacccactgctctctccctttttcccccaggcggcccgaactctccctaaggcccaatcccaggggcctcgggcaacacccaagcagggcatcaaggctctagattttatgcggcatcagccctatcaacttaaaactgccatgttctgttttgatgaggttcccccgactcctggccctatcgcctcagggtcccccaaaactgcccgagtccaggagattcgccggttttccactccggcaccccagcccactgcagaacccctggctcccactgtgcttgccccccgagcagccactacactggatgagcccatctggagaacagaactggcctcagcccctgttcctagcccagcccctcctccagaggctcccaggggccttggggcttctcccagctcctgcggtttccaggtagccaggccccgattttcagccaccagaacaggattgcaagctcatgtgtggaggcctggggcagggcaccagtgaacaggcacaggtcccaggaccaaggagaggtggaacatccagttcctaaagttgcttctcctaccctatcccatcccctgtcacgcatctggaagctaaattgcctcctgccagagatggtttccaagttgatgtccccttcccccaccttcctcctcactctctacctccctgccgctttccaaccaagtatgtctgctttggtatctttgcctctctttgtctctgcatttcctttcctggatctctgtctttatttccaggcttctccacccatattcctccacagatctctcttccttgacatttgtgcttttctccctgggcctcattttaatgttcagtgagaagtaaacagagcagaagtgaccactgggacttcaggcaagaagctcaccaccaggcacacagcaaagggactgaactgacccctgtttgcactaagccacccccaccccccactctgctttcccaagcttgactggcatatacctaggcctgtgtgtgtgtgtgtgtgtgtgtgtgtgtgtgtgtgtgtgtgctcttccgtctaaggcatgaataagaggggaggtcaaaataaagacccaatctgaggccgggcacggtggctcacgccggtaatcccagcactttgggaggccgaggcgggcggatcacgaggtcaggagatcgagaccatcctggctaacacggtgaaaccccatttccactaaaaatacaaaaaattagctgggcgtggtggcgagcgcctgtagtcccagctactcgggaggctgaggcaggagaatggcatgaacctggaaggcggagcttgcagtgagctgagattgcgccactgcactccagcctgggcgacggagcgagactctgtctcaaaacaaacaaacaaacaaaagacccaatctgagtcttatcgttgtactgatagaagggtcagatatccccacatggagttgagtgggagaaagagattcactagagaataactccttagagaccaatgtctgtagcaggtgtacagcatcttgtgaaagttatggagcatgaaaagactgaagggccaggacagtttgcatgggctgagttataccagctagaccaggaatagaacgaagaattctatacctcaggatttcaaaaagttagcaacttgagaggccagtgctgagcaacccagtacccagg

SEQ ID NO: 14915 - protein, 753 aa, Homo sapiens
METFEPISQEPLSQASYDKAPDPVPELQDSFYAELQRAESLQEKSIKEAKTKCRTIASLLTAAPNPHSKGVLMFKKRRQRAKKYTLVSFGAAAGTGAEEEDGVPPTSESELDEEAFSDARSLTNQSDWDSPYLDMELARAGSRASEGQGSGLGGQLSEVSGRGVQLFEQQRQRADSSTQELARVEPAAMLNGEGLQSPPRAQSAPPEAAVLPPSPLPAPVASPRPFQPGGGAPTPAPSIFNRSARPFTPGLQGQRPTTTSVIFRPLAPKRANDSLGGLSPAPPPFLSSQGPTPLPSFTSGVPSHAPVSGSPSTPRSSGPVTATSSLYIPAPSRPVTPGGAPEPPAPPSAAAMTSTASIFLSAPLRPSARPEAPAPGPGAPEPPSAREQRISVPAARTGILQEARRRGTRKQMFRPGKEETKNSPNPELLSLVQNLDEKPRAGGAESGPEEDALSLGAEACNFMQPVGARSYKTLPHVTPKTPPPMAPKTPPPMTPKTPPPVAPKPPSRGLLDGLVNGAASSAGTPEPPRLQGRGGELFAKRQSRADRYVVEGTPGPGLGPRPRSPSPTPSLPPSWKYSPNIRAPPPIAYNPLLSPFFPQAARTLPKAQSQGPRATPKQGIKALDFMRHQPYQLKTAMFCFDEVPPTPGPIASGSPKTARVQEIRRFSTPAPQPTAEPLAPTVLAPRAATTLDEPIWRTELASAPVPSPAPPPEAPRGLGASPSSCGFQVARPRFSATRTGLQAHVWRPGAGHQ

SEQ ID NO: 14916 - DNA, 2368 bp, Homo sapiens
  CDS (8)..(2143)
agatactatgtccctgctttctaagatcattagccctggttcctcaacacccagcagtacaagatcaccaccccctgggagagatgaaagctacccccgagagctctccaattctgtatctacatatcgaccctttggtctgggcagtgaatctccctataagcagccttctgatggaatggagagaccatcttccctgatggactcttcacaggaaaagttctacccagatacttctttccaagaagatgaggattaccgagattttgagtattcagggcctccaccctctgccatgatgaacctagagaagaaaccagccaaatctatcctgaaatcaagcaagctgtctgataccaccgagtaccagccaattctgtccagttatagccacagagcccaagaatttggggtaaagtctgccttccctccatctgtaagggccctcctggactctagtgagaactgtgaccgtctctcatcttcccctgggctatttggtgccttcagcgtaagagggaatgaacctgggtctgaccggtcaccatcaccgagtaagaatgattcatttttcacccctgactccaaccacaatagcttgtctcaatctaccactgggcatctcagtttgccacagaagcagtacccagactctcctcacccagtcccacatcgttcccttttctctccgcagaacacccttgccgctcccacgggtcacccacccacgtcaggcgtggagaaagtcctggcctccaccatttccaccacgtcgacgattgaatttaagaatatgcttaaaaacgcctcacgtaagccctcagatgataagcattttggccaggctcccagcaagggcactccaagtgacggtgtcagtctctcaaacctcacccaacccagcttggccgccactgatcagcagcaacaagaagagcactaccgcatagaaacccgcgtctcctcctcctgcttagacttgcctgatagcacagaagaaaagggggcccctatagaaaccttgggttatcacagtgcatccaataggaggatgtcaggggagccgatccagaccgtagagtccatccgagttcctgggaagggaaatagaggacatgggcgtgaggcttcaagggtgggttggtttgatctgagcacatcaggtagctcttttgacaatggcccttcaagtgcctctgagttggcatcccttgggggtgggggcagcggaggcctcactggctttaaaacagcaccatacaaggaacgggcacctcaatttcaggagagtgtcggcagctttcgttccaacagtttcaactcaacatttgagcatcatcttcccccatcccccttggaacatgggacacccttccagagagagccagtggggccatcatctgccccacctgtccctcctaaggatcatggtggtatcttctctcgagatgcacccactcatctaccctctgtggatctttcgaaccccttcacaaaggaggcagccctggcccatgctgccccaccccctcctcctggagagcacagtggaattcctttccctaccccacctcctcctccccctcctggggaacatagcagcagtggtgggagtggtgtccccttttctactccaccccctcctccaccccctgttgaccactctggagttgtacccttcccagccccaccactggcagagcacggagtggcaggggctgtggcagtatttcccaaggaccatagttccctccttcaagggaccctggctgagcattttggggtactcccaggacccagggaccacgggggccccacccaacgggacctcaacggccctggccttagccgtgtacgagagagcctcaccctaccctcccattctctggaacacctgggcccaccccatggaggaggaggtgggggaggcagcaacagcagcagtggcccccccttgggtccctcacacagagacaccatcagccggagtggtataatcttacggagtccccggccagactttcggcctagggaaccttttctcagcagagacccatttcacagtttaaagagacccaggccaccttttgctaggggccctccgttctttgcaccaaaacgcccattcttccctcccaggtactgatggaaaccgagggaaaggcattttgaacagtctagagaacattggaagtaggagtttggtttattgttgttgtttttatttgttttctctttctcgattttttttttattataacaaagggcctctcttccaaagtaagaaatcacatacgcttacgttttactattcaattcaatcctccctcccattgcacttatctaccttccccaagttgtttgtatt

SEQ ID NO: 14917 - protein, 712 aa, Homo sapiens
MSLLSKIISPGSSTPSSTRSPPPGRDESYPRELSNSVSTYRPFGLGSESPYKQPSDGMERPSSLMDSSQEKFYPDTSFQEDEDYRDFEYSGPPPSAMMNLEKKPAKSILKSSKLSDTTEYQPILSSYSHRAQEFGVKSAFPPSVRALLDSSENCDRLSSSPGLFGAFSVRGNEPGSDRSPSPSKNDSFFTPDSNHNSLSQSTTGHLSLPQKQYPDSPHPVPHRSLFSPQNTLAAPTGHPPTSGVEKVLASTISTTSTIEFKNMLKNASRKPSDDKHFGQAPSKGTPSDGVSLSNLTQPSLAATDQQQQEEHYRIETRVSSSCLDLPDSTEEKGAPIETLGYHSASNRRMSGEPIQTVESIRVPGKGNRGHGREASRVGWFDLSTSGSSFDNGPSSASELASLGGGGSGGLTGFKTAPYKERAPQFQESVGSFRSNSFNSTFEHHLPPSPLEHGTPFQREPVGPSSAPPVPPKDHGGIFSRDAPTHLPSVDLSNPFTKEAALAHAAPPPPPGEHSGIPFPTPPPPPPPGEHSSSGGSGVPFSTPPPPPPPVDHSGVVPFPAPPLAEHGVAGAVAVFPKDHSSLLQGTLAEHFGVLPGPRDHGGPTQRDLNGPGLSRVRESLTLPSHSLEHLGPPHGGGGGGGSNSSSGPPLGPSHRDTISRSGIILRSPRPDFRPREPFLSRDPFHSLKRPRPPFARGPPFFAPKRPFFPPRY

SEQ ID NO: 14918 - DNA, 2402 bp, Homo sapiens
tgctaataaaggtaggagagtacatttgttggaataacagaaatggtgatttcagcctaaaagtttctgagggtaaaggatcacatgaccttcaggaaactctctgcctcctgtaggtgctttcctatctcccccatccttccctaccccttttcccttttccttcctctctttttctctcactgtcactctgtctacacacactggcatcttttgaacactaaaagtaagcactgttttttaaaaaagtaattatttgttggatcagatacttttatcccaagtgaataccttcactgagatgtggccaatgcaatagtttcacagtaaaaacagtgcctataagaaaatagatcacatactatttttcaatgatattaagtgtattttgtaactattttcatttggtccttgtaacatgaaataatacatggaacttacctttataataaaaatggagtgccctggttcatcatagaggtgcatctagtttgcccttaatggaagtatacttgctgtgtggattgatagcaccttcttgaaatggaggagctcagctggcctcatggatgtgcaatttttgcagtcccacagggccttgcatacagaagcaccccgagctcagttgaatgtctgtttgattttttcttatttatttttttgagacacagttccactttgtctttttgtcacccaggatggagttcagtggcacaaacatggctcactgtagcctcgacctccctggctgaagggatcctcccacctcagcctcccaagtaaccgagactacaggcatgtgccagcatgtccagctaatttttgtattttttgtagagacagggtttcaccatgttgcccaggctggtctcaaactcctgggctcaagcgatctgcccacctctgcctcccaaagtgctgggattaaaggcataagccaccatgtccaactgaaattcttaataattaataatttttgagcaagaggtccacactttcattttgcactgggttcccaaacaggtcctgggtagtaaggatggctgaggataaaacaggagttgctttggcctggctgaacatttgaaccaatgatcagagtttcattttatgattgtgttactctgaacagatttgctatttttttccagctacatttagagttcctcatgtatatatcgcccctctttttccagtccatctaacctctccttttttttgtgcctagaatcagttctccttgccttcaaaatccctgataagtgtccatttctttttgtatcctttgatgtagaagccacaagaatggctttagcagcttattttaatcttatgaattattcattcaggattttttaaatgattcagatgctttcagtctgttaacagtatttataaaacatgtttcagtgatacaacataggtgaactaaaccaaagatgcaaatgccttggaggaaaagaaattgtattatagagaatcctgagatatatccttttgggttgtttaatttaaagcctatcacaaaacaaagagaattgtcgcactttaattccaacctcctgcagtacttcacaacccttagcataagattctgaaatttgtaataggtggtacctagtttgatgcagggttttgcagcagttgtgcgaatgcctctgcgcaacggcctttcagtcagactaaatgagaaaatccaaactgtcctatcaaaactgacccacaataactgtactctgaggcgaaacagagcaaatgtgggtttcctgttttcattgtaaaacattccaggttctcagattgaagagctacattcagctgatagttgacatctgttccctcacacgtagtggctctcaacacgggctgcactttggaatcacctgaggacctttcggaatcttcggttgaatcatcctggctgtcctggtgatgcttcttatgtgcagctaggctggagaaccactacagggctgacacctggaatgggagcttgtaacttttacaaaataatagatgtttatcatcttttgcaatttttacttttaaatctatactaaaatgagccaaagaagtcttaacaatgatgtatggcacaattggttggttgaggctatcattccatgattacaaataggtggttatgtggggtggttttgcacttgtggcaattggactgcaatttggccttaaaatgacacaattcctcgttctcagatggagaggaattgccttgaaatttgcatgtaccagactaagtgccagtatatatatgactgatattttcgtgactcatagaaggtgtccatggtatagagtttatgcctacatctctatctttattttgggcacacatgagcttttgttaattatttctttgtacttgttagaatctgtttttg

SEQ ID NO: 14919 - DNA, 2552 bp, Homo sapiens
  CDS (74)..(766)
tgattttggagttgctggtcagctgacagatacacagattaaaagaaatacctttgtgggaactccattttggatggctcctgaagttattcaacagtcagcttatgactcaaaagctgacatttggtcattgggaattactgctattgaactagccaagggagagccacctaactccgatatgcatccaatgagagttctgtttcttattcccaaaaacaatcctccaactcttgttggagactttactaagtcttttaaggagtttattgatgcttgcctgaacaaagatccatcatttcgtcctacagcaaaagaacttctgaaacacaaattcattgtaaaaaattcaaagaagacttcttatctgactgaactgatagatcgttttaagagatggaaggcagaaggacacagtgatgatgaatctgattccgagggctctgattcggaatctaccagcagggaaaacaatactcatcctgaatggagctttaccaccgtacgaaagaagcctgatccaaagaaagtacagaatggggcagagcaagatcttgtgcaaaccctgagttgtttgtctatgataatcacacctgcatttgctgaacttaaacagcaggacgagaataacgctagcaggaatcaggcgattgaagaactcgagaaaagtattgctgtggctgaagccgcctgtcccggcatcacagataaaatggtgaagaaactaattgaaaaatttcaaaagtgttcagcagacgaatccccctaagaaacttattattggcttctgtttcatatggacccagagagccccaccaaacctacgtcaagattaacaatgcttaacccatgagctccatgtgccttttggatctttgcaacactgaagatttggaagaagctattaaactattttgtgatggcgtttatcattttatattttgaaaggattattttgtaaggaataacttttaatactatagtttcacctgtattctagtaaatgttgagacaccgttttgcttttaagtatccctatttcttaagttacgaggatgaatacctttcacattttgatctttaattgactctacagtcatgaaacatacaggtctttcaaagtcattctcaatattcagcttttgtaaattatcaagcttcaaaaagctttttttttaaaaaaaaaacatgcatattctaaaaatgactattggtggggaggtgtaaataagtcataccttcttaaaacagaaaatttaagtaaagtcttttaaatgaaacctgtaaaagtattgactcttctaccaagttggtatgatattccaggcagctcaatgattatcacatttgagaccctgtgtttgaagcatttacaggcaatgtacagcaacagaggtacctcttggtgtatagtatttacattctcttttaggtagaagaggcaattttacccttatttcacatggttagaaatttaaagcaagatcatttacccaaggataggtgtttggtaatgttgaaggagttagtctggcttcatgttttacatcttcaactaaaatcccatactatctgcttggatttggagagccaaaaaataaagctgattgtcatgtgattaaatatctgatcaacaggtatgaatataacttaaatcagcatatttttgccatggtaataaattgtcctataaactatttatatatttttgttcttcataattatcactaataagcatcagtttgttgtttttaaaaggatatttaagtgagcattttctagttcatatgaaaataaccatagtacaggatgatttctgtccacacaaaggttaaattagattgcacagttaattttcacttatatttatggtactattatgtgggtgatgcctttttcttttaagcccagtacatatattatgcctgcctaagttctgaactggggctgtatttcagtagttgtagaattattgatatttagttttgatagctaatgtttaattgtttggatctgcacagtttggtttttgcacaaaagtcatttaaaaaaatctgagtaattgtcaaatattaaaagaaagatattcttcctgtaaggaatacagtttttagtcaaagtggccattacatcctctttttaatttacataatacagatacttgagaaagttgttgtggtgttgtatgccaagaaaattctttttattggtgcctatattgtaacaattatttttaatgcattgtattttgaagtaacggttcagttaaatttttcacctgctgtgtaactgaaacacaattacagtttataatcatctgtagaagtctggagataattttgcaactcatgttatgggttaaatgaatattttttaaaagtaaaagcaacaaatttataaattgattatttgaaactttacaacacaattgcatcccaaatacaaattgtattgcttattcattatagctattcgtcctgtaatctgtttctaggtgaagcatactccagtgttttaggggttttgaaaataaatatttaaatttcacagtc

SEQ ID NO: 14920 - protein, 231 aa, Homo sapiens
MAPEVIQQSAYDSKADIWSLGITAIELAKGEPPNSDMHPMRVLFLIPKNNPPTLVGDFTKSFKEFIDACLNKDPSFRPTAKELLKHKFIVKNSKKTSYLTELIDRFKRWKAEGHSDDESDSEGSDSESTSRENNTHPEWSFTTVRKKPDPKKVQNGAEQDLVQTLSCLSMIITPAFAELKQQDENNASRNQAIEELEKSIAVAEAACPGITDKMVKKLIEKFQKCSADESP

SEQ ID NO: 14921 - DNA, 2628 bp, Homo sapiens
  CDS (56)..(1036)
agttctcctgagggaagaggagtgtagtaggggggacgcggcggcggcgttgacaatgagttttcttggaggcttttttggtccaatttgtgagatcgatattgttcttaatgatggggaaaccaggaaaatggcagaaatgaaaactgaagatggcaaagtagaaaaacactatctcttctatgacggagaatccgtttcaggaaaggtaaacctagcctttaagcaacctggaaagaggctagaacaccaaggaattagaattgaatttgtaggtcgaattgaacttttcaatgacaagagtaatactcatgaatttgtaaacctagtgaaagaactagccttacctggagaactgactcagagcagaagttatgactttgaatttatgcaagttgaaaagccatatgaatcttacatcggtgccaatgtccgcttgaggtattttcttaaagtgacaatagtgagaagactgacagatttggtaaaagagtatgatcttattgttcaccagcttgccacctatcctgatgttaacaactctattaagatggaagtgggcattgaagattgtctacatatagaatttgaatataataaatcaaagtatcatttaaaggatgtgattgttggaaaaatttacttcttattagtaagaataaaaatacaacatatggagttacagctgatcaaaaaagagatcacaggaattggacccagtaccacaacagaaacagaaacaatcgccaaatatgaaataatggatggtgcaccagtaaaaggtgaatcaattccaataaggctatttttagcaggatatgacccaactccaacaatgagagatgtgaacaaaaaattttcagtaaggtactttttgaatttagtgcttgttgatgaggaagaccggaggtacttcaaacagcaggagataattttatggagaaaagctcctgaaaaactgaggaaacagagaacaaactttcaccagcgatttgaatctccagaatcacaggcatctgccgaacagcctgaaatgtgaactgaacaggagaaaaaaagaaaagcaaaaaactcctgtaacccttgagattaagttcagcaggttaaagatggttgcagctggagggggcggaaaaaggccaaaactccatatatgttagtcttcctttatcttacagcgcagcatttattttatgatataatgaaatgttcgttcatgtatatacatttttaaaagtgctttctttgaaacactggaactttgttaagctgcctttttttttttaacttcctactttgatgataagcactcagatatatatcagcgtaaacatgaaaaattttcatgtgagtaggctggtatttgtaattttgctttctttctgcataatgttgattataaatcctctcttttcaggctaatgattacctcttattctctacatgcaaaaaattaaatattttgtgttcaaataaaattagaaaacttgagtggcctcttgtgtcctgcagagatttaaaacatggcatctcaatatttttgagaactacatttgtttttaacatatgtgtttgagaaaagcatatggagtgtttcaccgcaggcacttctgagtaccattccatggcttccagaattttatcctctttgaggtcttctgtgctatgaatattagatttctttccccaagggattatgtggcaggtcattatggccttcttttttttggccatattaagtaacagttttgctatattccagtagtaccgttgtgtgttttctgcaatgtggagttgacttagcttggcattttagatttgttaaaactattttttccataaatactttgaaacgtatttatatatttcaatttaaggaatctttttgccatgtgtatgcaaatattattttcttcatacattcattttcttttcaggggaaaattttgggatgggggactcaggaggacctgtgaagcatgtagttatctagatctgggtaatttcatgtttattaaactcgaactttggctagttaaactcatattgaaacttcatctagtctcttaattttttaacactaaattcaagtcatttgttttaagtctctaaaaaagaagattgcagtcatccattcatatgcatggggtctgatcgcaaatacactaaatgtggagtgtaggaaccaaaatgaaacctgctgtatggaaactactttcacttatggttcattggtttttgtaccaatattttttatgcacttcagtgcaagtcttgtcagttaaccttactttatgagtaagctaaataacccaaattacatttctttaaacctgttttactactatggcactttgataaaatggtcaggaaccaactttactggcaaaagggtccatgtaccaccatgtgctggagcatctgttctacatgtggatatctatgaatggtaatgttttccttcatgtaagtgcctattcagagtttcagaattttaaaatgccaaatattttcatggtcatttgcatgtagtaagccagaaaatattcaaagagattttgaaaaccaattgtatttaaccagcctcaaattgtgcaaccatgatgtataataaagaatttgaaacag

SEQ ID NO: 14922 - protein, 327 aa, Homo sapiens [sequence omitted]

SEQ ID NO: 14923 - DNA, 3090 bp, Homo sapiens
tcgctcaggatgtcactctctttgatgagattgtcggcaaaatctgccaagccggggtgtgggtatttcccgggagaagtgctcttggagtcctgcctgccctcagccgtggggcagccgctgctctgggtgccgctgctcaagctgccctcgtcagagtccagcaaggttcccttgccagtctcaccggtccactcgttgctggaggaattcttcaggacttttaaagacctggatgaagctacagtgagaaaaacacatttcgctgtgatacagaaacaggttacacaatgtgtaatgtttgcctcaaagcttgtgtaagatttaacattaagattttattttatgatatgacttcagttagcaactatcctggtaattaggcaaaaatgtagctactgaaaacatggacatttttgacttaggtttacagttgtaagttaggcaattcagcatttttagattaccagagctcaattatgtaaatagaactagacactagaaactactacatgggctaagattcttattttgccaaggagtaagttgaaaagttaattggtaataataaatctaggctcctttctttcactaaggtgctttgtaatttgatcatgaagatcacaccatattcctatgcatcttctcaccttgtggatttcccttgctgctcaattaaaagtagaaaatgcccctcccccccccctttttttttaaagacagtgtcttgctctgccacccaggctggagtgcagtggtgtgatctctgctcactgcaacctccgcctcctgggctcaagtgatcctcccatctcagcctcctgagtagttgggactataggtgcgcatgatcacgcctggctaatttttatattttttttgtagagatggggttttgccatgttgcccaggttggtctcaaactcctgttctcaagagctcaagggatccacctgccttggcctcccaaagtgctgggattacaggcatgagccaccatgcccagcctagaaaatgctctttatctctcatatgagaactgtctctgctggaatttcaaaacaactttctgaaattttatgttataggtgtgtgtgtgtgtgtgtgcgtagttctgttctcttggattgaaagaaggaagggagttctcagttttggtgtttctacaaagtaataacagcatgttattttgatggccagtttattttgacaatggagaaaatagtaaatatgtggtagatctgaagaggtcacactgatttgacatgaaaaagcgaagttttacattttctaagcctaaaaacaagaaagataataacaaaatagttaatgtagaaataaggttctgaaaacttaagctgaaattttagaaacaagcagaaagaacaacgtgatttgaaatgcttacttggtgccttatcgattaagaacgagtataagaggccccttaacttagatggcattacatcccaatcaacccattgttaagttgataatatggaaagtcgagaatgcatttaatgtacctactaaccactgcggcttagcctagcctgccttcagtgtgctcagaacacttacattagcctatggttgggcagaacacaaggcctgttttataattaagtgttgagtatctcatgaaatgtattgaatgctgcactagaagcaaaaaacagaatggttgtctgggtactcgaagtacgatttctactgaatgtgtgtcactttcacaccacggtaaagtcgaaaaattgtaggttgaaccatcagaaggtggagaccctctgtgtaaggttcttgatcttcattcagcattgaccttcaggatgcctggcactgttctgagcactgggaatacagcagtgaggaaaacaaagtccctggacccatgcacatcttagtggaagaaacaaaatcatacatttggactatgtcagcgggtaggaagacaagggactgggggttgggggtggctgtattttacagtagaatgtctgggagcaagaggcatgtttaggtttcttaaaaggagataaaggtacctcgatgacttacaaagtgaaaagtcacagctatgttacaagagcatatatccttttcagaagctcataatattttgttgaataaacacaaggctagcaaaattctcacctaatttggccgaaacaggaactcggttcttaagaggtaccaggcgatccttacacgttttctccagtggtaattcacactttatgtgacgcctgaagttttccctcagaatagaacgaatcaccttaacaatgttggttttgctttcactgtcactgggtcgggggggagagaaaacagcagaagtgtccacagtgttcatcgtgcttccattccacgcccgcctgtgttcctgtgccttgcacctgctggaccaggctgccagccagccacccaacagcagtgccatgtggcctcccgtacagaaggagattttcctccatctgaactgccttcaccctctctctggagcccctctctggggaagaggagattcagtggatcctattcttcaacctcctttgcagttttgccctttccttggaaggaacaggagctggggtacttgaggtaaaagaggcctgccccaaatgtggtcattttctcgaaaacataagcacttctgacaaaagttaaacagaagcccagcaggtcactgcatgactcagcctgctggcctcttctgtcaccagatacctgtcaccaaaacaaggttactctggaaggatctctgaacattttccagagtcaaagatttttttctttttatatcacctacagtactacctaaccttaaggaattttctgctatattctaaatttgtaaaaacataaatttgtggatctttgtttttctaacacattttagggtatcaaggcagaaaggaaaatgttgaaaactattgatagggaaaataaggaaacaatgaaaggcatttggcaaagaaaaagctatccaccagcatttagtttctcccagaagtctgctaaggaacatcaaaacaacctctcttgtcctcattttccttgtctataaaataaaaggcaccaaaaatt

SEQ ID NO: 14924 - DNA, 1036 bp, Homo sapiens
gatttcatgcattgcccttcagctgccatgttatgaggacacttggagaaagctacaggagaggaactgaggtctcctgccatcagccacttgagtgagcatgggagtggattctccaaactccagttaagacttgagatgtccacagtggcagccactagcttgactgcaacttacgagagaccctgagccagaggcactcagttaagtcatacacagtttcctgacccgtaaaacctgtgacacaatgaaggtttgttgttttgggggtaatccgttattcagcaatagataacgaatacagaaggcttgtaattgtataaccaacgtgagtttataagcggatatctgacctcatttgttttctcctgaaaaagttatagaaaaatcacaagactgcaagtcactctctctctttcttttgtggggaataaacaagtataattacaatttctaaacctattgttttattctcaaatataattacaatttaaacaggatattgtagagctccatcatagggattaacactaattagaattaaagaacgtttttgtgaatgtcagcttttttttttttaaataaacactcgtcccttgataatgtatttctttttcataaaattaaaaaaaaaatgtgggttgtagtaggtgtatatatttatgtggtacatgagatgttttgatacaggcatgacgtgtaataaccacatcatggaagatggcgtatccatcccctcaagcatttatcctttgtgttacaaacaatccagttacactctttttgttatttaaaaatgtacaattaaattattattggctatagtcaccctgttgtgctatcaaatattaggtcttattcattcatttaactatttttttgtacctatttatcatccccatccccggttccctcccaccacccaccccactacccttcccggcctctggtaaccatccttctactctctagctccatgagctccattgttttgatttttagctcccacaaataaatgagaacatgtaatgtttgc

SEQ ID NO: 14925 - DNA, 2224 bp, Homo sapiens
  CDS (215)..(1576)
attctccgggctgcggagggtaaagagcgggctcgggccgaggctggagggctgggtggggccagagcggcgcttcgggggcccgcggaggacgagggagggagagaatctgaggagctgggttgccattaggggactcctgaggtcctatctccaggctgcggtgactgcactttccctggagtggaagctgctggaaggcggaccggccgccatgtccacgttcaggcaggaggacgtggaggaccattatgagatgggggaggagctgggcagcggccagtttgcgatcgtgcggaagtgccggcagaagggcacgggcaaggagtacgcagccaagttcatcaagaagcgccgcctgtcatccagccggcgtggggtgagccgggaggagatcgagcgggaggtgaacatcctgcgggagatccggcaccccaacatcatcaccctgcacgacatcttcgagaacaagacggacgtggtcctcatcctggagctggtctctggcggggagctctttgacttcctggcggagaaggagtcgctgacggaggacgaggccacccagttcctcaagcagatcctggacggcgttcactacctgcactctaagcgcatcgcacactttgacctgaagccggaaaacatcatgctgctggacaagaacgtgcccaacccacgaatcaagctcatcgacttcggcatcgcgcacaagatcgaggcggggaacgagttcaagaacatcttcggcaccccggagtttgtggccccagagattgtgaactatgagccgctgggcctggaggcggacatgtggagcatcggtgtcatcacctatatcctcctgagcggtgcatccccgttcctgggcgagaccaagcaggagacgctcaccaacatctcagccgtgaactacgacttcgacgaggagtacttcagcaacaccggcgagctggccaaggacttcattcgccggctgctcgtcaaagatcccaagcggagaatgaccattgcccagagcctggaacattcctggattaaggcgatccggcggcggaacgtgcgtggtgaggacagcggccgcaagcccgagcggcggcgcctgaagaccacgcgtctgaaggagtacaccatcaagtcgcactccagcctgccgcccaacaacagctacgccgacttcgagcgcttctccaaggtgctggaggaggcggcggccgccgaggagggcctgcgcgagctgcagcgcagccggcggctctgccacgaggacgtggaggcgctggccgccatctacgaggagaaggaggcctggtaccgcgaggagagcgacagcctgggccaggacctgcggaggctacggcaggagctgctcaagaccgaggcgctcaagcggcaggcgcaggaggaggccaagggcgcgctgctggggaccagcggcctcaagcgccgcttcagccgcctggagaaccgctacgaggcgctggccaagcaagtagcctccgagatgcgcttcgtgcaggacctcgtgcgcgccctggagcaggagaagctgcagggcgtggagtgcgggctgcgctaggcgcagtggggtgggccaggccccaggacagccggagctcggcctggggtgggggcgcttcctgtggacgctgcgcctcccatcgcccgggtgcctgtccttgcccagcgccaccaggctggaggcggagtgggaggagctggagccaggcccgtaagttcgcaggcaggggtgggtgtgggacggggctgcttctctacacagcctccacgctggccttcaccttcacccctgcatcgtcggtgaccctgggaccctccaggcagcgtggcctgtggcaccgtgagggttgggacccaccgaggcgcagaggcggcccgaatgcagccctggttcaggcccggaggagggtttgcgggtagttgcacggacaattcggcggggtgctgcctgttgctgccattagcccaggaggaggtcgtgggacggggagggtgggatggacggcggacaggcagtccccacgctgctgggtggcgccgggcttggtggggtcttccactgtgtgcccttctcgccgaggccggtcccccgggtgtggggtgccctgctgcggactcctccgcgagccccatcgtcgcgcctgtggacgcctaggcaagagcggccctctgcagccaagagaaataaaatactggcttccag

SEQ ID NO: 14926 - protein, 454 aa, Homo sapiens [sequence omitted]

SEQ ID NO: 14927 - DNA, 2676 bp, Homo sapiens
  CDS (52)..(1923)
agtcgtggctgcagcgctgaggcgagaggttggtgggtgtctccggccataatgacccaggctgagaagggtgatacggagaacggaaaggagaagggcggcgagaaggagaaggagcagcgcggcgtgaagcggcccatcgtgcccgcgctggtgccggagtcgctgcaagagcaaatccagagcaacttcatcattgtcatacatccaggttcaacaactttaaggattggtcgagccacagacactcttcctgccagcattcctcacgtcattgcccgaagacacaaacaacaagggcagcccctatacaaggacagttggctcctaagggagggactaaataaaccagaaagtaatgaacaaagacaaaatggccttaaaatggtggatcaagcaatatggtctaaaaagatgtccaatggtacaagacgcattcctgtgtcccctgaacaggcacgctcctacaataagcagatgcgacctgcaattttagatcactgttcgggaaataagtggacaaacacatctcatcaccctgagtatttagtaggagaagaggccttgtatgttaatccactggactgttacaatattcactggcctatcagaagaggtcagttaaatattcacccaggccctgggggctctcttacagctgttctggcagatattgaagtaatatggtctcatgcgatacaaaaatacttggaaatcccactgaaagatttaaagtattatagatgtatcttgttaattcctgatatctataataagcagcatgtgaaagaactagtgaatatgatactaatgaagatgggtttttcagggattgtggtccatcaggagtctgtgtgtgccacctatggaagtggcttaagcagcacgtgtattgtagacgttggggaccagaagacaagtgtatgctgtgtggaggatggggtgtctcatcggaatactcggctttgtctggcatacggaggatctgatgtgtcaagatgtttttactggctaatgcagcgagctgggttcccttacagagaatgccagttaacaaataaaatggattgtcttcttctgcaacaccttaaagaaactttttgtcatttagatcaggacatctctgggcttcaggaccatgagtttcagattcgacatcctgattctcctgccctgctttaccagtttcgattaggagatgaaaaactgcaggctccaatggctttgttttaccccgcaacttttggaatcgttggacagaaaatgacgactttgcagcacagatctcagggcgatcctgaggatcctcacgatgaacattacctgctggccacacagagcaaacaagaacagtctgcaaaagctactgctgaccgaaagtctgcatccaaacctattggatttgaaggggatcttcgtggccagtcctctgatcttccagaaagactccattcccaggaggtagatttggggtctgcacagggagatggcctgatggccggcaacgattccgaggaggccctcactgcactgatgtccaggaagactgccatctcgctgtttgaaggaaaagccctgggcctggataaagccatcctccatagcatagactgctgttcatctgacgacaccaaaaagaagatgtacagctccatcctagtggtgggaggtggtttgatgtttcataaagctcaagaatttctgcagcacagaattctcaacaaaatgccaccatccttcaggcgaattattgaaaatgtggatgtgatcacaaggcctaaggacatggacccccggctgattgcatggaaaggaggggcagtgttggcttgtttgggtacaacacaggaactgtggatttatcagcgagagtggcagcgctttggtgtccgcatgttacgagagcgggctgcgtttgtgtggtgaatggggaggaaatgtcactgccgaagaccaaaaacaagcttcttggtataaaagactcttacagaatatgtgtattgtaatttattgatctggatgcttaagtgtcatggacagtaaatgaatttgaactttatgttgaggacatgacattggtttgaaaatataaactgcttttgagcagtttagtcagggcatttgagaataaataggaactttctcttcagttgtaaactctcttgccctctctcagggtctcataaactccccagtgatgtaaacgttgctattgaaggttctcatgtggtgaagcccttcatttaagttggcttgaatctcatcagcaggcagcctcatgcaaccatgagggatagtatgtgacgagggagaactgtccactcatgccattttctctcttgtctagtatttcattaggatctaaagttgtctgagttaaatgcacttatgtgactcatgtgtcctcttagaatcccaaatagggggaaaaagttttggtggtttttgtttttttttcattttctgttggattacagaaaaagaatgggacccattcaggtctcgatttccaaaggtaaagatggaaggctgggcagactggcttttgttacctgacatgccgtagggtgagcttagaggaagaaagaaaacaatttttatttggccaaaacagaacaaatgctgaaaaggaaatcttgtttttttcctaaagccaaatagaaatgatttgggtat

SEQ ID NO: 14928 - protein, 624 aa, Homo sapiens
MTQAEKGDTENGKEKGGEKEKEQRGVKRPIVPALVPESLQEQIQSNFIIVIHPGSTTLRIGRATDTLPASIPHVIARRHKQQGQPLYKDSWLLREGLNKPESNEQRQNGLKMVDQAIWSKKMSNGTRRIPVSPEQARSYNKQMRPAILDHCSGNKWTNTSHHPEYLVGEEALYVNPLDCYNIHWPIRRGQLNIHPGPGGSLTAVLADIEVIWSHAIQKYLEIPLKDLKYYRCILLIPDIYNKQHVKELVNMILMKMGFSGIVVHQESVCATYGSGLSSTCIVDVGDQKTSVCCVEDGVSHRNTRLCLAYGGSDVSRCFYWLMQRAGFPYRECQLTNKMDCLLLQHLKETFCHLDQDISGLQDHEFQIRHPDSPALLYQFRLGDEKLQAPMALFYPATFGIVGQKMTTLQHRSQGDPEDPHDEHYLLATQSKQEQSAKATADRKSASKPIGFEGDLRGQSSDLPERLHSQEVDLGSAQGDGLMAGNDSEEALTALMSRKTAISLFEGKALGLDKAILHSIDCCSSDDTKKKMYSSILVVGGGLMFHKAQEFLQHRILNKMPPSFRRIIENVDVITRPKDMDPRLIAWKGGAVLACLGTTQELWIYQREWQRFGVRMLRERAAFVW

SEQ ID NO: 14929 - DNA, 2562 bp, Homo sapiens
  CDS (78)..(803)
actcactggggcttccttccgtctcgctcggagtttccctctgcgttcgctccgcgctgctggaggctgtcgtcccaatgctccccaaacggcggcgagcgcgggtcgggtcccctagcggcgatgccgcttcctccacgccgccctcgacgcgcttcccgggagtcgccatctacctggtcgagcctcgcatgggtcgcagccgccgggccttcctcacaggcctggcgcgctccaaaggcttccgcgtccttgacgcctgcagctccgaagcgacacatgttgtgatggaagagacctcagcagaggaggccgtcagctggcaggagcgcaggatggcagctgctcccccgggttgcacccccccagctctgctggacataagctggttaacagagagcctgggagctgggcagcctgtacctgtggagtgccggcaccgcctggaggtggctgggccaaggaaggggcctctgagcccagcatggatgcctgcctatgcctgccagcgccctacgcccctcacacaccacaacactggcctctccgaggctctggagatactggccgaggcagcaggctttgaaggcagtgagggccgcctcctcaccttctgcagagcagcctcggtgctcaaggcccttcccagccctgtcacaaccctgagccagctgcaggggcttccccactttggagaacactcctctagggttgtccaggagctgctggagcatggagtgtgtgaggaggtggagagagttcggcgctcagagagctcttcacccagatcttcggggtcggtgtgaagactgctgaccggtggtaccgggaaggactgcgaaccttagatgacctccgagagcagccccagaaactaacccaacagcagaaagcggggctccagcaccaccaggacctgagcaccccagtcctgcggtccgatgtagatgccctgcagcaggtggtggaggaagctgtggggcaggccctgcctggggccaccgtcacgctgaccggcggcttccgcagggccatgacgtggacttcctcatcacccaccccaaggagggtcaggaggcggggctgctgcctagagtgatgtgccgcctgcaggaccagggcctcatcctgtaccaccagcaccagcacagctgctgtgagtcccctacccgcctggcccaacagagccacatggacgcttttgagagaagtttctgcattttccgcctaccacaacctccaggggctgctgtggggggatccacgaggccctgcccatcctggaaggccgtgagagtggacttggtagttgcacccgtcagccagttccctttcgccctgctcggttggactggctccaagcttttccagcgggagctgcgccgcttcagccggaaggagaagggcctgtggctgaacagccatgggctgtttgacccggagcagaagacatttttccaagcggcttcagaggaagacatcttcagacacctgggccttgagtaccttcctccagagcagagaaacgcctgagcctgcctgtgtccccaacttccactcaggaaattgggctgcccccaacctggccactgaatgtctccaggcagatatgctgccccctgacccccaccttcacccctccccgccaaggcctggctcttccggaggtcaattgtgcctgcaggatcagttgagcccctgctggtgtgctgcagggtgtgatgaggtgggagccctcagtgccagcctcatcactgtgtgaccctgggtctgctcttagcctccccatggctcacgttcctgccctggatgggatgtgagcggggcccacatcgtggagctgtggtggggcctgcagtcatgaatggcaagtggtccctgatgtgcagtgtcccattagttgcactgcagttaactgtggctcctgcagggcaccctgcccagaatgcccagaagagaaccatgcatacctgcactgcatttgagagccatgagctggaggctgtggttcgtgccagcaaggagcctactgtctggtgtgctgtaggcatctggagagggagagggcctgggtaggagctgggaggaagataattttcaactatggggcttcagtactgcagcgccccgagccaggctctgtgcttctgcctttaaggcctgttctcagcacaatgtctcaaaaataggtcatatcctgccactcccgtcgcagagccctttaatggttccaaaccctaagtccacacatagcccctggctctggcatctctccagccccactggccccgagctgcttgactcaccggcttcctatttgatgcacccaggcccccttgtggccaactccctccccttctcactgaggcagaagcactgaggtgggctggacatgggtgccctccacgtcccccatatccccaggcacactctggcctcaggttttgccctggccatgtcatctacctggagtgggccctccccttcttcaggccttgaatcaaaagccactttgttaggcgaggatttcccagaccactcatcacattaaaaaatattttg

SEQ ID NO: 14930 - protein, 242 aa, Homo sapiens
MLPKRRRARVGSPSGDAASSTPPSTRFPGVAIYLVEPRMGRSRRAFLTGLARSKGFRVLDACSSEATHVVMEETSAEEAVSWQERRMAAAPPGCTPPALLDISWLTESLGAGQPVPVECRHRLEVAGPRKGPLSPAWMPAYACQRPTPLTHHNTGLSEALEILAEAAGFEGSEGRLLTFCRAASVLKALPSPVTTLSQLQGLPHFGEHSSRVVQELLEHGVCEEVERVRRSESSSPRSSGSV

SEQ ID NO: 14931 - DNA, 2264 bp, Homo sapiens
  CDS (61)..(1515)
aaaagctagtgaggggcggggcaggcggcgcggtgggggcgggccgagcccggaggccagatgagcggacacagccccacgcgcggggccatgcaggtggccatgaacggtaaggcccgcaaagaggcggtgcagactgcggctaaggaactcctcaagttcgtgaaccggagtccctctcctttccatgctgtggctgaatgccgcaaccgccttctccaggctggcttcagtgaactcaaggagactgagaaatggaatattaagcccgagagcaagtacttcatgaccaggaactcctccaccatcatagcttttgctgtagggggccagtacgttcctggcaatggcttcagcctcatcggggcccacacggacagcccctgcctccgggtgaaacgtcggtctcgccgcagccaggtgggcttccagcaagtcggtgtggagacctatggtggtgggatctggagcacctggtttgaccgtgacctgactctggctggacgcgtcattgtcaagtgccctacctcaggtcggctggagcagcagctggtgcacgtggagcggcccattcttcgcatcccacacctggccatccatctgcagcgaaatatcaacgagaactttgggcccaacacagagatgcatctagtccccattcttgccacagccatccaggaggagctggagaaggggactcctgagccagggcctctcaatgctgtggatgagcggcaccattcggtcctcatgtccctgctctgtgcccatctggggctgagccccaaggacatagtggagatggagctctgccttgcagacacccagcctgcggtcttgggtggtgcctatgatgagttcatctttgctcctcggctggacaatctgcacagctgcttctgtgccctgcaggccttgatagattcctgtgcaggccctggctccctggccacagagcctcacgtgcgcatggtcacactctatgacaacgaagaggtggggtctgagagtgcacagggagcacagtcactgctgacagagctggtgctgcggcggatctcagcctcgtgccagcacccgacagccttcgaggaagccatacccaagtccttcatgatcagcgcagacatggcccatgctgtgcatcccaactacctggacaagcatgaggagaaccaccggcctttattccacaagggccccgtgatcaaggtgaacagcaagcaacgctatgcttcaaacgcggtgtcagaggccctgatccgagaggtggccaacaaagtcaaggtccccctgcaggatctcatggtccggaatgacaccccctgtggaaccaccattggacctatcttggcttctcggctggggctgcgggtgctggatttaggcagcccccaactggccatgcactctatctgggagatggcctgcaccacaggagtcctccagaccctcaccctcttcaagggcttctttgagctgttcccttctctaagccataatctcttagtggattgagccctcttggaaagacttctctgccatccctttgcacctgagaggggaagttctcagctgagctgaagctggattattaaagtggattgtcactcagactctccgtgctacgcttatttggagactagaggagtgggagttgagcctggcttgaacctttggaaccagaaaagttggggagcaggtggaggaggccacactcctgggagctgatggttttaaatctggttttaaatctcttctctgtctcaagtccatgtctgaagtgggtgaagggtggactggatcctcaagcagaaggtcacttctcccacccctagtcctccacctgggaaatggcctcaacggtcttccctctttccatccccagaatgggtgtcccgctctgccttcagagatcctgttctgcactgggccaccttcagagctgctctgggcagacaaagctgtttctcaccctcccaaaatcccttcccatcccctctcaggagctgcaaagagaagggcacagtctatatcttatcacccttcatcatccacttctcagcagtccctggtattacttgattgtgaacatattatcaggaaaaaagattatcattgaaaaaattggaaaagtcaaagtctggccgggtgcagcggctcacatctgtattcccagcattttgggaggccaaggcaggtggatcacttgaggtcagagttcaagaccagccttgccaacatggtgaaacccatctctactt

SEQ ID NO: 14932 - protein, 485 aa, Homo sapiens
MSGHSPTRGAMQVAMNGKARKEAVQTAAKELLKFVNRSPSPFHAVAECRNRLLQAGFSELKETEKWNIKPESKYFMTRNSSTIIAFAVGGQYVPGNGFSLIGAHTDSPCLRVKRRSRRSQVGFQQVGVETYGGGIWSTWFDRDLTLAGRVIVKCPTSGRLEQQLVHVERPILRIPHLAIHLQRNINENFGPNTEMHLVPILATAIQEELEKGTPEPGPLNAVDERHHSVLMSLLCAHLGLSPKDIVEMELCLADTQPAVLGGAYDEFIFAPRLDNLHSCFCALQALIDSCAGPGSLATEPHVRMVTLYDNEEVGSESAQGAQSLLTELVLRRISASCQHPTAFEEAIPKSFMISADMAHAVHPNYLDKHEENHRPLFHKGPVIKVNSKQRYASNAVSEALIREVANKVKVPLQDLMVRNDTPCGTTIGPILASRLGLRVLDLGSPQLAMHSIWEMACTTGVLQTLTLFKGFFELFPSLSHNLLVD

SEQ ID NO: 14933 - DNA, 2220 bp, Homo sapiens
  CDS (73)..(969)
gtaggtggcgcgcgggtccggcgggcggttggcttgagcgggaccggagctgaggcaggaagagccggcgccatggtggagaaggaggaggctggcggcggcattagcgaggaggaggcggcacagtatgaccggcagatccgcctgtggggactggaggcccagaaacggctgcgggcctctcgggtgcttcttgtcggcttgaaaggacttggggctgaaattgccaagaatctcatcttggcaggagtgaaaggactgaccatgctggatcacgaacaggtaactccagaagatcccggagctcagttcttgattcgtactgggtctgttggccgaaatagggctgaagcctctttggagcgagctcagaatctcaaccccatggtggatgtgaaggtggacactgaggatatagagaagaaaccagagtcatttttcactcaattcgatgctgtgtgtctgacttgctgctccagggatgtcatagttaaagttgaccagatctgtcacaaaaatagcatcaagttctttacaggagatgtttttggctaccatggatacacatttgccaatctaggagagcatgagtttgtagaggagaaaactaaagttgccaaagttagccaaggagtagaagatgggcccgacaccaagagagcaaaacttgattcttctgagacaacgatggtcaaaaagaaggtggtcttctgccctgttaaagaagccctggaggtggactggagcagtgagaaagcaaaggctgctctgaagcgcacgacctccgactactttctccttcaagaattgtttcctagaattgttgagagggtttatgcccagagacatcccagaagcactgaacgcactcatgccaagatgttaatacctttcctcactaaagagaaaccagggttccttggagaaatggctgtttccagatctggggtaggaaaattacagtgctcttaaagttccgtacagataaaggaagagatcccagttctgatacatatgaggaagattctgagttgttgctccagatacgaaatgatgtgcttgactcactgggtattagtcctgatctgcttcctgaggactttgtcaggtactgcttctccgagatggccccagtgtgtgcggtggttggagggattttggcacaggaaattgtgaaggccctgtctcagcgggaccctcctcacaacaacttcttcttcttcgatggcatgaaggggaatgggattgtggagtgccttggccccaagtgaactcaagatttggcagccccagagatgccaactgcagcatgcccacctgtattccctgtccccttccttcatgaaggcatctccaggcaaggaaaactgaagtcattggcccgatacaaaacatttcctgcaacgaaggaggtggtgccgacgtgctgcttcccatcaccagcagctgctcgacaaggggcgcagggtggctgtctttgttccagcactgttcaggctgcctgtcatcccgggcctgccagctcccctgagtgatgagcacttccaagcacccctctgccctttctctgtccttatgctgtcccggcctcgccagccctctggggcattgtgggagatgcctgccaggaatgagcaagctctgttgctcgggagcctcttgtcaccttcttggacttattccccacctgataccttatagagaaaagtgtgaattcaggtggagagtaggcccaggccccatgaggcaccagtggaagcacagctccaagttcagacaggtgcccttagagaggaaaaccatgacaggcaaatgcatttcctctggagtttgagaccctgacaaacaacaggtggcatctggtgtgctgttcttgagttttcgtttaggattagttgagttccagctgggttttgggagaaaggagatgctaccaagtcttggatgttagggcgagaccctgcaagttgagtattagagagcttgtctttcaaggcaggttcctggggcttcagggctaggagggaggagcctgcccttttaacagaaccccagtcacatgcggctcaagtcactcagaggctgttgcatttcagggctatgttggtcctttgtttacctcctaaaccacagctgtttgtgtttcacatatgttgtgaattttccttggttctttttaaaggaatgataataaagttacttgctttaggaaaaaaaaac

SEQ ID NO: 14934 - protein, 299 aa, Homo sapiens
MVEKEEAGGGISEEEAAQYDRQIRLWGLEAQKRLRASRVLLVGLKGLGAEIAKNLILAGVKGLTMLDHEQVTPEDPGAQFLIRTGSVGRNRAEASLERAQNLNPMVDVKVDTEDIEKKPESFFTQFDAVCLTCCSRDVIVKVDQICHKNSIKFFTGDVFGYHGYTFANLGEHEFVEEKTKVAKVSQGVEDGPDTKRAKLDSSETTMVKKKVVFCPVKEALEVDWSSEKAKAALKRTTSDYFLLQELFPRIVERVYAQRHPRSTERTHAKMLIPFLTKEKPGFLGEMAVSRSGVGKLQCS

SEQ ID NO: 14935 - DNA, 2641 bp, Homo sapiens
  CDS (169)..(606)
gtgctttcccaagcctggaagaactcgtcatgctctttgtagcgtggtgcttctgttgctcacagaggtgcctgcttccccttctgccatgattggaagtttcctgaggcctccccagccatgtggaactgacaacttgcctttgatgattttcaagagagttgtgctatgatgtggcaaaagtatgcaggaagcaggcggtcaatgcctctgggagcaaggatccttttccacggtgtgttctatgccgggggctttgccattgtgtattacctcattcaaaagtttcattccagggctttatattacaagttggcagtggagcagctgcagagccatcccgaggcacaggaagctctgggccctcctctcaacatccattatctcaagctcatcgacagggaaaacttcgtggacattgttgatgccaagttgaagattcctgtctctggatccaaatcagagggccttctctacgtccactcatccagaggtggcccctttcagaggtggcaccttgacgaggtctttttagagctcaaggatggtcagcagattcctgtgttcaagctcagtggggaaaacggtgatgaagtgaaaaaggagtagagacgacccagaagacccagcttgcttctagtccatccttccctcatctctaccatatggccactggggtggtggcccatctcagtgacagacactcctgcaacccagttttccagccaccagtgggatgatggcctccctattccctgagacacaacagtattgaaattgggccaattaataactccacagtggcctctcactaaatgtgagaggtgaggaagctgcaggagaaaatttgaagctagcagtgttcatgagatgtaagtaaagaagccatctccataaaagtacaacgtgacgcagcaagtgctgatggagaagctgtagaagttacacagaagatctagcttggaccatcgatgaaagtggctacactaaacaacagattttaaatgtagataaaacagcattttattggaaaaaagatgccatctaggactttcatagttagaaaaactcaatgcctggcttcaaaggacaagctgactcttgtcaggggctagtgcagctgtgactttcagttaaagccaatgctcattgactattctgaaaatcccagggcccttaagatatgctgtataaacgcaacaacaaagcctggatgacgttgggtctgtttacagcctggtctactgagtaagcccactgttgagacctagtgctcagaaaaaatagatttctttcaaaatatggctgggtgcagtggctcacaccggtaatcccagcactttgggaggctggggcgggtggattgcttgatgccaggagttcaagaccagcctgggcaacatggtgaaaccctgtctcaaaaaacaaaccaaaaaaccaaaatattgctactcattaacaatgcacctggttacccaagagctctgatggagatgtacaaggagatgaatactgtttcatgcctgctaacacagtatccattctgctgctgatagatcaagaagtacttttgactttcaaaacttgttatttaagaaatacattttgtggtttctctgatggttctgggcagtcagttcaaaaccttctggaaaggattcaccattctagatgccatcaagagcattcaattcacgggaggaggtcaaaatatcaacattaattggaatttggaagaaatagattccaatcctcatggaggacttggagggtttcaagacttcagaggaggaaggaactgtagatgggctgaaaatagcaagagaactagaagtggaggggcctagagatgtgaccgaattgctgtaacctcaggatcaaacttgtatggatgagaagttccttctcatggacgagcaaagaagtggtctggaactgaaagtgatgcgtatttctgagttatgcctgtatttaagaagctgagtgaaacccaaagaagtccatgataggacagacttctgaaaactaaagacagaaaaaagcttgaaagcatcaagaaagaagtgaaatcttaactagagggaaaagtaactcagatgacagtggatttctctctggaaaccatggaggccagaaggaagtgagacaagttcttttagtgccagaagaactatcaacttgtggctgggcacggtggctcacacctgtaatcccagcactttgggagaccaaggtggggagatcacttgaagtcaggagtttgagaccagcctggccaacatggcaaaaccctgtctctactaaaaatacaaaaattagccaggcatggtggcacatgcctgtaatctcagctacttgggaggctgaggcacgagaattacttgaacccgggaggtggaggttgcagtgagccaagatcctgccactgcactccagcctgggcaacagagcaagactgcctcaaaacaaaactctgtcaactccaaattcctatttggtgaaatgatccttcaggattgatggggtaataaaaacattctcggttgatagaaaactaaaagaatttgttgaatgagtctaccctatagaccttgaaaagaccaaccctaaaggaagttcttgaaccagaaaggaaacattt

SEQ ID NO: 14936 - protein, 146 aa, Homo sapiens
MMWQKYAGSRRSMPLGARILFHGVFYAGGFAIVYYLIQKFHSRALYYKLAVEQLQSHPEAQEALGPPLNIHYLKLIDRENFVDIVDAKLKIPVSGSKSEGLLYVHSSRGGPFQRWHLDEVFLELKDGQQIPVFKLSGENGDEVKKE

SEQ ID NO: 14937 - DNA, 2604 bp, Homo sapiens
ttcaaatgtgatgagtgcggaaaggccttcagtcagagtacgagcctctgcatccaccagagagtccacacaaaggagagaaaccatctcaaaatatcagttatataaaacgttttgctaagagtttaaaatcttaaaacccataagtgccactaggaaggaaaccctgtatatacctacattgacccaagaaatatttacgcaatccctagcagaacattgtttctgaggaggcatatgtgagattgatttgttggttcatgccaagtgtgttccacaggttgactttgaatgtggacctctgagcatccacgcaggatggctctcaggtcccagtcacagacgtcgcttcctgggattccagcacgatgcctccatagttgaaagactacacaaaaagccacaatcattgcccggcctcctgagtcaccttctatctatactttgcttaaaagctatcccagatactcccccttggggagctcatgcccttccttcctctttattcgagcatactggcaatgcattggaaaacagacagctcccactaagatcacgttctggtatttctgaggttaacacttgatttagcccctacatatctttccatatatcctattatttctgaatatatgtcctcaaaatccccataaatatccatcccttcctagatggcattaactttcattttagattttaggtgactcataattcccattcacttagcctatcagaaaagtcattggcagacatatatgtccttgaaccttttttatttgtgtggattctgctcatcactgtctctgttagacttattttgtagtggctgcatcacatatttttcacttgaatttttttggaaatagctgaatgtaaatagcagggaggaagaagcaagcaaagtgagagcttttcttcatccagaattgccctctgggctcctttggtaacagatggagctccttcctagctagggagaccttatgataagtggatggtaggaggagtcactaatgtttcaatctctatttctgtaatcttgggcaataatgcataggagttcttgataccccttcattgattactgtgtatcagttctttgttaggcatgaacgtctttattaatccatcattcttttcttcattcaacaaatatgtattgaacacctcctatatgccaggcactgtgctaggtgctgggaataccactgatgagacagacaaggtccctactcttgtggagtttacttctggtggaggagacagatgataagtaaacaaataaataatgtagtttgagatagtgattaagtgctatgaagaaaataaactagggtgatgattttagtggtggggtggggtgggggtggggtgacattagctagtggtcagggaggcctttccgcggtgggatgttgagctgaggccggaggagaagtagcagtcgctggcagagcacacaggctgctctgggggatgagctggtgcgtttaaggaacaggccagcactggcattcgcaagcagtggggaaggggagagatgccgaggtggtcagtatcctgactttcagaggcctttttttgtttgttttaatttttgctagattgatattaaaaactcatgtggaggaactcaaggaatgtttagaagaccaaaagtccccaatgacaggaacaaaagcaaccaatttttaactttctcttctcattcctgttttcattgatttcccacatgtagtccttttgctcaggaagtctttggggaaattaaggatctttgaagctctgaaataggtgatcaggttagtggtgtctgtcagctgtctaagaggttggaaaatgaactactcaagatagtcacgaaaatactgaaagtttgatttttctttccatatttgaattaattttttctgtttgactggaaggggtttttgtataactaaaacctcagcgcataaaggagatttaaaaggagcacatgatttagtgggtgggccatgaaactagagatgggatttgggggtgaatttgtcaatatctggattttaatccagacatctctgctaacaagcctttggtaagtcacttcagatacttttcctcctttttacaaagagagggctggcttagttatttgccaaagccccctccaggcctgaattccacaagtacgatttactgtagtgtcttatcactctttcatgtcacaatagcgtggagcattagagaaaagcctagacttttagttgatagccagttgaaatatcattgatagaattttagttttaggaaaaattggtttgatttctagctttattactattaggtatgtgagcttgggcaaatcgcttaatctttgagtctagttttctctcaaaatgagaacattaggctaaatgatttccgagtttccagctagtcctagagttctatatttctacatagttgaattattttatcatgctgttgctggggaatatgactaacccttttgaagctactaattttatgtcgagctttaaagtccataattgttatcttcagaaaatattatttgacctacagtatgtccaaatcaatttaataaaatcactttataacagg

SEQ ID NO: 14938 - DNA, 2991 bp, Homo sapiens
  CDS (191)..(1843)
tttacaaggatctaaaaggaacaggattaaagatgactgaatactgggttccagaaatttaaaacaatcagcttagcaaatcatatattcttctgtggagctgagaattgatgtccgctcttccccgtgatttggaactttccaatcccagagaaaagttgacaaagggactgcccaggactgagtccatatggaagaagaacttcctcttttctctggagacagtggcaagccagtacaggctactctgtcatctttgaagaagttagatgtgggaaagtggccaattttttccctttgttctgaagaagaactacagttaattcgtcaggcttgtgtctttggcagtgctggcaatgaagttttatacactacagtaaatgatgagatttttgtgcttggcacaaactgctgtggctgtttggggttaggtgacgtccagagcaccattgaacctcggagactggattctttaaatggcaaaaaaatagcctgcctcagctatgggagtggtccacatattgtccttgcaacaacagaaggagaagtctttacctggggtcataatgcttatagccagctgggcaatgggacaactaatcatggtttagtgccctgtcatatctctactaatctgtcaaacaaacaagtcattgaagttgcctgtgggtcttaccattctttggtgctaacatctgatggagaggtatttgcctggggttataataactctgggcaggtaggatctggatcaacagttaatcagccaatccctcgaagagtcactggctgcctacaaaataaagtagttgtgaccatagcatgtgggcagatgtgctgcatggcagtagtagacacgggggaggtctatgtctggggttacaacggaaacgggcagcttggactcggcaacagtggcaaccagccaaccccttgcagagtggcagctttgcaaggcatccgtgtccagagggtcgcctgtggctacgcacacacattagtattaacagatgaaggccaagtgtatgcttggggcgccaattcttatgggcagttgggcactggcaataaaagcaaccagtcctatcctactcctgtcactgtggaaaaggacaggattatcgagattgcagcctgtcactccacacacacgtctgcggccaagacgcagggtgggcacgtgtacatgtggggccagtgccggggtcagtccgtgatcctcccgcacctcacccacttctcctgcgctgacgacgtgtttgcctgctttgccacgcccgccgtcacgtggcgcctcctctccgtggaacctgatgaccacctcacagtggctgagtcactgaagagggaatttgacaacccggacactgcagacctgaagtttctagttgatggaaagtacatttatgcacataaagtccttctcaagattcgatgtgagcattttcgttcgtcattggaagataacgaggatgatattgtagaaatgagtgaattttcatatcctgtttaccgggccttcctggaatacctatacacagacagcatcagcctttctcctgaggaggcagtaggactgctagacttggctacattttatagagaaaatcgtttgaaaaagctctgccaacaaactatcaagcaaggcatctgcgaggagaatgccatcgctctgctctcggctgcggtgaagtatgatgcacaggatttagaagaattctgcttcaggttttgcataaaccatctgactgtagtaacacaaacatcaggttttgcagaaatggaccatgatctcctgaagaactttatcagcaaagcaagcagagttggagcctttaaaaattgatcccatctgcaggaaagtttttgagcctttccatttcccctgcaaaagccagagatgaatcacttctctttaattaatagtatgtatgatgagctatgtttggctgagtacttgtaactgtcagaagagggatggtggtgagtggtctttgtctgcctaaacccagagtttatgtagaaagcattgaatgttctgatcagatgtgactaaggtcaaggaaaaaaaattgaaatatcttatttgccatttcctctttttgagtcacttaaattggacacctttggtaccctggtctcagtatatgctattctggcccaaatgttccattattcagctggctgataccacatagatagcttgacaaggagtgctgtctgtccttaccacattttcagcactcagcacagtgccttgtgtataataggcactcaatttattataaatcttcagtatgtcctgagaacagctttagtcatggaatactgggagaaggaataactttcacaaaataaacttaaaacagcctgtaattattgaggttcatattcttctggtatatcattctgagaaattgtggctaatttagaacattgtttagaattgacaaaaggccctggcaattaaattgtcaaggcccaagggctaattttaattttctttttacttggagtcattcattaatttctcacatgggattatggagtatgaagtattatctttgaatgaaattcctgggctgatctgccttacataatcacataaggtcctttgcttttctttgtgttaagagggacttgcctctgtaaatgaaaatgacaatgtgcttttcttgtagttgactttcatgtcactcactataaaataggtctcttaacctggcaccagtataactataaagcactagctgagaaggaactgatacttacatttcatggacagcattaacaagaatgagataaatttgtactttttagatcaaaacaaattacctaattgcaaaagagaaactgaaatggaacatagtctcagattcttctaatgtgtatctcacaatgtcatgtaatgtaaagaaacccttttggaattagaattcttgttctgatgctgaactatttggtaataaagtgcttatttgcagataacag

SEQ ID NO: 14939 - protein, 551 aa, Homo sapiens [sequence omitted]

SEQ ID NO: 14940 - DNA, 1146 bp, Homo sapiens
  CDS (89)..(1090)
gtgcgtacgtgcgtcgtctctatggtggcggcggatttggagggaccctacgaaccaggagtcaggcgagccgatctggggctgcaggatgttccgctgggagcgctccattcccctgcgaggctcggccgccgccctgtgcaacaacctcagtgtgctgcagctgccggctcgcaacctcacgtattttggcgtggttcatggaccaagcgcccagcttctcagcgctgctcctgagggtgtgcccttggcccagcgccagctccacgctaaggagggtgctggagtgagtcccccacttatcactcaggtccactggtgtgtcctccccttccgagtgctgctggtactcacctcacatcgaggaatacagatgtacgagtccaatggctacaccatggtctactggcatgcactggactctggagatgcctccccagtacaggctgtgtttgcccggggaattgctgccagtggccacttcatctgtgtgggaacgtggtcaggccgggtgctggtgtttgacatcccagcaaagggtcccaacattgtactgagcgaggagctggctgggcaccagatgccaatcacagacattgccaccgagcctgcccagggacaggattgtgtggctgacatggtgacggcagatgactcaggcttgctgtgtgtctggcggtcagggccagaattcacattattgacccgcattccaggatttggagttccgtgcccctctgtgcagctgtggcaggggatcatagcagcaggctatgggaacggacaagtgcatctatatgaggccactacaggaaatctacatgtccagatcaatgcccatgcccgggccatctgcgccctggacctggcttctgaggtgggcaagctactctctgcaggtgaggacacctttgtgcatatctggaagctgagcagaaacccagagagtggctacattgaggtggaacactgtcatggtgagtgtgtcgccgacacccagctgtgtggtgctcgattttgtgattcctcaggcaactcctttgctgtgactggctatgaccttgcggagatccggagattcagcagtgtgtgagaagagcagccttcctttgtccctgtggtattcataaagtacccgctccaccc

SEQ ID NO: 14941 - protein, 334 aa, Homo sapiens
MFRWERSIPLRGSAAALCNNLSVLQLPARNLTYFGVVHGPSAQLLSAAPEGVPLAQRQLHAKEGAGVSPPLITQVHWCVLPFRVLLVLTSHRGIQMYESNGYTMVYWHALDSGDASPVQAVFARGIAASGHFICVGTWSGRVLVFDIPAKGPNIVLSEELAGHQMPITDIATEPAQGQDCVADMVTADDSGLLCVWRSGPEFTLLTRIPGFGVPCPSVQLWQGIIAAGYGNGQVHLYEATTGNLHVQINAHARAICALDLASEVGKLLSAGEDTFVHIWKLSRNPESGYIEVEHCHGECVADTQLCGARFCDSSGNSFAVTGYDLAEIRRFSSV

SEQ ID NO: 14942 - DNA, 2570 bp, Homo sapiens
  CDS (1027)..(2298)
tatcacagaagaaattcgtgtctatagcttttaaggacttgattacatcattttcaagcctgatagttttggaatcaccattagagcttaagacacacctgccttcatttcaaccacctgtcttcataccctgacgaagtgcaccttttaacactcctttgtccttggattacttaagagttcccagaaatacatttgccaccaacagagtagccaaatttataaggaaaaatgattcccaatggatatttgatgtttgaggatgaaaattttattgagtcttctgttgccaaattaaatgccctgaggaaaagtggccagttctgtgatgttcgacttcaggtctgtggccatgaaatgttagcacacagagcagtgctagcttgctgcagtccctatttatttgaaatctttaatagtgatagtgatcctcatggaatttctcacgttaaatttgatgatctcaatccagaagctgttgaagtcttgttgaattatgcctacactgctcagttgaaagcagataaggaattggtaaaagatgtttattctgcagcaaaaaagctgaagatggatcgagtaaagcaggtttgtggtgattatttactgtctagaatggatgttaccagctgcatctcttaccgaaattttgcaagttgtatgggagactcccgtttgttgaataaggttgatgcttatattcaggagcatttgttacaaatttctgaagaggaggagtttcttaagcttccaaggctaaagttggaggtaatgcttgaagataatgtttgcttgcccagcaatggcaaattatatacaaaggtaatcaactgggtgcagcgtagcatctgggagaatggagacagtctggaagagctgatggaagaggtttattaacaaaactaggatacccaagactgaagaaacaagaagaaacctcaagtgtattgacacgtaaagaagcagcagtcctgccccagttctcctaagaaaaatccgctgtgggcagagaacgatgatgatttaatggttcaaaccttgtactactcagctgatcacaagctgcttgatgggaacctactagatggacaggctgaggtgtttggcagtgatgatgaccacattcagtttgtgcagaaaaagccaccacgtgagaatggccataagcagataagtagcagttcaactggatgtctctcttctccaaatgctacagtacaaagccctaagcatgagtggaaaatcgttgcttcagaaaagacttcaaataacacttacttgtgcctggctgtgctggatggtatattctgtgtcatttttcttcatgggagaaacagcccacagagctcaccaacaagtactccaaaactaagtaagagtttaagctttgagatgcaacaagatgagctaatcgaaaagcccatgtctcctatgcagtacgcacgatctggtctgggaacagcagagatgaatggcaaactcatagctgcaggtggctataacagagaggaatgtcttcgaacagtcgaatgctataatccacatacagatcactggtcctttcttgctcccatgagaacaccaagagcccgacttcaaatggctgtactcatgggccagctctatgtggtaggtggatcaaatggccacccagatgacctgagttgtggagagatgtatgattcaaacatagatgactggattcctgttccagaattgagaactaaccgttgtaatgcaggagtgtgtgctctgaatggaaagttatacatcgttggtggctctgatccatatggtcaaaaaggactgaaaaattgtgatgtatttgatcctgtaacaaagttgtggacaagctgtgcccctcttaacattcggagacaccagtctgcagtctgtgagcttggtggttatttgtacataatcggaggtgcagaatcttggaattgtctgaacacagtagaacgatacaatcctgaaaataatacctggactttaattgcacccatgaatgtggctaggcgaggagctggagtggctgttcttaatggaaaactgtttgtatgtggtggctttgatggttctcatgccatcagttgtgtggaaatgtatgatccaactagaaatgaatggaagatgatgggaaatatgacttcaccaaggagcaatgctgggattgcaactgtagggaacaccatttatgcagtgggaggattcgatggcaatgaatttctgaatacggtggaagtctataaccttgagtcaaatgaatggagcccctatacaaagattttccagttttaacaaatttaagaccctctcaaactaacaggcttagtgatgtaattatggttagcagaggtacacttgtgaataaagagggtgggtgggtatagatgttgctaacagcaacacaaagcttttgcatattgcatactattaaacatgctgtacatactttttgggtttatttggaaaggaatgcaaagatgaaggtctgttttgtgtacttttaagactttggttattttactttttggaaaagaataaaccaagaattgattgggcacatc

SEQ ID NO: 14943 - protein, 424 aa, Homo sapiens
MVQTLYYSADHKLLDGNLLDGQAEVFGSDDDHIQFVQKKPPRENGHKQISSSSTGCLSSPNATVQSPKHEWKIVASEKTSNNTYLCLAVLDGIFCVIFLHGRNSPQSSPTSTPKLSKSLSFEMQQDELIEKPMSPMQYARSGLGTAEMNGKLIAAGGYNREECLRTVECYNPHTDHWSFLAPMRTPRARLQMAVLMGQLYVVGGSNGHPDDLSCGEMYDSNIDDWIPVPELRTNRCNAGVCALNGKLYIVGGSDPYGQKGLKNCDVFDPVTKLWTSCAPLNIRRHQSAVCELGGYLYIIGGAESWNCLNTVERYNPENNTWTLIAPMNVARRGAGVAVLNGKLFVCGGFDGSHAISCVEMYDPTRNEWKMMGNMTSPRSNAGIATVGNTIYAVGGFDGNEFLNTVEVYNLESNEWSPYTKIFQF

SEQ ID NO: 14944 - DNA, 3837 bp, Homo sapiens
  CDS (150)..(1394)
gtcgaatggtttgttggcagggtgtcctggtggattggtttctgtaagttcagattctcataaatcgtgtgagcgtcgccgacacctctgagataaaagggcccctttcgactagcctctgctgaaaggacctagaagaatcccttaggatgaagctgagtcttaccaaggtagttaatggctgtcgcctaggaaaaataaaaaacctgggcaaaacaggggaccacaccatggatattccaggctgccttctgtataccaagactggctccgccccacacctcacccatcacacgctgcataatatccacggggttcctgccatggctcagcttacgctgtcatccctagcagaacatcatgaagtcttgacagaatataaagaaggagttggaaagtttataggcatgccagaatcactcttgtactgctccctgcacgatccagtcagcccctgcccggctggttatgtaacaaacaagtctgtgtctgtgtggagtgttgcaggacgagtggaaatgactgtttccaagttcatggcaattcagaaggcccttcagccagactggttccagtgcctctccgatggagaagtatcttgtaaggaagcaacttccataaaaagggtcagaaagtctgttgaccgatcacttcttttcttggataactgtctgcggctgcaggaagagtcagaggttcttcagaagagtgtgatcattggagtgattgaaggtggagatgtgatggaagagaggctgaggtcagcacgagagacagccaagcggcctgtgggtggcttccttctggatggttttcaaggaaatccaacaaccctggaggctagactacgcttgctgtcatcagtcactgcagagctgccggaggacaagccaaggctcatatctggtgttagtcggccagatgaggtgctcgagtgtattgaaagaggagtggacttatttgagagttttttcccttatcaagtaacagagcggggatgtgccctgactttcagttttgattaccagccgaatcctgaagagacactactacaacaaaatggaacacaagaagaaataaaatgtatggatcaaataaagaaaattgaaacaactggttgcaaccaagaaataacatcatttgaaattaatctgaaggaaaaaaagtaccaggaggactttaacccgctggtgagaggatgttcctgttactgctgtaagaatcacactcgggcatacatccaccatctgctggtgaccaatgagctgctggccggagtcctgcttatgatgcacaactttgaacactactttgggtttttccattacatccgggaagcactaaaaagtgacaaactggcacagttgaaagagctcatccacaggcaagcatcttgagatcttgcaaatacaagtctcactcttcacactgagcctgtaccactgttgtaacatgggaagacgtgaagaagaaataatctgagctttaattatttatatttggatataaggtctgcttaaataaagaatctttgtaccaaactgcccacatgagggtgaagagatttcctcaaaagacttaaatgacctggattgatcagagagaattgaactgtgacctttaaaacttctagactaattcttttagttgatagagattcatttagtcaaagacaaaagctttaactgtgagggcacagccttgaagtgggagtgatgagattctgagggacccatgaattggattgaggcttgaggggaaatggtgtgagacgaatgggctctggacatatgcctgttgatttgagaagaaatctggctggtttgagggtttcctttagttcaccctcatactctcaggagactcttctggatacttttgtcttccaccctgccctggcagtgcagccaatcagaaatggctcttgtgacttaactgggcttggatatccctggaatgtggggcttgaacattgctcctgtgatgatcatctgtcccaggtcacactccttcatttgaccacatggcctatttgcaacttctttttagagccaatgtaattgcctgttaggagccagaagtttgcccagctgctttcttctggttgtacagatccattgtggtctgccttccaggctcattaatagtctaactacgtaataactgaagacctatctcttgtgaagattcattctcaatgtgttcacttggacagagccctgcctggcctaacgattagagggttagtctccatcctgctcagatatgactcctgggcaattcacttaacttctccatggctgcttcctgctgaataaatagggacaggcataatggataggaatgaatgaacttttaagatactgtctagctctaaaattggaagaacaaaaagttttagattagagtcatagccttaatagccctagttgtcatcctgggagacaggcaacagtagagatatttgagagcctaaagagaggtttggcctgtgggtttttaagtggttattgaattggtatcaggagatcctgaggctggtaggggaaggtaattctttctaagttacctctgtatttttcaagttttctataaggaatacacatacacccacatgcacacaccatagtttttatacaaacagcaataacaaaaccaaaaagatgcccctttttttgtagggataagaaatacatttgttttatacttctatgctatattttgctattcaaaatttagtgggcattacttaacattgtttctaattattttgtggctgctgtatgttttatgtgttgggagcccattgtattaggccgttcttggattgctataaagaaatacctgagactgggtaatttggttttttggttttttggggttttttttgagacggagccttgctctgtcgcccaggctggagtgcagtggcgcgatctcggctctatgcaacctccacctcctgggttcatgccattctcctgcctcagcctcccgagtagctgggactacaggcgcccgccaccatgcctggctaattttttatatttttagtagagatggggtttcaccgtatgagccaggatggtctcgatctcctgacctcatgatccacaagactgggtaatctgtaaagaaaagaggtttaattggctcatggctctgcaggctttacaggaagcatggtactggcgtctgcttggtttctggggaggcctccggaagcttatagtcatggcagaaggtgaagggggagcaggcacatcacatgacaaaagcaggaacaagactcagagcaagaagtcacttatcaccaaggggatggcccaggccattcatgagggatccacctttgtgctccaaacacctcccaccaggccccacctccagtattggggattacatttcaacttgaggtttgggcgggaacaaatagtcaaattatattacccatctacatggttttctttttcttagtatgggagtgtccatgaataaattcatgggcatcctcataactcttccatgaatggcaaggggtacttatggaaaacagttttccaaagatctgattgttttgaaatgtgttagattggacttgttcaaatgttcatatttttgttctatgctaaatgcatcgttaggggagtagtggtaaatattccagaatccatatgaaattcatgagtttatttatgtctaaaacactgaaaactgtgtccaatatcgttcagtttcctgggtctttttcttattagcacatttgagaaaaatattcctttcctttattgtagtaaatctattaaaggcaatagccaataaaacatttttaatttt

SEQ ID NO: 14945 - protein, 415 aa, Homo sapiens
MKLSLTKVVNGCRLGKIKNLGKTGDHTMDIPGCLLYTKTGSAPHLTHHTLHNIHGVPAMAQLTLSSLAEHHEVLTEYKEGVGKFIGMPESLLYCSLHDPVSPCPAGYVTNKSVSVWSVAGRVEMTVSKFMAIQKALQPDWFQCLSDGEVSCKEATSIKRVRKSVDRSLLFLDNCLRLQEESEVLQKSVIIGVIEGGDVMEERLRSARETAKRPVGGFLLDGFQGNPTTLEARLRLLSSVTAELPEDKPRLISGVSRPDEVLECIERGVDLFESFFPYQVTERGCALTFSFDYQPNPEETLLQQNGTQEEIKCMDQIKKIETTGCNQEITSFEINLKEKKYQEDFNPLVRGCSCYCCKNHTRAYIHHLLVTNELLAGVLLMMHNFEHYFGFFHYIREALKSDKLAQLKELIHRQAS

SEQ ID NO: 14946 - DNA, 2545 bp, Homo sapiens
  CDS (81)..(2105)
gaggcagcctttgtctggcgggaacacgcattggtagcgggagctgtcggtaggacctgggacaccgcggaagtcgggaaatggcctcagtggctttagaggatgtggctgtgaacttcacccgagaagagtgggctttgctgggtccttgtcagaagaatctctacaaagatgtgatgcaggaaaccatcaggaacctggattgtgtaggaatgaaatggaaagaccagaacattgaagatcaatatagatatcccaggaaaaatctaagatgtcgtatgttagagagatttgttgaaagtaaagatggaactcaatgtggagaaacatctagccagattcaagatagtattgtgaccaagaacactcttcctggagtaggtccttgtgaaagcagtatgagaggagaaatcgtcatgggtcattcatcccttaattgttgcatcagagttggtgctgggcacaaaccacatgagtatcatgaatgtggagagaagccagatacgcataaacaacgtgggaaagccttcagttaccacaactcatttcaaacacatgagaggcttcacactggaaagaaaccatatgattgtaaagaatgtgggaagtccttcagttctttgggaaaccttcaaagacacatggcagtgcagcgtggagatggaccttataaatgtaagttgtgtgggaaagcgtttttttggcccagtctattacatatgcatgaaagaacgcacactggagagaaaccatatgaatgtaagcagtgttctaaagccttttctttttacagttcctatctaagacatgaaagaacacatactggggagaaaccgtatgaatgtaaacagtgttctaaagcctttcctttttacagttcctatctaagacatgaaagaacacatactggggagaaaccatataaatgtaagcagtgttctaaagccttccctgattccagttcttgtctaatacatgaaagaactcacactggagagaaaccctatacatgtaaacaatgtgggaaagccttcagtgtttccggttcccttcaaagacatgaaaccactcacagtgcagagaaaccctatgcatgtcagcaatgtgggaaagcgtttcatcatctgggaagctttcaaagacacatgataaggcacactggaaatggacctcataaatgtaagatatgtgggaaaggctttgattgtcctagttcactgcaaagtcatgaaagaactcacactggagagaaaccctatgaatgcaagcattgtgggaaagcattatctcatcgctcaagctttcgaagtcatatgataatgcacactggagatggacctcataaatgcaaggtatgtgggaaagcctttgtttatcccagtgtatttcaaagacatgaaaggactcacactgcagagaaaccctataaatgtaaacaatgtggcaaagcctaccgtatttccagttcccttcgaaggcatgaaacaactcatactggagagaaaccctataaatgcaaacgtaggaaagcctttattgatttctgttcctttcaaaatcacaaaacaactcacactggagagaagccatatgagtgtaaggaatgtgggaaagcattcagtcgtttcagatacctttctcgacataaaaggactcacacaggagagaaaccttatgagtgtaaaacatgtaggaaagccttcggtcattatgataacttaaaggtacatgaaagaattcactctggagagaagccgtatgaatgtaaggaatgtgggaaagcattctcttggctcacttgctttctacgacatgaaagaattcacatgagagagaaatcctatgaatgtcaacaatgtggtaaagccttcactcattcccgttttcttcaaggacatgaaaaaactcatactggagagaacccgtatgaatgtaaggaatgtgggaaagcatttgcttctctcagttccttgcatagacataaaaagactcactggaaaaaaactcacactggagagaacccatatgaatgtaaggaatgtggaaaagcatttgcttctctcagttccttgcatagacataaaaagactcacttgcattctctctaaatgtatggaatgtgggaaagcatttattaattttatttcatttcagatacttgtacgaaacacattggagatagaccctgtgaatgtaagcacttggtaaagccttaagtagtttcagtttctttccagtacagtcatcgcttgatacctgctgggtattggttccagcactctgtgagccatgtcaagtcccttttataaaatgacatatttgtatgtaacttacccacatcctcttgtatagtctcaattatgtctagattacttaaaatacctcatgcattataaaagctatgcaaatagttgttctattgtattgtttagggaatcatgataaggaaaagagtctatgtattttcagtatagatgcagtaattgtgagcctatcaacatagtgtagtcagccagaacattaaagtttctttgtttcaactctc

SEQ ID NO: 14947 - protein, 675 aa, Homo sapiens
MASVALEDVAVNFTREEWALLGPCQKNLYKDVMQETIRNLDCVGMKWKDQNIEDQYRYPRKNLRCRMLERFVESKDGTQCGETSSQIQDSIVTKNTLPGVGPCESSMRGEIVMGHSSLNCCIRVGAGHKPHEYHECGEKPDTHKQRGKAFSYHNSFQTHERLHTGKKPYDCKECGKSFSSLGNLQRHMAVQRGDGPYKCKLCGKAFFWPSLLHMHERTHTGEKPYECKQCSKAFSFYSSYLRHERTHTGEKPYECKQCSKAFPFYSSYLRHERTHTGEKPYKCKQCSKAFPDSSSCLIHERTHTGEKPYTCKQCGKAFSVSGSLQRHETTHSAEKPYACQQCGKAFHHLGSFQRHMIRHTGNGPHKCKICGKGFDCPSSLQSHERTHTGEKPYECKHCGKALSHRSSFRSHMIMHTGDGPHKCKVCGKAFVYPSVFQRHERTHTAEKPYKCKQCGKAYRISSSLRRHETTHTGEKPYKCKRRKAFIDFCSFQNHKTTHTGEKPYECKECGKAFSRFRYLSRHKRTHTGEKPYECKTCRKAFGHYDNLKVHERIHSGEKPYECKECGKAFSWLTCFLRHERIHMREKSYECQQCGKAFTHSRFLQGHEKTHTGENPYECKECGKAFASLSSLHRHKKTHWKKTHTGENPYECKECGKAFASLSSLHRHKKTHLHSL

SEQ ID NO: 14948 - DNA, 2095 bp, Homo sapiens
  CDS (168)..(1781)
aaaaaacgaatacaaagagccatacgaccttcggaccctacagcttggggcctgggctcctctgaccatcctcattgagaaaggaaagtgagtccagagaagttgatgcttcctacctgttggagcggcccagcagtgtaagcgtggttgttactgccccatccgccatgtccttcagtgccaccattctcttctcccctcccagtggcagcgaggccagatgctgctgctgcgcctgtaagagtgagactaatggaggcaacacaggctcccagggtgggaatcctcctcccagcacccccatcacagtgactggacatggcttggctgttcagagctcagagcagctcctgcatgttatctaccagcgggtcgataaggcagtgggtttggctgaagctgctctgggtcttgccagggccaacaatgagttgttaaaacgtctccaggaggaagtgggtgacctgaggcaagggaaagtgtccatccctgatgaagatggggaaagccgggcacatagttccccacctgaggagcctgggcctctcaaggaaagtcccggggaagcctttaaggctctgtctgccgtggaagaggagtgtgacagcgtgggcagcggcgtgcaggtggtgattgaggagctgcggcagctgggagcagcctcagtggggcctgggcctttgggcttcccagcaactcagagggacatgcggctcccagggtgcacgctggctgccagcgaggcggcccccctgctcaatcctctggtggatgattacgtggcctctgagggtgcagtacagcgagttctggtccctgcttatgccaagcaactctcaccagccacacaactggcaatccagcgggcaaccccagagacaggaccagaaaatggaaccaagctgccaccaccccgccctgaggacatgctcaatgccgctgctgcgctggacagtgccttggaagagtcaggccctgggagcactggggagctgagacactctctagggctgaccgtttccccatgcaggaccagaggaagtgggcagaagaactccaggcgcaagcgggatcttgtactctctaaactggtccacaatgtgcataaccacatcaccaatgacaagagattcaatgggtctgaaagcatcaagtcctcttggaatatttcagtagtgaagtttcttctggaaaagctcaagcaagagctggtgaccagtccccacaattacactgataaggagctaaaaggagcctgtgtggcctacttccttactaagaggcgtgagtaccgcaactccctgaacccctttaaaggcctgaaggaaaaagaggagaagaaacttcgaagtcgccgatatcggctttttgccaaccgatccagtatcatgaggcattttggacctgaggaccaacgtctgtggaatgatgtgacagaggaactgatgtcagatgaagaggacagtcttaacgagccaggtgtgtgggtggcccgccctccccgtttccgggcccagcgcctcacagagctctgctaccacctggatgctaactctaagcatggcaccaaagccaaccgtgtgtatgggcctccctcagacagactgccttctgctgaagcccagctccttccaccagaactttacaatcctaatttccaagaagaggaagatgagggaggggatgagaatgcacctggctccccatcttttgaccaaccccacaaaacctgctgtcctgacttgaactcattcattgaaatcaaggtggaaaaggatgaataaaatctacagccaagaataactctggcttccgccatgccccatgtctcagaaataggtggccatggggcttcacaaaataatgagatgctctgtgcagtctgagaaagcaaatttgcctcttttcttaacacagtctctactggggaagcagaacactggtgggataaaaacttatctagaaggggagaaactccctccactgtgaacagtaagccagaatatgcttattcctcagcataaacagtatctcggagaagcctgggatgagaaaatgaggaggatgggtccaagaaacatgaggccttcttgac

SEQ ID NO: 14949 - protein, 538 aa, Homo sapiens
MSFSATILFSPPSGSEARCCCCACKSETNGGNTGSQGGNPPPSTPITVTGHGLAVQSSEQLLHVIYQRVDKAVGLAEAALGLARANNELLKRLQEEVGDLRQGKVSIPDEDGESRAHSSPPEEPGPLKESPGEAFKALSAVEEECDSVGSGVQVVIEELRQLGAASVGPGPLGFPATQRDMRLPGCTLAASEAAPLLNPLVDDYVASEGAVQRVLVPAYAKQLSPATQLAIQRATPETGPENGTKLPPPRPEDMLNAAAALDSALEESGPGSTGELRHSLGLTVSPCRTRGSGQKNSRRKRDLVLSKLVHNVHNHITNDKRFNGSESIKSSWNISVVKFLLEKLKQELVTSPHNYTDKELKGACVAYFLTKRREYRNSLNPFKGLKEKEEKKLRSRRYRLFANRSSIMRHFGPEDQRLWNDVTEELMSDEEDSLNEPGVWVARPPRFRAQRLTELCYHLDANSKHGTKANRVYGPPSDRLPSAEAQLLPPELYNPNFQEEEDEGGDENAPGSPSFDQPHKTCCPDLNSFIEIKVEKDE

SEQ ID NO: 14950 - DNA, 2194 bp, Homo sapiens
  CDS (87)..(896)
attgggcggcgtgatctcgccgcggttccgcggccctgccgccgccgccgccagcagagcgcaccgggccgatcgggcgagtggccatggcgggcgccgaggactggccgggccagcagctggagctggacgaggacgaggcgtcttgttgccgctggggcgcgcagcacgccggggcccgcgagctggctgcgctctactcgccaggcaagcgcctccaggagtggtgctctgtgatcctgtgcttcagcctcatcgcccacaacctggtccatctcctgctgctggcccgctgggaggacacacccctcgtcatactcggtgttgttgcaggggctctcattgctgacttcttgtctggcctggtacactggggtgctgacacatggggctctgtggagctgcccattgtggggaaggctttcatccgacccttccgggagcaccacattgacccgacagctatcacacggcacgacttcatcgagaccaacggggacaactgcctggtgacactgctgccgctgctaaacatggcctacaagttccgcacccacagccctgaagccctggagcagctatacccctgggagtgcttcgtcttctgcctgatcatcttcggcaccttcaccaaccagatccacaagtggtcgcacacgtactttgggctgccacgctgggtcaccctcctgcaggactggcatgtcatcctgccacgtaaacaccatcgcatccaccacgtctcaccccacgagacctacttctgcatcaccacaggctggctcaactaccctctggagaagataggcttctggcgacgcctggaggacctcatccagggcctgacgggcgagaagcctcgggcagatgacatgaaatgggcccagaagatcaaataacttctccgagcctgctacctggttgccaaccttccctagcccccaaaccgaagccatctgccaaattccagcctctttgagctggcccctccagatggagaggacatctcctgggctgggcccaggtaccccagcccacccctcatgacacagaatacttgagccactgatttttcatttcttttttttttttttcctcggcccctcctcagccacctgagttgctctatctgcaagcctgactctgccagcctcccctggtagagaggaggtttacccactccctgcacgcctgccgtccctgccccgctgggcagcccttcagtgtggctggcgttggggccagtgagttgcctctttccctccttgtctggccccagtggtctggggagcccccaggcacacctaagcgtcgtggagcattgttctgccacagccctgcatactgaccccgggaggctgggcaggtggacagccccagccaccaccttcagcctagcctgtcccccaaggatggtgaagctcagcaggggtctgagggtagccggccagaagaggctggaacctcctgctcaagtctagacccctacttctctgctgcccccaccctgccagagctgatgtttccaataccaagatgtcttcacagggcacagcccctgcagagcatcttggtcatttggaagaggacacggtatcccctctggccagagtatgtcagagaaggaagagtagggcttttttgttttgtttttttttaaaggtgcttgcttgtttaatgtaaataatagaaagccttaatatcttttctgtaacacggagtaatattttaatgtcatgttttggatgtacataatatatttataacaaagcagcaagagtctacttaaccttggctgcctcgtggtgtttcctggctgggtggggtggggggtatcaaggagcctgggacgtgaggccccactctcgccccattcccagctccccccaaccctggcctcaggatgagagctgtcacctgagacagtgaattaatgttgacatctgctccaaagccttttggaggggattgggtgaggacagtggtctttcctgttgatcatgatgataaagtaatgatggctgatccctatttgtgacttccttcagcaaatattcactggcacctggtgtgtgccaggctctgtcctgtacacaggtacagcggtgaaagaaccaacaaagacctatcctggtggagctgacctcctgggaaaagagtcaataaacaaataaatgcacatggaaattcaaag

SEQ ID NO: 14951 - protein, 270 aa, Homo sapiens
MAGAEDWPGQQLELDEDEASCCRWGAQHAGARELAALYSPGKRLQEWCSVILCFSLIAHNLVHLLLLARWEDTPLVILGVVAGALIADFLSGLVHWGADTWGSVELPIVGKAFIRPFREHHIDPTAITRHDFIETNGDNCLVTLLPLLNMAYKFRTHSPEALEQLYPWECFVFCLIIFGTFTNQIHKWSHTYFGLPRWVTLLQDWHVILPRKHHRIHHVSPHETYFCITTGWLNYPLEKIGFWRRLEDLIQGLTGEKPRADDMKWAQKIK

SEQ ID NO: 14952 - DNA, 1385 bp, Homo sapiens
  CDS (165)..(1157)
gttggccgcgggagaaggggagaccgcggcggcccccagtgagagcggctttccaggacggtgcgatgtgctgcgcagcgaagaggcaggaggccggcttcctggggtagcggtacaggcgggcgcttactctgtgcgcttgcttccccaaccctgcaccggccatgcgcccggccttggcggtgggcctggtgttcgcaggctgctgcagtaacgtgatcttcctagagctcctggcccggaagcatccaggatgtgggaacattgtgacatttgcacaatttttatttattgctgtggaaggcttcctctttgaagctgatttgggaaggaagccaccagctatcccaataaggtactatgccataatggtgaccatgttcttcaccgtgagcgtggtgaacaactatgccctgaatctcaacattgccatgcccctgcatatgatatttagatccggttctctaattgccaacatgattctaggaattatcattttgaagaaaagatacagtatattcaaatatacctccattgccctggtgtctgtggggatatttatttgcacttttatgtcagcaaagcaggtgacttcccagtccagcttgagtgagaatgatggattccaggcatttgtgtggtggttactaggtattggggcattgacttttgctcttctgatgtcagcaaggatggggatattccaagagactctctacaaacgatttgggaaacactccaaggaggctttgttttataatcacgcccttccacttccgggtttcgtcttcttggcttctgatatttatgaccatgcagttctattcaataagtctgagttatatgaaattcccgtcatcggagtgaccctgcccatcatgtggttctacctcctcatgaacatcatcactcagtacgtgtgcatccggggtgtgtttatcctcaccacagaatgcgcctccctcaccgtcacgctcgtcgtgaccctacgcaaatttgtgagcctcatcttttccatcttgtacttccagaaccccttcaccctgtggcactggctgggcaccttgtttgtcttcattgggaccttaatgtacacagaggtgtggaacaacctagggaccacaaaaagtgagcctcagaaggacagcaagaagaactgaggcctgtctggagtacgtagaccagtgtcgtcgtgagggtgggaccctgtgaaggtctgaccaccgtttcgcttttgttaatgccgagctacccgcagtgctgagccagccgtgcaaaaggaaatcttcaggaggggacttctcacgttgctcagactgacacatgtagactaaatagaaacccctcagccctaaaatagaaaaaagaacagttctggactattg

SEQ ID NO: 14953 - protein, 331 aa, Homo sapiens
MRPALAVGLVFAGCCSNVIFLELLARKHPGCGNIVTFAQFLFIAVEGFLFEADLGRKPPAIPIRYYAIMVTMFFTVSVVNNYALNLNIAMPLHMIFRSGSLIANMILGIIILKKRYSIFKYTSIALVSVGIFICTFMSAKQVTSQSSLSENDGFQAFVWWLLGIGALTFALLMSARMGIFQETLYKRFGKHSKEALFYNHALPLPGFVFLASDIYDHAVLFNKSELYEIPVIGVTLPIMWFYLLMNIITQYVCIRGVFILTTECASLTVTLVVTLRKFVSLIFSILYFQNPFTLWHWLGTLFVFIGTLMYTEVWNNLGTTKSEPQKDSKKN

SEQ ID NO: 14954 - DNA, 2461 bp, Homo sapiens
  CDS (222)..(914)
ccatattgccaaaggagaagcttggggagcgggaagtctacttggcaatcctggctgggatacactccaagtcactggtgcctgtgtatgtgaaggtgaggcctcaggctgagggcacccccgggagcaccggcaagcgagtgtccacctgccccttttgctttggcccctttgtgacaactgaggcctatgagctgcatttgaaggagaggcaccacatcatgcccacagtccacacggtcctgaagtctcccgccttcaagtgcatccactgctgtggggtctacacgggaaatatgaccctggctgccatcgccgtccatttggtgcgctgcagaagtgctcccaaggacagcagctcagacctgcaggcccagccgggttttattcacaacagtgaactgcttttagtcagtggtgaagtgatgcatgattccagtttttctgttaagagaaagctgcctgatggccacttaggggccgaagaccagcggcatggggaggagcagcctcccatcctaaatgccgatgcagccccgggtccagaaaaggtgacgagtgttgtgccttttaaaagacaaaggaatgaaagcagaacagagggacctattgtcaaggacgaggctcttcagattttagcattagatcctaaaaaatatgaaggccgttcttatgaagaaaagaagcaatttcttaaagattatttccataagaaaccatatcctagtaaaaaggaaatagaactgttgtcctcactcttttgggtgtggaaaattgatgtggcttcattttttggaaaaagaaggtatatttgcatgaaagcaataaaaaatcacaagccttctgtacttttaggctttgatatgtctgaacttaaaaatgtgaaacatagattgaactttgaatatgaaccataaaacttgcaaaaaaaaaaaaaaagtaactctaaagtagtaggtagatttttttcagttgaaatttcacagtgttgtcctcactgtgttggtgaatcaacctcagtggtcactgtgctgctctgcagagttacttcaggtgctggagagacccctgttaccaggaagccagtagttatttcacatctattgtttcctgcagtttgatttgtaacagaacagttgttttcaggtttttttctctgtcatgtaaatgaaatcttttgatatttcatgcacgccttgttttcccactagtgtcagtatcgtatgataagaaactgaaatctataaataatttgctttttcattaaggacatttcagcctttttcagaatacttgatttaactgcgagtggaagcatcgatctccttcagctttccctgtagcagcagatggtacagtgagtgttcagagacgtgggtacaaaccctgtgatgtatgtataaggctccctgaggatgcactgcattaacttacgctgacttctttgtaagatctttgcttatagattataatttagatctgtatttttttaggtttatcctaatagctgtttttttttttttaaccataactcatagaaaatcaaatgtttttatttgttaaaagtagactgaatttgacatctggtatgctggtatgtagctcatacatcaagagttattttacaaataaatttattctgtagatgcagaaatatttttcagtgtagattttcccttttgatatgctaagtcatttctccgttcagaggtaaaacaataaatttttagtgcctttagaataaacattgaaagaatacaccccaaaactcttctcctaacttaactactcataaactagtgaaagggaaggtctatgatactcaggaataagattattgcccctgagtgtgaaaactaacttaaatttcagcatagggtttcaggggacatggcgaagtttacagactgagatctcagtctccatggttggtacagtaagtctttgaccacattttctgaaggtcatgtttagtggagaaacgggcttttctctagctggtttaggctggaagctgtgtccgggtcgatgggatggcatattgttaaagaatctccattgtcgtcactgtcctgtggatgttaaacctcgtttttttccccacacgatattaaaacttaaagcaccagaaccagtcatggagaccagccagtttagatggtaagtcatatttctggtggtacacagcagaggaaccccttcactctatctttaggtagaaatatttggaggatgtgacagcctctgagaaacataatgttactatgtggattttaaaaaatataatacttgcatgtaattgctataatgttcatatttgaggcagttgtgaaactggtttatgattgttggtgtactctgttgtaaattcaaagagagcttgttgaacatttttttttttttacctattgttttcagagtgtctattttgaattaaaatttgttacaccgctaaaaaaac

SEQ ID NO: 14955 - protein, 231 aa, Homo sapiens [sequence omitted]

SEQ ID NO: 14956 - DNA, 2525 bp, Homo sapiens
  CDS (25)..(1902)
agccggccgctaagaagccgaaagatgtccaggtcgggcgcggcggctgagaaggcggactccagacagcgaccccagatgaaggtaaatgaatataaagaaaatcaaaacatcgcttatgtgtctctgagaccagcacagactacagttttaataaaaacagctaaggtctatcttgcccccttttcactcagtaattaccagctagaccagcttatgtgccccaaatccctatcagaaaagaattctaacaatgaagtggcgtgtaagaagactaaaataaagaaaacttgcagaaggattatacctccaaagatgaaaaacacatcttccaaggcagaatccacgctgcaaaattcatcctcagctgttcatactgaaagtaacaagctacaacccaagagaacggcagatgcgatgaatctcagtgttgatgtggaaagtagtcaggatggagacagtgatgaagataccacaccagccctggatttttcgggattgtcaccctacgaaaggaagagactgaagaacatatcagaaaacgcagacttttttgcttctcttcagttgtctgagtctgctgcaagactccgtgaaatgatagagaagagacagcctcctaaatccaaaagaaagaagcctaagagagaaaatgggattggatgtagaaggtcaatgcgattactaaaagttgatccttcgggagtttcattaccagcagctccaacaccgccgacattagtagcagatgaaactcctttgttacctcctgggcctttagaaatgacttctgaaaatcaagaagacaacaatgaacgatttaaaggatttctgcacacatgggcaggaatgagcaagccaagtagtaagaacactgagaagggattatctagcattaaaagctacaaagccaatttaaatggcatggtcattagtgaagataccgtttacaaagttaccacaggcccaatattctctatggctctccatccatcagaaactagaactttggtagcagttggggccaaatttgggcaagttggactttgtgatttgacccagcaacctaaagaagatggagtttatgtttttcacccccatagtcagccagttagctgtctttacttctcacccgccaatccggcccacatactgtcactgagctatgatggcacgttacgctgtggggatttttccagggctatttttgaagaggtgtatagaaatgaaagaagtagcttttcctccttcgacttcttggcagaagatgcctccactttaatagtaggacactgggatggaaatatgtcactggtggatagacggacacctggaacttcttatgagaaacttaccagttcttctatgggaaaaataagaactgttcatgtccacccagtgcatagacagtattttatcactgccggattgagggatactcatatttatgatgcaaggcgattgaattccaggagaagtcagcctttgatttctttgactgaacatacaaagagcattgcttccgcctatttttcacctcttactggtaacagagtggtgaccacatgtgctgattgtaatctgagaatttttgacagcagctgtatatcttctaagattccgctcctcaccaccatcaggcacaacactttcactgggcgatggctgaccaggttccaagccatgtgggatcctaaacaagaagactgtgtcatagttggcagcatggcccatccacgacgggtagaaatcttccatgagacaggaaagagggtgcattcgtttggtggagaataccttgtctctgtgtgttccatcaatgccatgcacccaactcggtatattttggctggaggtaattccagcgggaagatacatgtttttatgaatgaaaaaagctgctgagtttttggtttaggaacatcaatttgttcaaattgaccactgtctaaggagcctagtaatcggcgtgccttagtgtgtttatgtggtaatgtgttacatttagcaattataacattgttttattaataagactataagaagagtgtacttttagtaagggagaagtcttggagggttgcttctgcaggacggggagggaatttgaggggaggctgaggtgccgtcaggactttttttttttttttttttttgagatggagttttgctcttgttgcccaggctggagtgcaatagcgcgatcttggctcaccgcaacctccgcctcccaggttcaagcgattctcctgcctcagactcctaagtagctgggattacaggcacctgccaccacgcctggctatttttttgtatttttagtagagatggggtttcatcatgttggccaggctggtctcgagctcctgacctcaggtgatctgcccgcctcggcctccaaaagtgctggaattacaggcgtgagccaccatgcctggccatcagaacttgtaatcaagacagtatgttgagaaattctaacattataaattacaaagctttgactattaaagtttttgtgatct

SEQ ID NO: 14957 - protein, 626 aa, Homo sapiens
MSRSGAAAEKADSRQRPQMKVNEYKENQNIAYVSLRPAQTTVLIKTAKVYLAPFSLSNYQLDQLMCPKSLSEKNSNNEVACKKTKIKKTCRRIIPPKMKNTSSKAESTLQNSSSAVHTESNKLQPKRTADAMNLSVDVESSQDGDSDEDTTPALDFSGLSPYERKRLKNISENADFFASLQLSESAARLREMIEKRQPPKSKRKKPKRENGIGCRRSMRLLKVDPSGVSLPAAPTPPTLVADETPLLPPGPLEMTSENQEDNNERFKGFLHTWAGMSKPSSKNTEKGLSSIKSYKANLNGMVISEDTVYKVTTGPIFSMALHPSETRTLVAVGAKFGQVGLCDLTQQPKEDGVYVFHPHSQPVSCLYFSPANPAHILSLSYDGTLRCGDFSRAIFEEVYRNERSSFSSFDFLAEDASTLIVGHWDGNMSLVDRRTPGTSYEKLTSSSMGKIRTVHVHPVHRQYFITAGLRDTHIYDARRLNSRRSQPLISLTEHTKSIASAYFSPLTGNRVVTTCADCNLRIFDSSCISSKIPLLTTIRHNTFTGRWLTRFQAMWDPKQEDCVIVGSMAHPRRVEIFHETGKRVHSFGGEYLVSVCSINAMHPTRYILAGGNSSGKIHVFMNEKSC

SEQ ID NO: 14958 - DNA, 2318 bp, Homo sapiens
  CDS (177)..(1538)
cccggctctggagcataaacaagagcggggacgggatgaggcggcggttgatcccagggtggcgagtggcggcgaccgaggcggcgagcggggcccggcgccgaccctgagtgcagcctgacccgccctcgcgcgcgcgccctccccggccgggcccactcgccgcgcgcccagccatgaacctggcgagccagagcggggaggccggcgccggccagctgctcttcgccaacttcaaccaggacaacacagaagtgaaaggggcatcaagagcagctggtcttggccgtcgcgctgttgtctggtccctagctgttggtagtaagtccggttataaatttttctccctttcttctgtggataagctggaacagatctatgaatgcaccgatacggaagatgtgtgcattgtagagagattgttctccagcagcctagtggccatcgtgagccttaaagcaccaaggaagctaaaggtttgccactttaagaagggaactgagatctgcaactacagctactccaacacgattctggctgtgaagctcaacaggcagaggccgatagtatgcctggaggagtccctgtacatccacaacattcgggacatgaaggtgctgcatacgatcagggagacgcctccaaaccctgcaggcctgtgtgcgctgtcaatcaacaacgacaactgctacttggcgtacccagggagcgcgaccatcggagaggtgcaggtcttcgataccattaatttgagagctgcaaacatgattccggctcacgacagtcctttagcggcactggcctttgacgcaagtggaactaaacttgccacggcttcggagaaggggaccgtgattagggtattttccattccagaaggacaaaaactctttgagtttcggagaggagtaaagaggtgcgtgagcatctgctccctggccttcagcatggacggcatgttcctctccgcctccagcaacactgagaccgtgcacatcttcaaactcgagactgtgaaagaaaaacccccagaggagcccaccacctggaccgggtacttcgggaaagtgctcatggcctccaccagctacctgccttcccaagtgacagaaatgttcaaccagggcagagccttcgccacggtccgcctgccattctgcggccacaaaaacatctgctcgctagccacaattcagaagatcccgcggttgttggtgggtgccgccgacgggtacctgtacatgtacaacctggacccccaggagggcggcgagtgtgccctgatgaagcagcaccggctggacggcagtctggaaacgaccaatgagatcttggactctgcctctcacgactgccccttagtcactcagacatacggcgcagctgcaggaaaaggtacttacgtgccttcatccccaacgagacttgcctacacagacgacctgggtgctgtgggtggcgcctgcctggaggacgaggccagcgccctgcgcctggatgaggacagcgagcacccgcccatgattcttcggactgactgaacttgacctgtgacctctgacccggggagcagagaacactggtttcacagaggactttgtgcattgctgctatgaactttgacctgagtcgggggagaggatggcagagactttattaaaaaaaaaaaaaagattgtagtggtagtctaactccataacgctgaggaaatacatcattttcacttcagtggcttttaaatcctgcttatgaattttagctttttgtttgtttgttttctctttttgccaaaattaactgtttggtgaagcccgcaaaacctcctcgctttgcatgcatgaacgtgccaagccagcataggggagctagaagccactttccagccacctgccgttgggttttttcatatctgtacataatgccgagtgcgtaaggaaaccgtggcgtcgcgcacagtgggtctgcttgtcaaggccagttctgcagtgacaggcccaggggctgcccaccaggtgtgctgggcagacttcagctgggacagaagtccgatctccctagggccccacctggaccattttccctccgttttattttgttaattaaattctttccaaattggatcgctctgggatttcttccatggtggacttttgtttctgatcttgttttccctgtggatattggaggacagcgaggttctttctgatactaaaaacctttctttcaggcagcaaatgaacttgaaaggttgcctggactcgctggagcaaaggaaagcgattttgtttgtataattaaatgatctgttcttctacttc

SEQ ID NO: 14959 - protein, 454 aa, Homo sapiens [sequence omitted]

SEQ ID NO: 14960 - DNA, 2399 bp, Homo sapiens
ttagaagaattgcataaaacgtagtaaatggggtctgtcattagcaaaggcaaatctaagcaatcatttttccccccagaagttacttagaaggagaactgggaacacttggggtctctctaactgatggcattcacttcacacagtcgtctatgttatccagagatttttatttcattttacattttagggcacagttctttggggctaattaaaatggggtttgcaggctttttatggtgaagaataatatatctctgtctatagctttcccatggtagcctgataaggctgagagagaaaaatatgtgcagtatctcatcctccccctgtaccaggccatagctttgaagtgtattttgtaaattcaactataggttagtcagaatgctgtttttcgttaattaacttagcctgtgttgatatctcctccttcctggtcacattcaaaccttcccagagtacaaaggggtatgtagaaaggattccagaagaagtaatactttattctctaatgttaatagcttttctggatctcttagtagggggaaagtagaaaatgattgtttaacagtatgtgtggtgatgtcattatctccagagaggcttcaagaaatcctttggaaataaaaagttaaatgtttgcatttcatgtggtatttcaggtcttcaggttctgattagcttacttttttcctttgtctttggctgatttctgctttgtagataaataataatagccctgagatgtttctaacatttaaataagaaaaaaatcaaatcgaagtcagcctgctggaaaagtgatcacatggcagttgcagtaacttgtatggaaagagaaaatgcaatgagcccagttactgcacttgccactaccatgctgtccatggaaggaataatcagcagttcagttgtcacaagccgcccttgaagaaaacgcagcaaaatattttaaaatgaagatattgcagtccccagagccagtgaaggtttcttttggtaaaatgaaattgtgccattgtcaaagtaccccgtagtgatgagcactgactggttcactggccacattttagttcttcataataataggccacaaaagggctctgtggtttgcctccatgtgcactggcccctccccacccctagggggcactcagtagctgctgagaaggcctgtccacgaggctgttggaacccctccaataaatacttagaggtagtgtatctgatgcttgttttcgtggagaaaattgtattggagaacttaaaacatcacgaatatttttaataggatccgcagacacccaaaggagaagcttggtcttttccaggtatttccaacttgagttcaacccaaagcctttgaaaggaatgcattaccccatgaccacatgctgagaccccatggggtctaacacgggacctaagaaagtctctgcagccagatagtacatggtgtctccacaaaactaggcattctggagattgcccagaaagggatgtgaggggaccgttaagatctgtcttgcttatctcatgcactcacattccttcagcctcctggagttcctgataaaaggaagccagggtgtggacattttttagctattgatttcccaatagcttgtggatcagttgtacacccacacttccttctctgcctaattccgtttttctggaaaaagtagtatgcccatgtatgtgtgtttttcttaacacaggtccatgaaagtttggcttcctggtttgatgtctgttgcgtggcctggaaaccagggagcagcaactattgagatggtttctgtgttcagtgaaaaattctatttcattgagacaattttttctttatccacagtaattttttgacactgtcatcatgaaactacccttaggaaaataagattacctgcaaaaaaaaaaaagaaatgagttatggaataggaacagttatgtgatgattctgaaactttaacttagagcttcattactttaagaatggaaaacaacctctgagtttgatttcccaaagtttcataaagcccctaagctcatgattttcatcaactctttgcccacatagtcatttacctccacagccgtttgttgtcatagaaggggtggtggtgtttggatttgatttttttcaacttgcagtgagaaataggataggtgacaaaaccttacttgttttcttaagacaattcagtgcttgagcatctctgtcagaaatggaatgaaatactgttagccaattagaattattttatgtattgttattgtgttttgctgatttttatatgaaaatataattattcattcttgatctctggaagcaatcattattatgaggatcattttactttggaaacactttcataataaagataagtattaag

SEQ ID NO: 14961 - DNA, 2971 bp, Homo sapiens
  CDS (192)..(722)
ggatctccagcagtggcgttacttctagcggctggataccgggttctccgcgagatcccgagatattctccccgcacggaagcgacgactggcctggccagaggactcgcgtgggagcgaggtgccggccccgacaggacggtgagcctacccgtatattacaagaaatctcaagtcaaacactggaaaagatgtcagaagattcagaaaaggaagactattcagacagaacaatcagtgatgaagatgaatcggatgaggatatgttcatgaaatttgtaagtgaagatcttcatcggtgtgcacttttaacagctgactcttttggtgatcccttcttcccccggactacacagatactattagaatatcagctagggagatgggtgccacgtcttcgtgaaccaagggatttatatggtgtctcttcttctggtccattgagcccaacacggtggccataccattgtgaagtcatcgatgaaaaagtccagcatattgatggagtctcatgctggagtgagtctcaccaggctggagcgcagtggtgcgatctcggctcactgcaacctccacctcccaggttcaagcgattcgcctgcttcagcctcctgagtagcagagactacaggcgcgtgccaccacgcccagctaattttgtatttttagtagagacggggtttcaccatgttggccaggatggtctccgtctcttgacctcgtgatccgcctgcctcagcttcccaaagtgctgggtttttttttgttgttgttgttgttttaacattctgtatctcttagctgacattggaaatctgacctgtaattttcaaaagtgtcaaagtcatgaaatataaggaaagactgaaaagctgttctatatcgaagaaaactaaaatacacattaaagttcaatgcaatgtgtgattctaaagtggatccttttgctatagaggacattatttatacaactgtcaaaattttaagtctaaggattaaatattagaaataaatcagtattaatgtcctgatcttgatggttgtattatggttatttatataggaggatttccttcactggaggaaatataagtatttggagaggatggggtattatgtttgcaaatatttcagggaaaaaaagttgtttttcctgttattgcaacttttctgtatgttttcaactgtttcaaataaaattaaaaaccacatgcctaggaataaatctgatagacaagatttctatgaagaagcaataaagcattgagagagatttttaaaagacctaagtaaatagagggaaatagcatgttcatagattgggagactcattattttaaagatgtcagttatctccaaactgatctacatgtcccatgcaataccagtcaaaatcccaattgtgatttttttatagaaattgacaaggtactttaaaaatgcatatggaaatgccaacgacctcttaaaaggacaaaaaaattgtaagagttactagctcttaaaccttaataaagttatagtaatatatggcattgctgaaaggaaacaggaatggaatagaacagagagcttagaaacagacctatgcatatatggtcattatgacaaaggtggaactgcaagagaaagttaaagatggtcttttcagtaaataatactggaataattggatttccatatggaaaaagtgaaatctcaccccaaccttatgcacaaaagtccattttaaatgggttatggatataaaaatgaaaggtaaaacaataagacttctagaaaataatacaagaaaatatcttcataatattaaaatctggaaaggcttaaacagaacagaaaataccctaaaccataaagagaaagactgataaatttgactacgatacaattaaaaacctcagttcatcaaaaaataaaacgaggcaaacaatagattgggagaatatattaatatttgcaatacataactgacaaatagatcatttctggaatacataaagcatttctgaaagtaataagaaaagacaaacaacccagtaggaaaatgggcaagagacttgaatgggcacttaataaaaaatgatattcacatggccaataaacatatgagataatatcaaccttatcatgaagtcttgttgtgattttaatttgctattccctgattgttaatgaggctgagttctgtttcacagaaaccttgcaaggttaaatttaacttatactaaggaatggtgagcatatggagcaaacagaaactttgtgacctgctggtgggtgtgtaaattggtataatcattttggatgatagcttggcgttatttactgaaattgatacatgccctgcaacctagaatttttactcccagttgtatacctaaaactgatgtgagcacaggtgctctaagcaacatgtataaagctgttcatagcaccatttttcttaatagccccaaactgaaacagcccaaatgtccattataaatagaaattgataaattgtaacattttgtacaatattatatatcaatgaaataagcaaattacagcagtatgccacaatgtggattgatttcatgaatatacgtgaaaaacagcacagaagaataccatacactatgtgattttaattttataaagttcaaatataggcaaagcaaagcaatagttttatttacacttctgtagataaaaactgtattatacacatgcatatatatgaatgcttaggtggtaaaattataaaggagagtaaagaaatgactgcattatattaagactaatggctacttttcaaagggagggagaggctggtgatgggaaaggggcatgagtggagtatgtaaggtgcttgcaatgtaatatttcttggcctatgtggtgtttgctttgtgataaatcagtaagctgtagttctttgtttttgcacttttcataagtataatacctaataaacatttaaatattt

SEQ ID NO: 14962 - protein, 177 aa, Homo sapiens
MSEDSEKEDYSDRTISDEDESDEDMFMKFVSEDLHRCALLTADSFGDPFFPRTTQILLEYQLGRWVPRLREPRDLYGVSSSGPLSPTRWPYHCEVIDEKVQHIDGVSCWSESHQAGAQWCDLGSLQPPPPRFKRFACFSLLSSRDYRRVPPRPANFVFLVETGFHHVGQDGLRLLTS

SEQ ID NO: 14963 - DNA, 2729 bp, Homo sapiens
  CDS (80)..(466)
agcatcccaaagaatttcttgtattcctaaaacccatatttctaataagtatgggaataatttcctccaggaagcacacatgagagaaaaatctttccaatgtaatgagagtggcaaagcctttaattgtagctcactgttaaaaaaatgtcagataatccatttaggagagaaaaaatataaatgtgatatatgtggcaaggtctttaatcagaagcgataccttgcataccatcatagatgtcacactggtgagaaaccttacaagtgtaatcagtgtggcaagaccttcagttacaagtcatcccttgtaattcacaaggcaattcatactggagagaaacctcacaagtgtaatgaatgtggcaaggtttttaatcaaaaagcatattttgcaagtcatcatagacttcatactggagagaaaccttacaaatgtgaagaatgtgacaaagtttttagtcgctaatcacaccttgaaagacataggagaattcatactggagagaaaccgtacaaatgtaaggtttgtgacaaggctttcagacgtgattcacacctggcacaacatattgtaattcacactggagagaaaccttacaagtgtaatgagtgtggcaagacctttgttcaaaattcatctcttgtaatgcataaggtcattcatactggagagaaatgttacaagtgtaatgaatgtggcaaggtttttaatcacaaatcaaaccttgcatgtcatcatagacttcatactggagagaaaccttacaagtgtaatgaatgtggcaaggtttttaattgaaaatcaaaccttgaacatcatcatagagttcatatcggagaaaaaccttacaaatgtgaagaatgtgacaaagttttcaatttcaattcacgccttgaaatacataggagagttcatactggagagaaaccatagaaatgtaaggtttgtgacaaggcattcgggtgtgattcacacctggcacaacatactagaattcacactggagagaaaccgtgcaagtgtgatgagtgtgacagagccttcagtggtcagtcaacacttattcaccatcaagcaatccatgtcatagggaaactttactaatgtaatgattgtcacaaagtcctcagtaatgctacaaccattgcaaattattggagaatgcataatgaagtgagaacttacaagtgttataaatgtggcaaatttttcagacttcgttcataccttgcagtttatcagcgaactcatactggagagaaaccttacaaatgtgatgattgtggcaaggtcttcagtcaagcttcatcttatgcaaaacacaggtgaattcatacaagaaagaaacctcacaagggtgatgattgtgtcaaagcctttatttcaggttcatgcctcattacacatcagagaatccatactagacagagatcttacaaaagtcatatgtgtggcaagatctttagtctgaggtcactccttgcaggacatcaggaaattcatttttgaggtaataatttcaaatgcaatgagtatagcaaaccatcaagcacaattgatgttagattcaaatcagcattgagttcagtttgagttgacttaacattgagttcaagtatttgttgagattaaagtgtttatgttaagaggattaggccaggtgcggtggctcacacctgtaatcccagcactttgggaggccaagacaggtagatcacttgagatcaggagtttgagagcagcctggccaacagaggtgagcacctttcccagtctgttttttgtttcttcaacaaaaactgatagagatttttatgggtattgtgttgaatcaaaatcacattgggttatgtaatcatttaacagtattaatttttccaaaacatcaatatgggttatatctttatatatgtttttaatcattttgatcaatgtttgtagatttcaatgtatgaatttctcacttctttccatttattcctatttcttactttaagttctctagcaaatggaagtgtttttaaattttcatttaaaattgtttattgttaatgtatgaaaattcaacgaatttttggtgctgatattgtattgtgcaaatctactgatgtgtttattagtcacagtagtattttggttgactctttgtgattttctacacagaagatcatgtcatctacaaaaaatataattttactttttctgattttgaggcatttcatttcttttgctagttcattgctctggctaggacttccagtatttattgaatagaaaaagtgagaacgttcttgcatcatgtgagatcctacgggaaaaggattctattttccctgcttggttatctccacattggtcatttcatcaatggtctttctattggtgaggtaaatttccttctccatctattttgtttaagatttctatgatgatcagatgctgaattttgtgaaatgatttttctccatctgttgagatgatgtggttttcatctttcattctgttcaagtggtatatcacattgatttgcttgaatatgttgaaccatccttgcatgccagaagtaaatggcacttgcatatctacaatccttttatatatcctcttgaatacagttttctagtacaagtggtcttcaagaagctcatggaaaaatacatattatggaaaaattgtgcatgaatttcacagtttttgcaccaaaataaactgatacaaatctgtt

SEQ ID NO: 14964 - protein, 129 aa, Homo sapiens
MREKSFQCNESGKAFNCSSLLKKCQIIHLGEKKYKCDICGKVFNQKRYLAYHHRCHTGEKPYKCNQCGKTFSYKSSLVIHKAIHTGEKPHKCNECGKVFNQKAYFASHHRLHTGEKPYKCEECDKVFSR

SEQ ID NO: 14965 - DNA, 2430 bp, Homo sapiens
  CDS (17)..(529)
tcagctcgcactgcatatgcaacgcaactcaactcatgctgcgtatgcaactcaactcacactgtatgcaactcagctcgctctgcatatgcaattcaactcgcactgcgtatgcaaatcaacttactgcatatgcaactcaactcactgcgtatgcaactcaactcgcactgcgtatgcaactcaactcgcactgcgtatgcaactcaactcgcactgcgtatgcaactcagctcgcactgcgtatgcaactcaactgttgcaagtacttatttccggccacttcctttttctaactaccacaccaagccagtatttctcctccctgaagtcagcccaggatgaggcactagacagcaggacatgctgtatgcccttgggcctgctggaagtatgcagactagccagccccagacttcatcctgccctgtcctgcctttcctgtgaaaaccctgtggcctctgcctcccctggctctgacttctgcctcctgcccagctctgcagctccccttgggccctgcctggagtgatgtgccgccttctcttgacactgtgagtgataaactttccatgtcaggaacctgtgtgtgtcactcactcaccttgacgagtccgcgtctaggccccaccagtggtgtggttttcctcatagtctctctacctaagcacatgtctgtgacaaggtcttacccagcccagggattcttgaactatctgtaggaactgccatgttgactcctgggcagttttattctttctctctactcgttcaaccttcttagggagtgacgttttttccaaagtggttgtgaaacagcatctccttggggtgttggtttgcacttctcttcattactgatagtatgaacatggttttgcttacgctggctattttcctttttggatgaagtacctggtcttgttttttcctggtttgtttgatctttgttcttttttagaaatagtgaggctgttgtgaggtgagtcaccacttgtgacttagaagattgcagtggtttccacttcacctgtttccacttttgtgatgatgccttaaggaaaaagattgtgccaggtgtggtggctcaggcctgtaatcccaacactttgggaggccgaggtgggtggatcacaaggtcaggagatcaagaccatcctggccaacatggtgaaacgccatctctactaaaaatagaaaaattggctagatgtggtggtgcacgcctgtaatcccagctccttgggaggctgaggcaggagaattgcttgaagatgggaagcacagattgcagtgaaccgagatcgcgccactgcactccagcctggcaacagagtgagactctgtctcaaaaaaaaaggaaaaatatttcttaattttggcatactcaaatttatacaacctttcctttatcttcatcagaaatttcttttctcctaaggccttaaatatgctgtactattttggcttccacagtttctatgttttatcccaagttgcttaatccatttggagttgatttttgttgaccgtatctgtagagtgtaatgtcatttttcccactatggacataaaaatttttgcaaggcctcttttttttaatgaagaaaagaggtttattttgttcacaattctgaaggcctggagggtcccagaagcttggcaccagcacccactaggctccagatcggggcctcatgctgacttccgttttcacacaacgagtgggaaacaggtgtcctaacactgtgagagaaaaaatcccaaagtttagtttttcccattcgcttgccctggcctccaggcattcctgcagcagcaaacacatcatcagccttaggagctggcctgtgaggttgaccactctgtaggtggacaagcctcgcccgagaagagacatgagcagttctgcgtaggctttaagacagaatcaacatggaaagcacgacccacatggtttcaatagaacttgcctcctgaacctgactaggttactcgcctgatgaaccagtatctccatcacccgtgggactgacagacccagagtgtcataacctaaaattcagaagtgtagactataatcttaaattattcagcatatgtgcaacagccttggggagcagtgttatgataccaaatggctaacattcatgacctcagtatcctggaagaaaaggagaaagtgtgatgtagtaaaaccacttgaaaaaataatgatgaaacatttctcatatttggtgtaagataaaaacttaagtttgaagaggttccatgagccccagacaggataaacctaaagaaaaccaagcccaggccgggggcggtggctcacacctgtaatcccagcactttgggaggccgaggtgggcggatcacaaggtcaggagatcatgaccatcctggccaacacagtgaaacctcgtctctagt

SEQ ID NO: 14966 - protein, 171 aa, Homo sapiens
MQRNSTHAAYATQLTLYATQLALHMQFNSHCVCKSTYCICNSTHCVCNSTRTAYATQLALRMQLNSHCVCNSARTAYATQLLQVLISGHFLFLTTTPSQYFSSLKSAQDEALDSRTCCMPLGLLEVCRLASPRLHPALSCLSCENPVASASPGSDFCLLPSSAAPLGPCLE

SEQ ID NO: 14967 - DNA, 2941 bp, Homo sapiens
  CDS (7)..(2292)
agacagatggagaagttagaagttttagaggaatggcagtctcacattgaaggctgggaggggtccaacatcactgacacctgcactgaaatgctaatgtgtggagtcttactgaaaatttcttctggaaatattcaagaacgggtgttttttcttttcgataatcttttggtgtactgcaaaagaaaacacagacggttgaagaacagcaaggcatctacagatggacatcggtacctttttcgtggccggatcaacacggaggtgatggaagtggagaatgtggatgatggcaccgctgatttccatagcagtggacacattgttgttaatggatggaagatacataacacagcaaaaaataaatggtttgtttgtatggcaaaaacacctgaagagaagcatgaatggtttgaagctattttgaaagaaagagaacggcggaaaggtttaaaattaggaatggagcaagatacctgggtcatgatctctgaacagggtgagaaactttataaaatgatgtgcagacaaggaaatctgatcaaagaccgaaagagaaaactgactacgttccctaaatgctttcttggaagcgaatttgtgtcatggctgttggaaattggagagattcacaggcctgaggaaggcgtgcacttgggacaagcattattagaaaatggaatcattcaccatgttactgataaacatcaattcaaaccagaacagatgttatatagatttcgctatgatgatggaacattttatccaagaaatgagatgcaggacgtgatttcaaagggtgtaagattatattgtcgtcttcatagcctttttactccagtgataagagataaagattaccatttaaggacctacaaatctgtggtcatggccaacaaactgatagactggttaattgcacagggagattgccgcaccagagaagaggcaatgatatttggcgttggactctgtgacaatggatttatgcaccatgtccttgaaaaaagcgaattcaaagatgaacccctacttttccgttttttttcggatgaggaaatggagggatcaaatatgaaacatcgacttatgaaacatgacttaaaagttgtggaaaatgttatagctaagtcattattgattaaatccaatgaaggcagctatggctttgggctagaagacaaaaataaagttccaataataaagttggtagaaaagggatctaatgctgagatggctggcatggaagtcgggaaaaagatttttgctattaatggtgacctagtttttatgagacctttcaatgaagtggattgcttcctgaaatcgtgtttaaacagcagaaaacctctaagagttcttgtgagcacaaagccaagagagacagtgaaaattccagattcagctgatggacttggcttccagatccggggatttggcccttctgttgtgcatgctgtaggaagaggaactgtggctgcagcagctggtcttcaccctggacagtgcattatcaaggtgaatggaatcaatgtcagcaaagagacacatgccagtgtcattgcacacgttacagcctgcaggaagtacaggcggccaacgaagcaagattccatacaatgggtttataatagcattgagagtgctcaagaagaccttcaaaaatctcactccaagccccctggagatgaagcaggggatgcttttgactgtaaagtagaagaggttattgacaaattcaacactatggccatcattgatgggaagaaggagcatgtgagtctgacagtggacaatgtccacctggaatatggtgtcgtgtatgagtacgacagcacagctggcatcaagtgcaatgtggtggaaaagatgattgagcccaaaggtttcttcagcttaactgccaagattcttgaagccctggctaaaagtgatgagcattttgtacaaaactgtaccagcctaaattctctaaatgaagtgattcctactgaccttcagagtaaattcagtgccctttgcagtgaaagaattgaacacctatgtcagagaatatccagttataaaaaggttcaagcttcagaaaggttttacaatttcacagcacggcatgctgtctgggagcacagttttgatcttcacagtgtaagcagcacatttccagtacctgtgactatggagttcctcctgctgcctcctcctctcttaggaatatcccaggatggaagacagcactgcattcctgaggaccttccttctcaagaaatgctcttagcagagagggcccctgtctgattcttaccctttggaacagttcaggcacccttagacacagtacacagcccttcctagcatgtgggcagggggacatcctgtattcacaggcatttgtattgagctacaagttggaaagccagtccccctagcaagagaatcttctgccagctctccccgattactccattaacacttcttgacatcaccctattcatttccttttcagcttgtaccaaaatttctaactatctggcttttacgtgcattatataattgtatatatacagtcatgcactgcataacatttcagtaaatgacagaccatatatatatggatatatatatatatatatatatggatatatatacacatatatatacacacacatatatgtatatatacatatatatgtatatatatataaaatggtggtcccataagattatactactacattttggctctactttttctatgttcagatagatgcacctattggtgtatttttcagaatacatccccgttgttaagcaatgcattactgtattatatatatggcacatgtattatatatatggcacattgccgttacttttaatggcaaaaaccgcaatcacttttgctccaacctagtaattgcaataaacaattgttgtatatagc

SEQ ID NO: 14968 - protein, 762 aa, Homo sapiens
MEKLEVLEEWQSHIEGWEGSNITDTCTEMLMCGVLLKISSGNIQERVFFLFDNLLVYCKRKHRRLKNSKASTDGHRYLFRGRINTEVMEVENVDDGTADFHSSGHIVVNGWKIHNTAKNKWFVCMAKTPEEKHEWFEAILKERERRKGLKLGMEQDTWVMISEQGEKLYKMMCRQGNLIKDRKRKLTTFPKCFLGSEFVSWLLEIGEIHRPEEGVHLGQALLENGIIHHVTDKHQFKPEQMLYRFRYDDGTFYPRNEMQDVISKGVRLYCRLHSLFTPVIRDKDYHLRTYKSVVMANKLIDWLIAQGDCRTREEAMIFGVGLCDNGFMHHVLEKSEFKDEPLLFRFFSDEEMEGSNMKHRLMKHDLKVVENVIAKSLLIKSNEGSYGFGLEDKNKVPIIKLVEKGSNAEMAGMEVGKKIFAINGDLVFMRPFNEVDCFLKSCLNSRKPLRVLVSTKPRETVKIPDSADGLGFQIRGFGPSVVHAVGRGTVAAAAGLHPGQCIIKVNGINVSKETHASVIAHVTACRKYRRPTKQDSIQWVYNSIESAQEDLQKSHSKPPGDEAGDAFDCKVEEVIDKFNTMAIIDGKKEHVSLTVDNVHLEYGVVYEYDSTAGIKCNVVEKMIEPKGFFSLTAKILEALAKSDEHFVQNCTSLNSLNEVIPTDLQSKFSALCSERIEHLCQRISSYKKVQASERFYNFTARHAVWEHSFDLHSVSSTFPVPVTMEFLLLPPPLLGISQDGRQHCIPEDLPSQEMLLAERAPV

SEQ ID NO: 14969 - DNA, 2422 bp, Homo sapiens
  CDS (170)..(544)
acattaaagctatttaattaattattattattattattttgagacagggtcttgctctgttgcccagactggactgcagtggcgtgatcatggctcactgcagcctcgacctccagggctcaagcgatcctcccacctcagcttcccaagtagcggggactgcaggcacatgccaccacacccagctatttttttttattgtttgttgagacagggtctcactatgttgcccaggctggtcttgaacttctgggctcaagcggtccacttgcctcggcctcccagagtgctaggattacaggcaggaggcactgcacctggccagaaaaaactattcttgacttcacattttccgccagcttcacccctgcccctttgcttctctttgcagcaaaacttcaaaaagcatagtccacgctctcccccaggcattcttgggtctctctacccaggattttgctcccccatcgccacatctccttttgccaagggcaccagaggcctccgtgttgttggatccagcggtcggctctcagcctcctcttaactgctcagtggcactggtgccgccaagcaacccttcctccaagagagccacaggctctgggatacttcactctggggttcctcctacctcacagactctcctggctggtcctcctcttctccccaacatcttatggccaggtctccaggctcttttctgtctacaggcactctccatgagtccttattcagtctcctggcctcaaatgccagctgtgctgagacccccttatttgtagctccagcctagcctgctctcccctgaaccccagactcatgtttccagctacctctgccgatatctaatagacacctcaaactcaacctgccccggctgcactcccgatcggcccccacctcctacagtcatcctgcttcagagactatagctccgttttcaagggctcaggccacacccttggaaccacccttgcatcctctctttccctcaaaccaccgcatctctcacctggattatcgtaacagcttcctgtgtcccagctgcagtcccccgcccattacattttgttcctaacacagcagccagagtgagccttttgaaagggaagattatggggctctttggctcacatagtgcagtgtctccccatctgaccactaaggcctggctgtgaccatatcacccctgcgacctcaactcccctcacctccactccagacacacctgctgttctatggtgctgcctgcagttcaacaccaaagaatattcttcgctccaggaagaaaaacggttttctccacctccaatcacaatgtgttcttttggcctatcttttgctccccacccacccttttttttgagacggagtcttgctctgtcgcccaggctggaatgcagtggcacgatcttggctcactgcaacctccacctccacctcccgggttcaagcgattcccctgcctcagcctcctgagtagctgggactataaatgcgtgccaccacgcccagctcattttttgtattttagtagagatggggtttcaccatgttagccaggatagtttcgatctcttgacctcgtgatccacccgccttggcctcccaaagtgctgggattacagctgtgagccaccgcgcccggccttattttccccttttaggaaacactgggaactattttcttctcagagaaaaacaggacttgcccaatagtaacatggaaacttaacagggtcttaacctgtgaagactcaaggagcagaacccggagtaagggggagcaggggccggagtaaggggagcagggccccgtctaagatggggcagggcctgggctaagggagagcagggccgggctaaggggaggcagggcccagtctgaggtgggggcagggcctggtctaaggggagcagagcctgggctaaagggcagctgagcccagtctgaaggagagccgagctatctgaataggggctagcacctgttctaaaggaagtggctgctcccctgctttcgctgtgagagggaacacaggccttttaagaaaatgggaatcaagttttttgtttaatttcccaaaggttatatgttgacaattaacttcaaagtattagctgctttttgtaggccaaataaacacgtctgtgggccagatctggcccaggactagagttgccagtggcaacttctggcccaggctgaatggtgggcaggaaggaaatggagcccccaggagtgggagtgggagctgatgcctgggtacgggagctctgtgggtgggagtgagacaaaaaacagggtcttgagctctggggagcaagcagtgtcctccagtgaaggaaatcctggactcgcaggcagaagttttgcctcttactcgccatgtgctctgaataaagttacctgccctcc

SEQ ID NO: 14970 - protein, 125 aa, Homo sapiens
MPPHPAIFFYCLLRQGLTMLPRLVLNFWAQAVHLPRPPRVLGLQAGGTAPGQKKLFLTSHFPPASPLPLCFSLQQNFKKHSPRSPPGILGSLYPGFCSPIATSPFAKGTRGLRVVGSSGRLSASS

SEQ ID NO: 14971 - DNA, 2519 bp, Homo sapiens
  CDS (124)..(2298)
aggctcaggctccgacggtggccggcgggggtcacgaggcttcgtagtggaggaacgggtttggcgtgtgggacgcagctgcctctgtactggggagtcacggagtggccgggctccagggacatggcggcggcctctgcggtgtcggtgctgctggtggcggcggagaggaaccggtggcatcgtctcccgagcctgctcctgccgccgaggacatgggtgtggaggcaaagaaccatgaagtacacaacagccacaggaagaaacattaccaaggtcctcattgcaaacagaggagaaattgcctgcagggtgatgcgcacagccaaaaaactgggtgtacagactgtggcggtttatagtgaggctgacagaaattccatgcatgtagatatggcagatgaagcatattccatcggccccgctccctcccagcagagctacctatctatggagaaaatcattcaagtggccaagacctctgctgcacaggctatccatccaggatgcggttttctttcagaaaacatggaatttgctgaactttgtaagcaagaaggaattatttttataggccctcctccatctgcaattagagacatgggtataaagagcacatccaaatccataatggctgctgctggagtacctgttgtggagggttatcatggtgaggaccaatcagaccagtgcctgaaggaacacgccaggagaattggctatcctgtcatgattaaagccgtccggggtggaggaggaaaaggaatgaggattgttagatcagaacaagaatttcaagaacagttagagtcagcacggagagaagctaagaagtctttcaatgatgatgctatgctgatcgagaagtttgtagacacaccgaggcatgtagaagtccaggtgtttggtgatcaccatggcaatgctgtgtacttgtttgaaagagactgtagtgtgcagaggcgacatcagaagatcattgaggaggccccagcgcctggtattaaatctgaagtaagaaaaaagctgggagaagctgcagtcagagctgctaaagctgtaaattatgttggagcagggactgtggagtttattatggactcaaaacataatttctgtttcatggagatgaatacaaggctgcaagtggaacatcctgttactgagatgatcacaggaactgacttggtggagtggcagcttagaattgcagcaggagagaagattcctttgagccaggaagaaataactctgcagggccatgccttcgaagctagaatatatgcagaagatcctagcaataacttcatgcctgtggcaggcccattagtgcacctctctactcctcgagcagacccttccaccaggattgaaactggagtacggcaaggagacgaagtttccgtgcattatgaccccatgattgcgaagctggtcgtgtgggcagcagatcgccaggcggcattgacaaaactgaggtacagccttcgtcagtacaatattgttggactgcccaccaacattgacttcttactcaacctgtctggccacccagagtttgaagctgggaacgtgcacactgatttcatccctcaacaccacaaacagttgttgctcagtcggaaggctgcagccaaagagtctttatgccaggcagccctgggtctcatcctcaaggagaaagccatgaccgacactttcactcttcaggcacatgatcaattctctccattttcgtctagcagtggaagaagactgaatatctcgtataccagaaacatgactcttaaagatggtaaaaacaatgtagccatagctgtaacgtataaccatgatgggtcttatagcatgcagattgaagataaaactttccaagtccttggtaatctttacagcgagggagactgcacttacctgaaatgttctgttaatggagttgctagtaaagcgaagctgattatcctggaaaacactatttacctattttccaaggaaggaagtattgagattgacattccagtccccaaatacttatcttctgtgagctcacaagaaactcagggcggccccttagctcctatgactggaaccattgaaaaggtgtttgtcaaagctggagacaaagtgaaagcgggagattccctcatggttatgatcgccatgaagatggagcataccataaagtctccaaaggatggcacagtaaagaaagtgttctacagagaaggtgctcaggccaacagacacactcctttagtcgagtttgaggaggaagaatcagacaaaagggaatcggaataaactccagcaaggaaatggccagttaagtagtgtcttctctctccaccaaaaagaggaagtgcctccagcttttctgggggtctcataaagagcagttttactaaatgattgtatgcttatgctgaacacctttcatattggagaatcatgcatttgggtcactaattatctcaaaatatttcatactaataaagttgaattattttttattggaagcc

SEQ ID NO: 14972 - protein, 725 aa, Homo sapiens
MAAASAVSVLLVAAERNRWHRLPSLLLPPRTWVWRQRTMKYTTATGRNITKVLIANRGEIACRVMRTAKKLGVQTVAVYSEADRNSMHVDMADEAYSIGPAPSQQSYLSMEKIIQVAKTSAAQAIHPGCGFLSENMEFAELCKQEGIIFIGPPPSAIRDMGIKSTSKSIMAAAGVPVVEGYHGEDQSDQCLKEHARRIGYPVMIKAVRGGGGKGMRIVRSEQEFQEQLESARREAKKSFNDDAMLIEKFVDTPRHVEVQVFGDHHGNAVYLFERDCSVQRRHQKIIEEAPAPGIKSEVRKKLGEAAVRAAKAVNYVGAGTVEFIMDSKHNFCFMEMNTRLQVEHPVTEMITGTDLVEWQLRIAAGEKIPLSQEEITLQGHAFEARIYAEDPSNNFMPVAGPLVHLSTPRADPSTRIETGVRQGDEVSVHYDPMIAKLVVWAADRQAALTKLRYSLRQYNIVGLPTNIDFLLNLSGHPEFEAGNVHTDFIPQHHKQLLLSRKAAAKESLCQAALGLILKEKAMTDTFTLQAHDQFSPFSSSSGRRLNISYTRNMTLKDGKNNVAIAVTYNHDGSYSMQIEDKTFQVLGNLYSEGDCTYLKCSVNGVASKAKLIILENTIYLFSKEGSIEIDIPVPKYLSSVSSQETQGGPLAPMTGTIEKVFVKAGDKVKAGDSLMVMIAMKMEHTIKSPKDGTVKKVFYREGAQANRHTPLVEFEEEESDKRESE

SEQ ID NO: 14973 - DNA, 2529 bp, Homo sapiens
  CDS (14)..(673)
tgttgcttgagaaatggcgatgatcgaattggggtttggaagacagaattttcatccattaaagaggaagagttcatcgctgttgaaactcatagctgttgtctttactgtgcttctattttgtgaatttttaatctattacttagcgatctttcagtgtaattggcctgaagtgaaaaccacagcctctgatggtgaacagaccacacgtgagcctgtgctcaaagccatgtttttggctgacacccatttgcttggggaattcctaggccactggctggacaaattacgaagggaatggcagatggagagagcgttccagacagctctgtggttgctgcagccggaagtcgtcttcatcctgggggatatctttgatgaagggaagtggagcacccctgaggcctgggcggatgatgtggagcggtttcagaaaatgttcagacacccaagtcatgtacagctgaaggtagttgctggaaaccatgacattggcttccattatgagatgaacacatacaaagtagaacgctttgagaaagtgttcagctctgaaagactgttttcttggaaaggcattaactttgtgatggtcaacagcgtggcgctgaacgggatggctgtggcatctgctctgaaacagaagcagagctcattgaagtttctcacagactgaactgctcccgagaggtaggagagcatctgaatgccacaggtgccttctgtcccgtgttgctccgcttcggttgctcactcagccccctagcgcttcttgccctttgatgagggtcaggtgtgcggattaatggcctgacttgtacccagcaggcacgtggctccagccggtgtggacctgggcctctgctgcccacgtctgcccctgtcctcctgcaggtgagctgggggaggaaagggctcatggcagacagcaggcagcctgtggtttcacgatagccgcctgaactcctctctccaccccggacagcattatcctctgtatcggagaagtgatgctaactgttctggggaagacgctgctcctgcagaggaaagggacatcccatttaaggagaactatgacgtgctttcacgggaggcatcacaaaaggtttgccagggtgtcgtgatgctaattcatgtcacagtgtgactctcatcaccttgcatgtcaacaagcagagtgcccaggctagagcaggtgtttgctgaaacgttcatgacttagttatcacctggggggacaggggtggaggcctggctttcacagtatctcagattttcatttaatcgctttttttttttccagtaaacctacttctgtttcctaccctcaagtcagtaatagtctcagctattctttgtattcagagtttttcaccaacttaaatgtatttagaaatgtgaatggaactgaaaagtcaattttttagggacttaattaaaattaaaatgcattttcttatatagatttatataatacatattacattatacataatatataaatataagaaatatttataagataaatgtataaaatatttataaagataaaataccgtaaaaagtatataaaatctgggatgagaacaaagggctgaccttacctttgatttagtgtaaataaaccaaaggatttttaaggaaaaaaataaaccagtccttcaaaataaggatttagtatgtaatttaaggaaagaagcgatggccagcggccgtctgctgagcggtgagagcctggttgaggatgagctaacagcctgctttgctgtcttctcggccactgtcagctgctgtggtggctccagccgcgcctggttctcagtggccacacgcacagcgcctgcgaggtgcaccacgggggccgagtccccgagctcagcgtcccatctttcagttggaggaacagaaacaaccccagtttcatcatgggaacagatgcttagttgagcatcaaggggcaggaagacacctttccctccttgttcctcgctgaccgatgaccctggaactccacggtgcctctctgaatctctgttatggatcccccactatatttgatgggaacccagtgagccaggggccagttttgacagggtagcatcacgcccacagactacaccctctccaagtgctacctcccacgtgaggatgtggttttgatcatctactgtggagtggtgggcttccttgtggtcctcacactcactcactttgggcttctagcctcaccttttctttctggtttgaacttgctcggaaagcgtaagacaagatgaagagcaggcgccattataaatatcaaagcccaagaagtggaactttgggcagagatcatgttagaatcaagtggatgatgagaccaattacaggccgtctctctgcacagcacagaaattctcaatcactgaaatgagtaactgcaaaataaatagttgattgtactgttctcatgctataaaagtggacaggtactctacaacaaatctgttttctcatttttatcaaatatatgtatcatcaaaggtt

SEQ ID NO: 14974 - protein, 220 aa, Homo sapiens
MAMIELGFGRQNFHPLKRKSSSLLKLIAVVFTVLLFCEFLIYYLAIFQCNWPEVKTTASDGEQTTREPVLKAMFLADTHLLGEFLGHWLDKLRREWQMERAFQTALWLLQPEVVFILGDIFDEGKWSTPEAWADDVERFQKMFRHPSHVQLKVVAGNHDIGFHYEMNTYKVERFEKVFSSERLFSWKGINFVMVNSVALNGMAVASALKQKQSSLKFLTD

SEQ ID NO: 14975 - DNA, 2987 bp, Homo sapiens
  CDS (145)..(1926)
gaaaaacatactattcctttggtagtccagaaagaaacatcatcttcagataataagaaacagatacctaatgaagcttctgctagaagtgaaagagacacatcagacctagagcaaaactggtcattgcaagatcattatagaatgtattcacccataatataccaagccctctgtgagcacgtgcagactcagatgtcactgatgaatgacttgacttcaaagaacatccctaatggaattcctgctgtaccatgccatgctccctctcattctgaatctcaggcaactcctcattctagttatggcttatgtacctccaccccagtctggtcacttcagcggccaccctgccctccaaaggttcattctgaagttcaaactgatggcaacagtcagtttgcatcacaagaggattcagaaattcagaggttgattacagaaatggaggcatgtatatctgtacttccaacagtaagtggaaacacagatattcaagttgagatagcactggccatgcaaccattaagaagtgagaatgctcagttacgaaggcagttgagaattttgaaccagcaactcagagaacaacagaaaactcaaaaaccatctggtgctgtggattgcaaccttgaattgttttctcttcagtcattgaatatgtcactgcaaaatcaattggaggagtcactaaagagccaggaattactgcagagtaaaaatgaagagctgttaaaagtgattgaaaatcagaaagatgaaaacaaaaaatttagtagtatatttaaagacaaagatcaaactatacttgaaaataaacagcaatatgatattgagataacaagaataaaaattgaattggaggaagccctagtcaatgtgaaaagctcccagtttaagttagaaactgctgaaaaggaaaaccagatattggggataacattacgtcagcgtgatgctgaggtgactcgactaagagaattaaccagaactttacagactagcatggcaaagcttctctccgatcttagtgtggacagtgctcgctgcaagcctgggaataaccttaccaaatcactcttgaacattcatgataaacaacttcaacatgacccagctcctgctcacacttccataatgagctatctaaataagttagaaacaaattacagttttacacattcagagccactttctacaattaaaaatgaggaaaccatagagccagacaaaacctatgaaaatgttctgtcctccagaggccctcagaatagtaacactaggggcatggaggaagcatctgcacctggaattatttctgccctttcaaaacaggattctgatgaagggagtgaaactatggctttaatagaagatgagcataatttggataatacaatttacattccttttgctagaagcactcctgaaaagaaatcaccactttctaagagactatcccctcagccacaaataagagcagctacaacacagctagtcagcaacagtggacttgctgtctctggaaaagaaaataaactgtgtacacctgtaatctgttcctcttcaacaaaggaagcagaagatgcacctgaaaaactttccagagcatctgatatgaaggacacacagctcctcaagaaaataaaggaagcaattggtaagatccctgctgccaccaaggagccagaggaacaaactgcatgtcatggcccatcaggttgtcttagcaacagccttcaagtgaaaggcaatactgtctgtgatggtagtgttttcacttctgacttgatgtctgactggagcatctcttcgttttcaacgttcacttctcgtgatgaacaagacttcagaaatggccttgcggcattagatgccaacatagctagactccagaagtctttaaggactggtcttctggagaaatgaattcagaagaaaattcatcaggtgcttctttttaaaactagaacttggctatattgaatgtgtatttttctttagtgaaatgatgttttatgttattatgtgtgaagtaatatattgtacaagtaataaatgtattgttgagatatattgacactgaggagcttataaaaacaagtcatcttaagttcacaattgctacaagaagaaagttgtggataactaggaaattattgtaagtaatgttttatttcagtacttagcaattagagttcttttattaagatgtatctgctggattaagggtacaggttgaaatagttctgtggctgtcctaagaaataatgggaaaagaatctctggatgtaagtttttctgttgaaactagagggttttttttttctgtttacatatacttttttttaatagcaatgtgtttttattaaacatgctgtgtgccacaggccagtgttgttggtgaaatatataaacatttatttaaagagaaaagttaccagtatctacacctcttaaaaaacattgattggtctaaaaaatatatagataacatcctaagttaacatatggcttcttaaaacttgggcacttttatttgtttttatcccaaattcatgttttaaggcctttaaagaatagtcagactgataaagaagtgctaacagataagctatagttggggaaatttgtgggttttttttaaataagaaatgtttatttttgtccttatatttaaacatgatggaatttgtaaatcttggcattgattgtaattctgcctttttggaagaattttttctcccagcatgttagctgagaatattctctattttataaataatatgaagtaggttggtctctctgcttctctataccaggacttcttagctcagtatcatctcccttcatgtaagcagcacgttttaactcttaggaagctgaatgttgtgttatcactaatactttgtacaggtcacctgcctactctaattgtccttagtacttggacaggctttatcattaaagagtgttctcctaatccc

SEQ ID NO: 14976 - protein, 594 aa, Homo sapiens
MYSPIIYQALCEHVQTQMSLMNDLTSKNIPNGIPAVPCHAPSHSESQATPHSSYGLCTSTPVWSLQRPPCPPKVHSEVQTDGNSQFASQEDSEIQRLITEMEACISVLPTVSGNTDIQVEIALAMQPLRSENAQLRRQLRILNQQLREQQKTQKPSGAVDCNLELFSLQSLNMSLQNQLEESLKSQELLQSKNEELLKVIENQKDENKKFSSIFKDKDQTILENKQQYDIEITRIKIELEEALVNVKSSQFKLETAEKENQILGITLRQRDAEVTRLRELTRTLQTSMAKLLSDLSVDSARCKPGNNLTKSLLNIHDKQLQHDPAPAHTSIMSYLNKLETNYSFTHSEPLSTIKNEETIEPDKTYENVLSSRGPQNSNTRGMEEASAPGIISALSKQDSDEGSETMALIEDEHNLDNTIYIPFARSTPEKKSPLSKRLSPQPQIRAATTQLVSNSGLAVSGKENKLCTPVICSSSTKEAEDAPEKLSRASDMKDTQLLKKIKEAIGKIPAATKEPEEQTACHGPSGCLSNSLQVKGNTVCDGSVFTSDLMSDWSISSFSTFTSRDEQDFRNGLAALDANIARLQKSLRTGLLEK

SEQ ID NO: 14977 - DNA, 2540 bp, Homo sapiens
  CDS (185)..(622)
gaactcgtcatgctctttgtagcgtggtgcttctgttgctcacaggatgtttgccacacgagtcactcgagagaatctctgagtcctggcgagggctttctgaggcttcgtgtattagcagctgttgtcttccaactcagcggcaggacaacttgcctttgatgattttcaagagagttgtgctatgatgtggcaaaagtatgcaggaagcaggcggtcaatgcctctgggagcaaggatccttttccacggtgtgttctatgccgggggctttgccattgtgtattacctcattcaaaagtttcattccagggctttatattacaagttggcagtggagcagctgcagagccatcccgaggcacaggaagctctgggccctcctctcaacatccattatctcaagctcatcgacagggaaaacttcgtggacattgttgatgccaagttgaagattcctgtctctggatccaaatcagagggccttctctacgtccactcatccagaggtggcccctttcagaggtggcaccttgacgaggtctttttagagctcaaggatggtcagcagattcctgtgttcaagctcagtggggaaaacggtgatgaagtgaaaaaggagtagagacgacccagaagacccagcttgcttctagtccatccttccctcatctctaccatatggccactggggtggtggcccatctcagtgacagacactcctgcaacccagttttccagccaccagtgggatgatgtggtctggaactgaaagtgatgcgtatttctgagttatgcctgtatttaagaagctgagtgaaacccaaagaagtccatgataggacagacttctgaaaactaaagacagaaaaaagcttgaaagcatcaagaaagaagtgaaatcttaactagagggaaaagtaactcagatgacagtggatttctctctggaaaccatggaggccagaaggaagtgagacaagttcttttagtgccagaagaactatcaacttgtggctgggcacggtggctcacacctgtaatcccagcactttgggagaccaaggtgggcagatcacttgaagtcaggagtttgagaccagcctggccaacatggcaaaaccctgtctctactaaaaatacaaaaattagccaggcatggtggcacatgcctgtaatctcagctacttgggaggctgaggcacgagaattacttgaacccgggaggtggaggttgcagtgagccaagatcctgccactgcactccagcctgggcaacagagcaagactgcctcaaaacaaaactctgtcaactccaaattcctatttggtgaaatgatccttcaggattgatgggttgcacctggacttgatatgaaggtaaccatcagaaaatcaacagagatcttaaacttgcctaccacagacacctgcaggaatatactaagaatcatcacagtggacctttattgtctcctgagcacccattcattgttctttcagaaacacaactggttttgagaatccatcccttcttcactcagtccacgtaaaggttaggatggtagaaagtgttatacctcttcctccagagttggagcctatgacactgatgacactggcatggaaagccaaagccctacaccaaccagcacacttactggttccaaattgatctacgctggtgtaatcagagtgaatctcagaactttggacagagctgtgagcagagactgactttcctgctgtctccaggtagctgcaaggctgaacagcagcacctactttattaccatcttactgtcattcaaagaaggcagagctgaatgctggagaaaaactgagtaccagcaacagtttttgaaccctgaatattgtcataactgaagctagaattatccctggacttgtttgccactaaaatttccttgttttgcttaccctggtttcagctggcaccctgatcacttgaaaggaacataactgatatactgtcctttgtttttctttccttcctcttctctgcctttgatgattttaaattagaaatctacctgcctctaatctctttaattttctcatttatttactgctgcctattttccaaaacactgcttttcgaatattcctggctcaaaaatctatgtcttcatgacatatgaaacccctagaatccagcctttccccagcttttaatatctcctaattgatttctcaattccagtgaaatgattccatttatttttttcccaaacacatcacaaatattcctaactcttgtgagcaattttctctcattcttctcaacttatctaaatcctaacttttcaaaagatctagctcaagttctgtcttatcatattttgagttcctttctttggcattgtattattttgtatctttccatgtacacatgtgtgcattatctccctgataaaactaactggctagaggataggagtaaagactcaattctaatatccttgttacctaataatacacaaacgtgaaacatgtttgaataaatcactgttaaatat

SEQ ID NO: 14978 - protein, 146 aa, Homo sapiens; identical to SEQ ID NO: 14936

SEQ ID NO: 14979 - DNA, 2903 bp, Homo sapiens
  CDS (144)..(2195)
agactccgtgggcgtaggaccctccgagccaggtgtgggatatagtctcgtggtgcgccgttttttaagccggtctgaaaagcgcaatattcgggtgggagtgacccgattttccaggctgctatccatgtccagggccaaacatgaatcctattgctcttgggagccgctggcttgcttatgcagaaaacaagttgattcgatgtcatcagtcccgtggtggagcctgtggagacaacattcagtcttatactgccacagtcattagtgctgctaaaacattgaaaagtggcctgacaatggtagggaaagtggtgactcagctgacaggcacactgccttcaggtgtgacagaagatgatgttgccatccacagtaattcacggcggagtcctttggtcccaggcatcatcacagttattgacaccgaaaccgttggagagggccaggtgcttgtgagtgaggattctgacagtgatggcattgtggcccacttccccgcccatgagaagccagtgtgctgcatggcttttaatacaagtggaatgcttctagtcacaacagacacccttggccatgactttcatgtcttccaaattctgactcatccttggtcctcatcacaatgtgctgtccaccatctgtatactcttcacaggggagaaactgaagccaaagtacaggacatctgcttcagccatgactgtcgctgggttgtggtcagtactctccggggtacttcccacgttttccccatcaacccttatggtggccagccttgtgttcgtacacatatgtcaccacgagtagtgaatcgcatgagccgtttccagaaaagtgctggactggaagagattgaacaagaactgacgtctaagcaaggaggtcgctgtagccctgttccaggtctatcaagcagcccttctgggtcacccttgcatgggaaactgaacagccaagactcctataacaattttaccaacaacaaccctggcaaccctcggctctctcctcttcccagcttgatggtagtgatgcctcttgcacaaatcgagcagccaatgacattggggaccatcaccaaacgaaccggcaaagttaaacctcctccacaaatttcacccagcaaatcgatgggcggagaattttgtgtggctgctatcttcggaacatccaggtcatggtttgcaaataatgcaggtctgaaaagagaaaaagatcagtccaaacaagttgtagttgagtccctgtacattatcagttgctatggcaccttagtggaacacatgatggagccgcgacccctcagcactgcacccaagattagtgacgacacaccactggaaatgatgacatcgcctcgagccagctggactctggttagaacccctcaatggaatgaattgcagccaccgtttaatgcaaaccaccctctgctcctcgctgcagatgcagtacagtattatcagttcctgcttgctggcctggttccccctggaagtcctgggcccattactcgacatgggtcttacgacagtttagcttctgaccatagtggacaggaagatgaagaatggctttcccaggttgaaattgtaacacacactggaccccatagacgtctgtggatgggtccacagttccagttcaaaaccatccatccctcaggccaaaccacagttatctcatccagttcatctgtgttgcagtctcatggtccgagtgacacgccacagcctcttttggattttgatacagatgatcttgatctcaacagtctcaggatccagccagtccgctctgaccccgtcagcatgccagggtcatcccgtccagtctctgatcgaaggggagtttccacagtgattgatgctgcctcaggtacctttgacaggagcgtgaccctgctggaggtgtgcgggagctggcctgagggcttcgggctgcggcacatgtcctccatggagcacacggaggagggcctccgggagcgacttgccgacgccatggccgagtcacctagccgggacgtcgtgggatccggaacagaacttcagcgagagggaagcatcgagactctgagtaacagctcaggctccaccagcggcagcataccaagaaactttgatggctaccgatctccgctgcccaccaatgagagccagcccctcagcctcttcccgactggcttcccgtaggtaccagcaacctgcttctgactggccagccccctcccctgctggaggaggggagaagccccgctctggtcctacccttcagtctctgctcttccttcatcaaccaccttccccaagcttagtgacagcagccgcccatcctacctggatggagaagagacccttctccaagcacctcagcgcacttgccctctgccacacctgtcggtggaggctgtggccaggagagactgtagaagctcggtccctgtgtatgtttgcatatgacatcctgcattggatccgcttttgtattttttaaccatacccacggtggggcgggtggggggagcctggaacagtgaccagatctgggggcctgagtggggacagagttgatcgtccacctggccattttgaccctgagtggacagtcacagcctcagctcatgtctggctgtgacacacactgcccccagcttcccttggtcagccccactccagcacggggtgaacggaggcccagagtactagggaaggaggaagggaggacatgcctcttcttcctcctttctttccccatctgttcctgggaagagtttgtctttcttatctttaagcccctttaccctggtcctgtactgatcagtgaaggaaaccgtggttactgaggccctgttgaaaagtgcacgtcttgtccaataaatcacgctgcagttggtgtcc

SEQ ID NO: 14980 - protein, 684 aa, Homo sapiens [sequence omitted]

SEQ ID NO: 14981 - DNA, 2103 bp, Homo sapiens
agtaattttcagctcacaaatgatgaagaaatccataacgtcggaacttccttgacctttggatttggcacattgacctgctggatccaggctgcgctgacactcaaggtcaacatcaagaatgaaggacggagagttggaattccacgggttattctgtcggcatctatcactctctgtgtggtcctctacttcatcctcatggcccaaagcatccacatgtatgcagccagggtccagtggggcctggtcatgtgcttcctgtcttattttggcacctttgctgtggagttccggcattaccgctatgagattgtttgctctgagtaccaggagaatttcctaagcttctcagaaagcctgtcagaagcttctgaatatcagactgaccaggtgtaaaccatcagtttttccttgctggtgaggtgggtgtgacagtgggggaggggccagtaggacacactcacaggacttgacatagaacctcatttcacacacacacacacacacacattcatggccacatttgccaaatgagcttttcagggcgagttatttctttaatgaaaaagcacaagcccttatgtgtcgaaatacacgctgttacactgaaaatatatgcacgacagagcaagaagcttgtgcatgatcacttcttatccgtccccttcccagcactccctcctcttcccattctctccacatgtctcaagcaccctaccgagtagggcaggccaaatgttccttgggagtaatgccaactcccgacgttgccttcaggtccaaagggcttggaaccagctcgtgaggaagttctgaatctggcactaatattcttgagtggataatagtgtatcatagaataggacggaaattgtattgagatgtgaccctgtgtcgcctgtggaaaggcatagtgagaagaactttcccacgaaagcccccttcatcgttgttcagtggtcggctgtgtggatcccaggagagacatatgccacagactgtgagagcaaagcccgccgctgtgatctggacttgatgcactgtgtctgagaatgatctccaaatgtgaatatgtgtagggacgtggtctatcaggcctggaacaagatgggggcagtgaaggtatggtttagtgtttgctttcatagtatgccatgtacaatgttttatatttcatagtttcttttaagtaactaccatgagtctctctaagcctcatggacaaagatgtagaccaaatgcaagagctgagcttgctttgggttcaaccatgatcaaagaaaaactgaggtcacctgcaggcttacgtgggaagctaagaaaatatcacagaaaaatggaaagaaatatggatgtgcagaggtaataaaaagagctgctgctggacatttatcaaagataggcaccttacagtatcttgttgcaagtccaaatcaggggagactttgttaatatgtatcttttgctcaaatttagtagggttttttttttttttggattaagggcttttcaaatttggaatttgtagaagccaattaaaagaatacccttcctaaaaaccaaattgacacagctggcccccctgctagccaacccgcagttcccagttcccacctgctgagagttcagaactcagaccgtaggtgtgggcttatgagactgtgcttcatgaagaaaagcagaattccaaattcaaactgttggagtgagccaagtggacagaccctccatgagtgcactttcttccaagaaatccccagatttaccccatagaggtctgggattacctggaatataatatgaaaaacattttttaggctgggtgtggggctcacacctgtaatcccagcactttgggaggctgaggcgggcggatcacctgaggttgggagctcgagaccagcctgaccaatgtgaagaaaccccgtctctactaaaaaaaatacaaaattagcctggtgtggtggcgcatgcctgtaatcccggctactcaggaggcggaggcaggagaatcacttgaacccgggaggcaggttgcggtgagacgagatcacgccattgcactccagcctgggcaaaaagagctaaaaactccatctc

SEQ ID NO: 14982 - DNA, 3473 bp, Homo sapiens
  CDS (120)..(2675)
tggggcagaaaagtaatacagacggagcactgcagaaaccttcaaatgaaggtgtcattgaaataaaagcaactaaggtctgtgaccagaggaccaaatgtaaaagtcgctgtaatgaaatgctgccaggcacgtcaacaggcaataatcaaagcactatcactctatcagttgcttctcagaacttaactttcaccagcagcagctcaccacctaatggtgactcaatcaataaagaccctaaattatgcactaaaagcccaagaaaacgactgtcttctacattgcaagagacccaggtgcctcctgtaaagaaaccaattgtggaacagctttcagcagctaccatagaagggcagaaacaaggcagtgttaagaaggaccaaaaggttccacattcagggaaaacagaaggttcaacagcaggtgctcagattcctagcaaggtatcagtaaatgtcagttcacacataggagcaaatcaacccttgaattcctctgcccttgttatcagtgattcagctttggaacagcaaacaaccccatcatcatctccagatataaaagtaaaacttgaaggaagtgtctttctcttggacagtgattcaaagtcagttggcagctttaatccaaatggatggcaacaaatcactaaagattctgagtttatatctgccagttgtgaacaacagcaagatatcagtgttatgacaattcctgagcactctgatatcaatgacttagagaaatctgtttgggaattagaaggaatgccacaggacacatatagccagcagctacatagccagatacaggaatcttctttaaatcaaatacaagcacattcttcagatcagttacctctgcaatctgaactgaaggagtttgagccttctgtttcccagacaaatgaaagctactttccttttgatgatgaacttacacaagatagtattgtggaagagctggtgcttatggagcagcaaatgtcaatgaacaattctcattcttacggcaactgtttgggaatgacccttcagagtcagtcagtaactccaggagctccaatgtcatctcacacttccagcacccacttctatcatccaatccacagcaatggcactccaatccacacacccacacccacacccacacccactcctactccaaccccaaccccaaccccgacatctgaaatgattgctggatctcagagtctgtcacgggagagcccttgctccaggctagcccagactacacctgtggatagtgctttaggaagtagccgacatacacccattggtactccacattctaactgcagcagtagtgtcccccccagccctgttgaatgcaggaatccgtttgcattcactccaataagctccagtatggcatatcatgacgccagcattgtctcaagtagtcctgtgaaaccgatgcaaagacccatggccacacaccctgacaaaaccaagcttgaatggatgaataatgggtatagtggggttggtaattcatcagtttctggccatggtattctcccaagctatcaggaactagtggaagaccgtttcaggaaacctcatgcttttgctgtgcctggacagtcttatcagtctcaatccagacatcatgacactcattttggtcgtttgactcctgtctctcctgtgcagcatcaaggtgccactgtaaataacaccaacaaacaggagggttttgcagtccctgcccctcttgataataaaggaactaattcatctgccagcagcaacttcagatgccggagtgtgagccctgctgttcatcgccaacgtaatcttagtggaagcaccctctatccagtatctaatatcccacgatctaatgtgaccccctttggaagtccagttaccccagaagttcatgttttcacaaatgttcacacagacgcatgtgccaacaacatagctcaaagaagccaatcagttccattgacagtcatgatgcagacagccttcccaaacgctcttcagaagcaagcaaacagtaaaaaaataaccaatgttttgttgagtaaacttgattccgacaatgatgatgcagtgagaggtttgggaatgaacaacctgccctctaattatacagcccggatgaatctcactcagattttggaaccttccactgtttttcctagtgccaacccacaaaatatgatcgattccagcacttctgtttatgagttccaaacaccatcttacctcaccaaaagtaatagcaccggtcagatcaatttttctcctggagataatcaagcacaatcagaaattggagagcaacaattagatttcaatagcactgttaaagacctgttgagtggagacagcttgcaaaccaaccagcagctggtaggtcagggagcatctgatctcactaatactgcatctgatttctctagcgatatcaggttgtcttctgagctctcaggcagcatcaatgatttgaacactttagacccaaatctactgtttgatccaggtcgtcagcagggacaagatgatgaagctacactggaagaattaaagaatgacccattatttcaacaaatttgcagtgaatccatgaattctatgacttcatcaggttttgaatggatagaaagcaaggaccatcctactgttgaaatgttgggttaaattgtgttttataacatgtagcacactgtatctaaagacatatgtattgtatttgtcttaatggaagtgcctcccgcagcagaaatactattaattgtgacattttaaaagcgtttgctgcagaagtggtttcttcagtaggaaatggttagacttgcctcagttcttaacaagtgtctaaagacagtaggctgtagaagaacaagtattaggttttaaattttataatgtgccccatttattcacattgattgactatccagctgttacaagagcagtcgatctttattttgtgtaagttagtttcatttcatcagatgatctgcacagaactcagaataaaccatcaattttaggtataggctgttttgttgttggcattatcttttagatataaaatcatagctagggtgaaccgtagacaagaaagtcttccttgaaacagggataatattcaggttattataaatatttaggcttgaagcatagagctactgtagggtgaaaaatctctgtaggactttctggggcttcagtaccatttacacccacgatgaagggcttaaatagaaaataatggaaaattaaatattactttaaggaaagcaaagctgcactaaaatttttaagggaaaaaaaacaagtagccatttatatttgtgaccttgcattaatatttaaatgttgattttaatatggagctagcacacatagatgcgcaggcacgcacacacaaaacaagcaaatgtaactccaggcatttgtaatttaatataataaatacaagcatgttag

SEQ ID NO: 14983 - protein, 852 aa, Homo sapiens
MLPGTSTGNNQSTITLSVASQNLTFTSSSSPPNGDSINKDPKLCTKSPRKRLSSTLQETQVPPVKKPIVEQLSAATIEGQKQGSVKKDQKVPHSGKTEGSTAGAQIPSKVSVNVSSHIGANQPLNSSALVISDSALEQQTTPSSSPDIKVKLEGSVFLLDSDSKSVGSFNPNGWQQITKDSEFISASCEQQQDISVMTIPEHSDINDLEKSVWELEGMPQDTYSQQLHSQIQESSLNQIQAHSSDQLPLQSELKEFEPSVSQTNESYFPFDDELTQDSIVEELVLMEQQMSMNNSHSYGNCLGMTLQSQSVTPGAPMSSHTSSTHFYHPIHSNGTPIHTPTPTPTPTPTPTPTPTPTSEMIAGSQSLSRESPCSRLAQTTPVDSALGSSRHTPIGTPHSNCSSSVPPSPVECRNPFAFTPISSSMAYHDASIVSSSPVKPMQRPMATHPDKTKLEWMNNGYSGVGNSSVSGHGILPSYQELVEDRFRKPHAFAVPGQSYQSQSRHHDTHFGRLTPVSPVQHQGATVNNTNKQEGFAVPAPLDNKGTNSSASSNFRCRSVSPAVHRQRNLSGSTLYPVSNIPRSNVTPFGSPVTPEVHVFTNVHTDACANNIAQRSQSVPLTVMMQTAFPNALQKQANSKKITNVLLSKLDSDNDDAVRGLGMNNLPSNYTARMNLTQILEPSTVFPSANPQNMIDSSTSVYEFQTPSYLTKSNSTGQINFSPGDNQAQSEIGEQQLDFNSTVKDLLSGDSLQTNQQLVGQGASDLTNTASDFSSDIRLSSELSGSINDLNTLDPNLLFDPGRQQGQDDEATLEELKNDPLFQQICSESMNSMTSSGFEWIESKDHPTVEMLG

SEQ ID NO: 14984 - DNA, 2781 bp, Homo sapiens
  CDS (146)..(1378)
ttgtcttctgcagctgactcaggtcattgatgtttgctccaattttctcataaaacagctccatccttcaaactgcttagggattcgatcatttggagatgcccaaggctgtacagaacttctgaacgtggcacacaaatacactatggaacacttcattgaggtaataaaaaaccaagaattcctcctgcttccagctaatgaaatttcaaaacttctgtgcagtgatgacattaatgtgcctgatgaagagaccatttttcatgctctaatgcagtgggtggggcatgatgtgcagaataggcaaggagaactggggatgctgctttcttacatcagactgccattactcccaccacagttactggcagatcttgaaaccagctccatgtttactggtgatcttgagtgtcagaagctcctgatggaagctatgaagtatcatcttttgcctgagagaagatccatgatgcaaagccctcggacaaagcctagaaaatcaactgtgggggcactttatgctgtaggaggcatggatgctatgaaaggtactactactattgaaaaatatgacctcaggactaacagttggctacatattggcaccatgaatggccgtaggcttcaatttggagtcgcagttattgataataagctctatgtcgtgggaggaagagacggtttaaaaactttgaatacagtggaatgttttaatccagttggcaaaatctggactgtgatgcctcccatgtcaacacatcggcacggcttaggtgtagccactcttgaaggaccaatgtatgctgtaggtggtcatgatggatggagctatctaaatactgtagaaagatgggaccctgagggacgacagtggaattacgtagccagtatgtcaactcctagaagcacagttggtgttgttgcattaaacaacaaattatatgctattggtggacgtgatggaagttcctgcctcaaatcaatggaatactttgacccacacactaacaagtggagtttgtgtgctccaatgtccaaaagacgtggaggtgtgggagttgccacatacaatggattcttatatgttgtaggggggcatgatgcccctgcttccaaccattgctccaggctttctgactgtgtggaacggtatgatccaaaaggtgattcatggtcaactgtggcacctctgagtgttcctcgagatgctgttgctgtgtgccctcttggagacaaactctacgtggttggaggatatgacggacatacttatttgaacacagttgagtcatatgatgcacagagaaatgaatggaaagaggaagttcctgttaacattggaagagctggtgcatgtgttgtagtggtgaagctaccctaaagctatctatctttatcaaatggaatgaaactagataatttcaagaaactgagtaggacaaagggagaaagaaatacatgttctttttcctgcaattaataatcagactggaaaattgttgtatcattttaatttgtagttacaattgctttcattcgtgaagccgaaacgtttttaaacatgaattacatatgaattattaagcatatgtgctttcgcagctgataatataaaaggaaatcccacagtctagatatagccccattactacaaaatgctaaaatatttaatgaaaattgatggtggccacagtgtgcaggttataaaagcattaatacatttcaaggtaagagccttaaaagttaaaaacattttcagtttttttttaaaaaacgtactcttattatctggaacatagaaatataaaaggtaacatctaaagcttagaatagtgtgatttttagtaagccattattctcctattcaaataatatcccaaagagctaaacaattccttacatttaccaagaggaaagcttttactgtgttgaggctaaaaaaaaataatggctctttgacaaaacttgttatgttgatcgcggtatgtcaaaatttttacaggtttgctcatctgccagagcacacatataaatttggtatttcttaacatattatcttgttagatttgttaccagtaaaatattactgtaatttcatatacacagtctatacaatgaaataatgaatatttatcatattgatacaaactgtgacctcagcttcagagtgtcagggcctcacttgtatagaatgtaatgttctcctcaaacatttatgttaactctataaacaaatatcgttaagttaaacaagttttcaaaaacaaaacaatttttaaagtaccttaaaattgaggatgttactcagtgttaacacatgggaacaccaaaatattcaataagcctggtcaattctatagttatcttttttgtaccaacacatgcttttctgttactgttatattatccagtagaaaatgttaggatatgtgtgctatataaaaaaaaaaaaagacttgttaagttttaaaataacaaaaatggctagttgaatagtattttatgtgtaattcttccatttattctgtttaattatacaactaagatgaaatattgaaaaaccctttgtgaaagtaacttttcaagtaaatgcacaactttagaatttctacaaataagttcttttaaacagtctttttattgtggattgtgaaatcaaaatctggagaaatgcttataaaatatactactagcttttaagttttaagaaagaagaacgtaagttgtacaaagatatttgtactttgacaaactgaatttaaataaactttatttcctctc

SEQ ID NO: 14985 - protein, 411 aa, Homo sapiens
MEHFIEVIKNQEFLLLPANEISKLLCSDDINVPDEETIFHALMQWVGHDVQNRQGELGMLLSYIRLPLLPPQLLADLETSSMFTGDLECQKLLMEAMKYHLLPERRSMMQSPRTKPRKSTVGALYAVGGMDAMKGTTTIEKYDLRTNSWLHIGTMNGRRLQFGVAVIDNKLYVVGGRDGLKTLNTVECFNPVGKIWTVMPPMSTHRHGLGVATLEGPMYAVGGHDGWSYLNTVERWDPEGRQWNYVASMSTPRSTVGVVALNNKLYAIGGRDGSSCLKSMEYFDPHTNKWSLCAPMSKRRGGVGVATYNGFLYVVGGHDAPASNHCSRLSDCVERYDPKGDSWSTVAPLSVPRDAVAVCPLGDKLYVVGGYDGHTYLNTVESYDAQRNEWKEEVPVNIGRAGACVVVVKLP

SEQ ID NO: 14986 - DNA, 2327 bp, Homo sapiens
tttcctaaaattctagaatcccttaaaaaaaaaaaaactcatgtaatagtactcataaagtctactcatgattctccaacctccaggctggactggacttagcccagcctaaaagatgaaagtgtgtgtgtgtgttacatatagataacatatgtgttatatataggtattacacataacatctatataaaagtatactttttttggtccacattaaaaggattcaacaatctttttttactaaccccagacatcatacttccaaaagcacatctttaagatcctgctactgaaatttgaatttgttgtctaagctcattagagatgaaaaacaactgctcgtcatttacaattcatcagctggttcggagtaagaaaatctctctctctttctctctgtctctctgtctgtctgtccgtctctctctctctctctcacacacacacacacagagagagagagagagagagagagagtgcgagagagaccattataccccagccttatttctaacttaaattctaacattagatttgatgcagatattttagctgctaacaggaagtgttatctccttttctatgagatgcctgggcttccctaaagtggtgctcatctttttttttttttttttttggctataaatatatgaaagagtctgtcaagagtgcctgcagggaatgaaagtgaaagtgcagtaaagagcaagtttatgagttggcagcttgagtgactggctcctaaacagggacccatctgttctggggttgccttgtgattctctctcgtggatgccgtgcctgcctggagtcctcacatgcaggtggccagctgacaagggatgacactggtgagcctgccggtgtgtccagaccctcttaggtgggtttctgtgcagaatttcccccagatccggctcttcagaaattgtcagtagtaaattatccttagtaaatgtggacatgccactttagaaatcatgtgactccaaaacccatgactatttccaactccagcttttgagaaccaaatgccttctcaagtctcttcaagcccagaaggcaggctttacctcatctctaaagaatctacagagttggagctaaaaaaaaaaagattttttcacaggttgctttattttattttctatttaccctcccacaagcaatgacatgcttgacatgtccgttacatgtcaagcactggcagaaagactggggagatggaggtgagtaagatgcagcctaatcctcaagaagctcacagcccagtgaggaaagcaaatcaagaaattgtaattctgtgtgtcaaaagcaatcatgggtgaatattcataactcatcctgaagccagtgcaggggcaggggcagggacggccttgcagagaagaaactgggctgagtttgaaggctgattaagaggtaatcaattattaattctcagagaaggtgatgatttaaaaaaaccaaaaaagtaaaagaagaggtaatcaactaaaagaggggctgaagcagggcagcagcaggaggaagacaggcaggagtgtgtgtttctaatagacggaaaagcatgttcaaagggccagaggcagatcctgtaagggagagggcatctcagagttaaccatacattcagtatggctggactattatgtgcaagaaccacagagttcagagggaggtaggcaagggccagatgctgaacggcttgcaagtggggcccagagaaaagaggcaacagcccgagccacaccatgacaagaggtggccacaggagattccctgtgtgaggctgtgccggcattgcacaaggcttcttaattattgcatttgccattaggaggacaatatttttgtcattgaacatgtcctacaccttgtaggaaatccagcaatcctggcccctggcatcaatgccagtaacaccctctgcaggccctgtagcagcatcagcccccagacattcccagaagttccccctaagaaccactgcccaggagaaggggacagagaaaggggagcctcctatgagaattcccctagtgattccctgtggaggtggttcccacatcatcactgccaggggctaccaggctcatctgcccgaggagagaaggagaaagaggagattggcacagtggggtggccctttgacctctggtggaaaatcagcatctagtcatggagctccataaatcaatctgtctttctcactgtctctctctcatggtccttcccaaagcccctccctaccaagactttcttttttggttttgttttccaaagcaacatggcattcacgcagggcctggtaatgaaatgagatt

SEQ ID NO: 14987 - DNA, 2282 bp, Homo sapiens
tctttatgctttcggatttctaaatgagagagtcatccagaaactcgaggggtggagagcatttgtcagtgactgtcctttggtccccaaggggctcctcagtgggtttctcctgagggtctgtgactactctcctgtcacagaagctgctcctctctggcactgtcttgtccttctccactgacctctgggattgactatccttctcagcaggggtgactgtgacactcctggctgttccttctcagtcttggctggtccttcactcctagctggtccttctccacaactgggacactctgctatgcttggttttgaactagtgacagcctctcccttccttttcggcattgatttccctggatgccctggttagcctccaggtagatcattgtggagccctgatgtcgaagtctatccgtcttccttttctggaccttgttgggttcctcagtcgtatcattctgactctcagcttcagttgcaaattaagagttcatggaattacgagaactatctttggaatcagccttaaagctgcaggcttccttttctagagaagctatttcttctagaaagggattggtaggatgtggaggggttccccctgacgaaaggaatccctgagtgctctgaatcaggcagcctttggtggcggccccgcccacacctgtgcccgaggaatgccggggaggaatgtaagagttaaagaaaggaaagaaacaggaaaagcggctcaacagtcaaagacaggtttgttttggacaataaacctgagagggccttctggccgagttaggtcagagtcactctctcttacaggctaagagtatttaagggttcagggcagaagaggttatcacaggcttggaatgtttctgtatctcttcgccttgcttatctgggagggggaggttttgtgtctgttcccatacaactccctgcagctgcagggataccccccccccccacctcctagtctgcttttagcttgtctatcttagcgcatttaaagggaaaggaatgtgcttattagggcctacttttttactggggcccatttttgggggcccatttacactcccaaaacatgagtgtgaagttcggtggttacccaagagacttgggtgcccagctgtgcccagctgtcttatctgtgttttactgtctactctttctggctgctttttgttagaagtgatttccttgaaacgtaagaagttagaaagggagctggaactgaaaatgggggtgtttgtccaagatgacggtgctcctgctctgtcattccagaccctatagttataaaaggaccaggggcgacgcgttctttctggttacttcctgctgggtgggagaggtagagagtcccttggtctcggattgactgcgggagcaatgccgtctgtagatgttttggatagttgtctgtgaaatagccatgctcctgtcagttaagaatctttgaaaaaggttaattaggcagggtaaaaacattagtcctaggcttattattaggagagggcccaggaatgggatgacccatggtatgctttttgttcccaaaccaataattcatttggttgttttggtattcgcttagcattttagccctttgtttgagatttttagcagcctctcttacgagacctgattggttgagatagaagcaacatttctttcccaatgagaggcagaggcacatgtttggaaagacccatgtgttattttttattagtaactgttattcctgctgtaaggatagtaattaagcaaaatgctacggtaattgagattgtctgtctgatatcctaccctcagggtgctgcagtacatagtcctactgcaaatagtccagtaaagcagttcccgcaagggtggcatggtaaataatttccataaataagctttaatatttggcttaaaaggagaggtagaaatgacaaaaagtacttggtgaggtaagagtgagactgagtcagatgagtaattgtcactcagttagttattttttatgattttcaacttaagatttcttatttctttacattgatatttaggacgttcctctgggctgttgggattgcttcctcagcttttcaggctttgacttgagtgtgatgtatgcaggggttgattcctgtaacagatgtaatttaaactgtcgaaaaccataaaaattgaaaaacatcagtcaagactagaatttaacaggtgtgctatagtttttgaaacctaattttctctctccagtttaccatttttattaaaagacaaatcat

SEQ ID NO: 14988 - DNA, 2308 bp, Homo sapiens
  CDS (27)..(1139)
aagcgtcgcacagcgactgcatcaccatggagccgagggcagtaggtgtctccaaacaggacatacgtgaacaaatttggggctacatggaatcacaaaatttagctgactttccccgacctgttcatcacaggatacccaactttaaggggtcttatctggcttgccaaaacatcaaagacctagacgtttttgccagagcacaggaagttaaagtggaccctgataaaccactggaaggcgttcggctgctggtgctgcagagcaaaaaaacattgttggttccaacaccacgactgagaacgggattgtttaataagatcacaccaccccctggggcaactaaagacatcttgagaaaatgtgccacctctcagggtgtgaggaactacagtgtccccataggcttggactccagagtcctcgtggatttagttgtggtgggatccgtcgccgcttctgaaaaaggctggagaatcgggaagggagaaggctacgccgatctggaatatgccatgatggtatccatgggcgccgtcagcaaggagacgccggtggtcaccatcgtccacgactgccaggtcgtggacatccctgaagagcttgttgaggagcacgacatcactgtggactacatcctcactccaaccagagtcatcgccacaggctgcaagcgcccaaagccaatgggaatcacctggttcaagatcagcctggagatgatggagaaaatccccatactgaggagcctccgcgcccgagagcagcaggctgggaaggatgtcaccctccagggtgagcaccagcaccttccggaaccaggctgccagcagacagtgcccctgagtgttggcaggaggcccccggacacacccggaccagaaaccaattccatggaggcagcccctggctccccaccaggggagggtgccccgcttgcagccgatgtttacgttgggaacctcccccgggacgcccgtgtgagtgacctgaagagagccctgcgggaactcggctccgtgcccctgcggctcacctggcagggcccgcggcgcagagccttcctccattacccggactctgccgcagccagcaggccgtctcctgcttgcagggcctgcgcctgggcaccgacaccctgagggtggcgctggccaggcagcagagggacaagtgacctcgtggacagccacggagctcactgcagactcgccatccccgtcccctgccgctccggttccgatggcactcgagaggcctgcgtggcaagacgtgtcggagccaccgcctgagctgctcgggtctcaattcttctcagaagtcaccgctcagtgaacgcccaggccctcctgtgagtggggaagccgccctgcggttcatctcacagcgcgcagagactgcagcctcccaatcgtgcaggctcgggccttgagtcggtttctgtttctctggagggacagagcagaggggccagggactgagtgagtggctaagcaggggagggtgatgtgaaggtgatctcgagtttgccaggggtgggctgaacaggagaagatgaacaaaggatccggctctcaaaaggccctggcagggactggatgctgggtacagaagcgcgcccttgggcttcaggctcctgagctggcagcacggcagggagagctccatccatgtcgcaggagcccaggaagctcagcccctgggtaaaaagtgctcactgcagctcagatcagtcctcaggtcacatttcggggagccagcctcccctcttcccctccccagccccgctcctccctctgtggacacactccgggccctcagccagctggctgcatgaggagcagctttgtgctgtgggagagaccggctctgggagaatgggtttcatcccagcctacgtcacatttgcccagtgccttatgttttctgggtttttcttcctccagttctgtttctaaaaaccagcttgagtttggctgaactgtcctttctcaacagaagcgcttttgcaattgatcccgggcaacaagtcaaaataagcttttaagtggagattttgtttttttcaaatgtatatgctttggaaattttgattttttagccagagggttttaccaagtgttctttgaagcacattacgatgcctcgagagggcggcccgtgcacgcgctttcaagaaaatgttctcgggacactcggtcttctctttgaaaggacattttctcattggttttgccgtgaaaatcctgtggagacttcgcaaagaaaacgcagccttacatttgctcattaaagacagatttccttc

SEQ ID NO: 14989 - protein, 371 aa, Homo sapiens
MEPRAVGVSKQDIREQIWGYMESQNLADFPRPVHHRIPNFKGSYLACQNIKDLDVFARAQEVKVDPDKPLEGVRLLVLQSKKTLLVPTPRLRTGLFNKITPPPGATKDILRKCATSQGVRNYSVPIGLDSRVLVDLVVVGSVAASEKGWRIGKGEGYADLEYAMMVSMGAVSKETPVVTIVHDCQVVDIPEELVEEHDITVDYILTPTRVIATGCKRPKPMGITWFKISLEMMEKIPILRSLRAREQQAGKDVTLQGEHQHLPEPGCQQTVPLSVGRRPPDTPGPETNSMEAAPGSPPGEGAPLAADVYVGNLPRDARVSDLKRALRELGSVPLRLTWQGPRRRAFLHYPDSAAASRPSPACRACAWAPTP

SEQ ID NO: 14990 - DNA, 3192 bp, Homo sapiens
  CDS (172)..(2781)
atgcgcggcgcggctggagcggccggacagtccggcgtccgggaacgctcaggagccggaggagccggaaagcgccgggacccctcgcggggcctctgagcggcgcgggcggacccgagcccccagcccgctggcgccgctgcccgccaggccccgggggcggcggccaagatgtccgtgcctaacgtgctggccaaagcgctctatgacaatgtggccgagtccccggatgagctctccttccgcaagggtgacatcatgacggtgctggagcaggacacgcagggcctggacggctggtggctctgctcgctgcatgggcgccagggcatcgtgcctgggaaccgcctcaagatctcggtgggcatgtatgataagaagccagcagggcctggctccggccctcccgccaccccggcccagcctcagcctggcctccatgccccagcgcctccggcctcccagtacacgcccatgctccccaacacctaccagccccagccagacagcgtctacctggtgcccactcccagcaaggctcagcaaggcctctaccaagtcccgggtcccagccctcagttccagtctcccccagccaagcagacatccaccttctcaaagcagacaccccatcacccgtttcccagcccggccacagacctgtaccaggtgcccccagggcctggaggccctgcccaggatatttaccaggtgccaccttctgccgggatggggcatgacatctaccaggtccccccgtccatggacacacgcagctgggagggcacgaagcccccggcaaaggtggtggtgcccacccgcgtggggcagggctatgtatacgaggccgcccagccggagcaggacgagtacgacatcccgcgacacctgctggccccggggccacaggacatctatgatgtgcccccggttcgggggctgcttcccagccagtatggccaggaggtgtatgacacaccccccatggctgtcaagggtcccaatggccgagacccgttgctggaggtgtatgacgtgccccccagtgtggagaagggcctgccaccgtccaaccaccacgcagtctacgacgttcctccatcggtgagcaaggatgtgcccgatggcccactgctgcgtgaggagacctacgatgtgccccccgccttcgccaaggccaagccctttgacccggcccgcaccccactggtactggctgcgccccctccagactccccgccggccgaggacgtgtatgacgtgccgcccccggctcctgacctctacgacgtgccccctggcttgcggcggcctggcccgggcaccctgtacgatgtgccccgtgaacgggtgcttcctcctgaggtggctgatggtggcgtggtcgacagtggtgtgtatgcggtgcctcccccagctgaacgtgaagccccggcagagggcaagcgcctgccggcctccagcaccggcagcacacgcagcagccagtctgcgtcctccttggaggtggcagggccgggccgggaacccctggagctggaagttgctgtggaggccctggcacggctgcagcagggtgtgggcgccaccgttgcccaccttctggacctggcaggcagcgccggtgcgactgggagctggcgtagcccctctgagccacaggagccgctggtgcaggacctgcaggctgctgtggccgccgtccagagtgccgtccacgagctgttggagtttgcccgcagcgcggtgggcaatgctgcccacacatctgaccgtgccctgcatgccaagcttagccggcagctgcagaagatggaggacgtgcaccagacgctggtggcacatggtcaggccctcgacgctggccggggaggctctggagccacccttgaggacctggaccggctggtggcctgctcgcgggctgtgcccgaggacgccaagcagctggcctccttcctgcacggcaatgcctcactgctcttcagacggaccaaggccactgccccggggcctgaggggggtggcaccctgcaccccaaccccactgacaagaccagcagcatccagtcacgacccctgccctcaccccctaagttcacctcccaggactcgccagatgggcagtacgagaacagcgaggggggctggatggaggactatgactacgtccacctacaggggaaggaggagtttgagaagacccagaaggagctgctggaaaagggcagcatcacgcggcagggcaagagccagctggagttgcagcagctgaagcagtttgaacgactggaacaggaggtgtcacggcccatagaccacgacctggccaactggacgccagcccaacccctggccccggggcgaacaggcggcctggggccctcggaccggcagctgctgctcttctacctggagcagtgtgaggccaacctgaccacactgaccaatgccgtggacgccttctttaccgccgtggccaccaaccagccgcccaagatctttgtggcgcacagcaagttcgtcatcctcagcgcccacaagctggtgttcatcggggacacactgtcacggcaggccaaggctgctgacgtgcgcagccaggtgacccactacagcaacctgctgtgcgacctcctgcgcggcatcgtggccaccaccaaggccgctgccttgcagtacccatcgccttccgcggcccaggacatggtggagagggtcaaggagctgggccacagcacccagcagttccgccgcgtcctaggccagctggcagccgcctgagggtggtgaccccaggagggaggcaggggaggggtgcggcggtcccagctccctggctcccatgtcaagagtcgctgtgccacaggcttagggacaggaccccagctctgcgtcggtcctggtgccctggatgcccaggaatctgtatatatttatggccgggcagggtgtggggccatgcctcctcaggagccgaagcccaggggccggccagtggccttccccagcatgcaccacgggcccgggttgggtcaccagacggggctggagtgtgagggtcctgcagcctgcaggacctcgtgccaccccgagggctgagcctggtcccacgagggtgccgtgtcccctgacagggccagtgcagtttggtgtgtcctccgcctttccaggagaagaacctgaagaact

SEQ ID NO: 14991 - protein, 870 aa, Homo sapiens [sequence omitted]

SEQ ID NO: 14992 - DNA, 2245 bp, Homo sapiens
gaccctgtttctctagccgtgcagctgcaaggtcactagacagaaaaactcaagtcataaacatgttttttcttgaaagggcagtagtcagaaaagaaaggaactgatcttggacttgaagaaacagccccagaggtgaaagagatagtcgttaacctgcacagcctctttccagcctcttcacagataacaagggctttcggaacaagaaacttgtatattctgtgcagctcaaataaaattaagaagctgaacatcagttgacaaagagtaaaaaataactgggagttgacgggaaaataaactgtcgtttatgaaaatgtagcttattccagaacaccagatttcaaaagatacagaatcctgttgctccacaattcaatttgtcctacaaaaagcaaatatagtaaatagaagttgccaacactgaagagaagattaacaaatctgagcatcccaatggagcagacaacatgttcagaccatccaaagatccaaatggcaggtttgatcactccaattgacaccaggtacaagccaggtaatgtagtaatcatgggatcccactttaaaatgaaagaaaatgaagtaaaagcaagaggtaataggaacaagacaggcacaaatatgtcaagcccaagtctcatctccagcaacaatcagaaattttgagaagttattctatgacaagattaagtaagtccttggcagaacaggattcgtttttcctattttttgcccccggaccagcttagtgatggttcaggtagcagcaaccaataaacaacaacaacttaaaatctatttctattttccaagaaatgttctttaaaagcctttattttgataaataaactgcaaatgttccagtttttaaaagcatggaaacattgtttgggactcttaagtttaggaaaacatttggaccacaggctccatgatgacagctaacataaactgagacagaaattgttgccaaaccctctgtattaacgttacaatatgccctatagtaaagattattgtcattttgcagatgagtaacctgaatttctgaaactcagaacatctccaagatcacaaaactagtaaatcacagcaccaagatttaagatcagatctttctctaaaacagactttatatttctagccagtaccctatattgtgtcaccagagaagcaggggatgcttattttgatatttatatgtacatacttgcacagtcaaatatatactcaaaaatgatgtgacttgactggttgccagtttatccagttaacagttcactaaaaatacccagggaaggaatttgtgattataaattgtcactttttggtagctgaagatccctccagtccaccctatcccacccctaaaatgcacagtgaggtgcttgacaggtgagctaaaggaaagttttctggtatttccaaggagcacccgaatgcctttaatcctaaaacaaggaaagacaaagtgggatcgatatcgtcagctgccaagaggagggctcagttccccgttgagtattctcccagatcactccttcctggaggacagatctgctgtttattcattcatttaataaatatttcacagatctcagagacaggaacaaaagactatacccagtttctttcatgttctgaggcttgagggggtggaacaggacgagtgaagtctaaggatgggaggacgtggggacgctgggacctctcaggcctctcctggggtggggacaggttggggaccccacctgggaaagggagaaatggccctcacagtagcgctgcgcctgaggcaggtggaagatctcgtccatgtagggctctcgcaacgcccggctgaaggcggagaagaggaggcaggatactaaaaaggtagctcaaggcggccgagaaatagtaaccttccagctgcgccattccagctcccacagccactgcccaagaacctactcctggaaaattctgagcctggaaacccgagctggaaacttgggctcgaaatgggcgcgctaggcgggactagccagacggggccacataccggaaggcaaaggatgctgggagagcgcggatccggaaagatcgggtcgctgtttcccggagtgacgggtttagataacggaccggatgattaccctctcaatcgcattgcccggggcgcacaaagtgtcaaaacttccggaaggggcgggtctcggatttcgccagcgcgggaggtgcgtggcttgctgcttag

SEQ ID NO: 14993 - DNA, 2522 bp, Homo sapiens
ctcccagggcatagaattactgagttagaagaaataactggtttatttttacataggatgtgatgtctaatattgtactaaaaatgaggatgcttatgctatactccactggtactatccactggatttatttattttttttattttttgagacggagtctcgctctgtcgcccaggctggagcacagtggtgcaaacttggctcactgcaagctctgcctcctgggttcacaccattctcctgcctcggcctccagagtagctgggactacaggtgcccgccatcacacctggctaattttttttgtattttttagtagagacgggggtttcaccgtgttggccaggatgccctcgatcttctgacctcatgatccacccgcctcggcctcccaaaatgctgggattgtaggcgtgagctaccgcacctggctgtttttgtatttagatagagtttaagtgcaaagtaatctgctgatttaaggttgttttaaattcatatctgaggaataaaggatggacaggcaatttccatccctttgatgttccataattctagctatttatatcattcatttgccccttcagcatggattggcttacacctgtaatacgttccagaatagctggatttcttttgttttcccatcggtgattttcatagagtagatgctcaatgacatataatgcagaaaggccaaaaatagaggtaagtaaagctatgaaagaaaagaagaacgaaagaggaagcagagtagtttgattttgtttattgctgcttaaaccagagagatatgttattctggaagggtgatttgcttgtttttacacatatgcagcctgactgttttaggcttggcttcttttttgtttgtttgagatggagtgtcgctcttgttgcccaggctggagtgcagtggcacgatctcggctcactgcaacctccgcctcctgggttcaagggattctcctgcctcagcctccccagtagctgggattacaggtgctcgccaccacacccggctaatttttacatttttagtagaggcggagtttcgccatgttagccaggctggtcttgaactcctggcctcaggtgatccacccacttcagcctcccaaagtgctgggattacaggtgtgagctatggcacccggctggcttatttcttataggctttgggccgttgctaattttccagctgatataatacaatccagctttattcgaaagataagtattctaactcttgttcggtgtttattcaaacttgtgtttgcatgtatttgtttggactataaattttgagactatagtgagtatgtttttgactataatattttaaatggaagatgaaatttaaattagtatttgcttgtttctttttacaataaaataggtagctttgcagtttggggagggctgttttccatgattgactgtagtatggttcaagtcagaggaaaggaagatccctggaactccatcacaagtggtgccttaacgggagccatactggcagcaagaaatggaccagtggccatggttgggtcagccgcaatgggtggcattctcctagctttaattgaaggagctggtatcttgttgacaagatttgcccctgcacagtttcccaatggtcctcagtttgcagaagacccctcccagttgccttcaactcagttaccttcctcaccttttggagactatcgacaatatcagtaggacttctttcctaggatttctttaacagaacgagttgtggttcgagaaggatttcagaagatcaagttacagtctgtttttaaaaccataggtgggacagctatggccaataggctataaagagacatttagcacttttttctatttaaaggaacaagcggggaagggtgctaaaagataatacgtttatttattcacacttgaattgcatttgtgatcaaaataaatgtttaaatcgctaaaggaaaatacagtaagtgcttgaaagatgaaggaccaaaaggccaaaaaacagtgaaatatgatcatcatttccttgcggacttctctgcctggttttgtgtgttctgttattcaaacaataaaaagctggtggaacttactctttcttttaagataagttgtagacttcgatgtttcatgctcatgtacttcaaataatgcatgttttatagttagtccctcatcacttgaagtgacttctgagaattatgcagagtcaacatggatcatttcacagtgagatgctttatggattgaaggatatggtaaaatgtttatagtttactttgaaagtaaaatatactatgtcttggttttgaggatattggatacaaaactctcttcctttagggctactgagtcttgattcctgatcatcagaaatttcaccagaaacaacttgcttccaatatacccaattctatatgaagaattcatggagagtgtactggcactggaagagtttagtgtttcttgtatgcttgaaaataaagtatgtactgttttgaatgtg

SEQ ID NO: 14994 - DNA, 2107 bp, Homo sapiens
  CDS (211)..(1461)
gcgtctgcgagaccgacttggacggagccgagctgaggctcggcttcctgctgatggtcagggttttggcaactccccggtgtgagaggggtagggagtgctcccggcggcgacggggccgagttcaccagccgccggggcagtagtcgaaggcccggcgcggcatgtcctgggtgccgcggtgcgggcagtgaacgcgcgccgggcgggatgggccggcgccgggcgccagagctgtaccgggctccgttcccgttgtacgcgcttcaggtcgaccccagcactgggctgctcatcgctgcgggcggaggaggcgccgccaagacaggcataaagaatggcgtgcactttctgcagctagagctgattaatgggcgcttgagtgcctccttgctgcactcccatgacacagagacacgggccaccatgaacttggcactggctggtgacatccttgctgcagggcaggatgcccactgtcagctcctgcgcttccaggcacatcaacagcagggcaacaaggcagagaaggccggttccaaggagcaggggcctcgacaaaggaagggagcagccccagcagagaagaaatgtggagcggaaacccagcacgaggggctagaactcagggtagagaatttgcaggcggtgcagacagactttagctccgatccactgcagaaagttgtgtgcttcaaccacgataataccctgcttgccactggaggaacagatggctacgtccgtgtctggaaggtgcccagcctggagaaggttctggagttcaaagcccacgaaggggagattgaagacctggctttagggcctgatggcaagttggtaaccgtgggccgggaccttaaggcctctgtgtggcagaaggatcagctggtgacacagctgcactggcaagaaaatggacccaccttttccagcacaccttaccgctaccaggcctgcaggtttgggcaggttccagaccagcctgctggcctgcgactcttcacagtgcaaattccccacaagcgcctgcgccagccccctccctgctacctcacagcctgggatggctccaacttcttgccccttcggaccaagtcctgtggccatgaagtcgtctcctgcctcgatgtcagtgaatccggcaccttcctaggcctgggcacagtcactggctctgttgccatctacatagctttctctctccagtgcctctactacgtgagggaggcccatggcattgtggtgacggatgtggcctttctacctgagaagggtcgtggtccagagctccttgggtcccatgaaactgccctgttctctgtggctgtggacagtcgttgccagctgcatctgttgccctcacggcggagtgttcctgtgtggctcctgctcctgctgtgtgtcgggcttattattgtgaccatcctgctgctccagagtgcctttccaggtttcctttagcttccctgcttcctgggaatcaggagcctggacactgccatctctagagcagagtggaggcctggactccctttgctcactccattcgggtccacagctgaggttgcctctgacaagatgaatgggcactgcctgcccttctagtgaaaaggcttggctatggccctgtgtgactccaggtcccaggaaccttgccttcgtcatctgtggatccatccagaacagcggtatctgaagcccaggccatactccctgcctcctttcttctgcctaccagaggctccagagttgagcttgtccttatctagaaacatgtgaagatgcccaagagcctggaggcactgctgtccttcctgcagaaacagtttctcctcctcccctcagccttgtggccagttcctcttcacatgaagcccctggcatttgctggggaagggactggcctggtacttgctgttagggcaggaaggggcaaaaggaagacttgggtagtaatctgggggttcagatgggtagcactaagccagctggcctaaagatgcaataagttcctaggtagtctacccttaccttgaggaatgggaaaatgaacctcagcccattaggcaggaaaagttgatatttaataaacaaggaaagagtg

SEQ ID NO: 14995 - protein, 417 aa, Homo sapiens
MGRRRAPELYRAPFPLYALQVDPSTGLLIAAGGGGAAKTGIKNGVHFLQLELINGRLSASLLHSHDTETRATMNLALAGDILAAGQDAHCQLLRFQAHQQQGNKAEKAGSKEQGPRQRKGAAPAEKKCGAETQHEGLELRVENLQAVQTDFSSDPLQKVVCFNHDNTLLATGGTDGYVRVWKVPSLEKVLEFKAHEGEIEDLALGPDGKLVTVGRDLKASVWQKDQLVTQLHWQENGPTFSSTPYRYQACRFGQVPDQPAGLRLFTVQIPHKRLRQPPPCYLTAWDGSNFLPLRTKSCGHEVVSCLDVSESGTFLGLGTVTGSVAIYIAFSLQCLYYVREAHGIVVTDVAFLPEKGRGPELLGSHETALFSVAVDSRCQLHLLPSRRSVPVWLLLLLCVGLIIVTILLLQSAFPGFL

SEQ ID NO: 14996 - DNA, 2776 bp, Homo sapiens
  CDS (2)..(1441)
gatgcacttttggttctattatgccacccttttacctggcttccaaagaactgtgggtatagcagattccaattataattggttttatggtccagaaagccagctagttttcttggataagttcatcttaaagaatggagctgaaaattggttagctcagcaaattagaaagcaccgacctaaagatggaccgatggttccttcaactgcccaaaggtggagtactcttcacactgaatacatctggtatgatccccagctcacaccacagccacctgctgattatggtactgcaaaaatacacacattccctaactggggtgtggttacttatggggctgggttgccaaacacacagaccaacacctttgtgtcttttaaatctgggaagctggggggacgagctgtgtatgacatagttcattttcagccatattcctggattgatgggtggagaagttttaacccaggacatgagcatccagatcagaactcatttacttttgcccccaatggacaagtatttgtttctgaagctctctatggacccaagttgagccaccttaacaatgtattggtgtttgctccatcaccctcaagccagtgtaataagccctgggaaggtcaactgggagaatgtgcgcagtggcttaagtggactggcgaggaggttggtgatgcagctggggaaataatcactgcctctcaacatggggaaatggtatttgtgagtggggaagccgtgtctgcttattcttcagcaatgagactgaaaagtgtatatcgtgctttgcttctcttaaattcccaaactctgctagttgttgatcatattgagaggcaagaagattccccaataaattctgtcagtgccttctttcataatttggatattgattttaaatatatcccatataagtttatgaataggtataatggtgccatgatggatgtgtgggatgcacattacaaaatgttttggtttgatcatcatggcaatagtcccatggccagtatacaggaagcagagcaagctgctgaatttaaaaaacgatggactcaatttgttaatgttacttttcagatggaatccacaatcacaagaattgcatatgtcttttatgggccatatatcaatgtctccagctgcagatttattgatagttccaatcctggacttcagatttctctcaatgtcaataatactgaacatgttgtttctattgtaactgattaccataacctgaagacaagattcaattatctgggattcggtggctttgccagtgtggctgatcaaggccaaataacccgatttggtttgggcactcaagcaatagtaaagcctgtaagacatgataggattattttcccctttggatttaaatttaatatagcagttggattaattttgtgcattagcttggtgattttaactttctaatggcgtttttacctttcttttagaaaactaatgcgatggatattaatacttgttattgccttgtggtttattgagcttttggatgcgtggagcacttgtagtcagcccatttgtgcaaaatggacaaggacagaggctgagggaagcaagaagtctttgtcttctgaagggcaccacatggatcttcctgatgttgtcattacctcacttcctggttcaggagctgaaattctcaaacaactttttttcaacagtagtgattttctctacagcagggttcctacagcctacattgatattcctgaaactgagttggaaatcgactcatttgtagatgcttgtgaatggaaggtgtcagatatccgcagtgggcattttcgtttactccgaggctggttgcagtctttagtccaggacacaaaattacatttgcaaaacatccatctgcatgaacccaataggggtaaactggcccaatattttgcaatgaataaggacaaaaaaagaaaatttaaaaggagagagtctttgccagaacaaagaagtcaaatgaaaggcgcctttgatagagatgctgaatatattagggctttgaggagacacctggtttactatccaagtgcacgtcctgtgctcagtttaagcagtggaagctggacgttaaagcttcatttttttcaggaagttttaggagcttcgatgagggcattgtacatagtaagagaccctcgggcatggatttattcaatgttgtacaatagtaaaccaagtctttattctttgaagaatgtaccagagcatttagcaaaattgtttaaaatagagggaggtaaaggcaaatgtaacttaaattcgggttatgctttcgagtatgaaccattgaggaaagaattatcaaaatccaaatcaaatgcagtgtccctcttgtctcacttgtggctagcaaatacagcagcagccttgagaataaatacagatttgctgcctactagctaccagctggtcaagtttgaagatattgtgcattttcctcagaaaactactgaaaggatttttgcctttcttggaattcctttgtctcctgctagtttaaaccaaatattgtttgccacctctacaaaccttttttaccttccctatgaaggggaaatatcaccaactaatactaatgtttggaaacagaacttgcctagagatgaaattaaactaattgaaaacatctgctggactctgatggatcgcctaggatatccaaagtttatggactaaatgctgcaggtcagcagaaatttgcactaataatacttaccaacccactttgtggatatgaat

SEQ ID NO: 14997 - protein, 480 aa, Homo sapiens
MHFWFYYATLLPGFQRTVGIADSNYNWFYGPESQLVFLDKFILKNGAENWLAQQIRKHRPKDGPMVPSTAQRWSTLHTEYIWYDPQLTPQPPADYGTAKIHTFPNWGVVTYGAGLPNTQTNTFVSFKSGKLGGRAVYDIVHFQPYSWIDGWRSFNPGHEHPDQNSFTFAPNGQVFVSEALYGPKLSHLNNVLVFAPSPSSQCNKPWEGQLGECAQWLKWTGEEVGDAAGEIITASQHGEMVFVSGEAVSAYSSAMRLKSVYRALLLLNSQTLLVVDHIERQEDSPINSVSAFFHNLDIDFKYIPYKFMNRYNGAMMDVWDAHYKMFWFDHHGNSPMASIQEAEQAAEFKKRWTQFVNVTFQMESTITRIAYVFYGPYINVSSCRFIDSSNPGLQISLNVNNTEHVVSIVTDYHNLKTRFNYLGFGGFASVADQGQITRFGLGTQAIVKPVRHDRIIFPFGFKFNIAVGLILCISLVILTF

SEQ ID NO: 14998 - DNA, 2884 bp, Homo sapiens
  CDS (72)..(2075)
aatatgctttagatggaactaatgttgctattaatattccaaggctcttacttgacaaaattgagaaacaaatgtttcagttgcacataggaaatgtttatgaggctggaaaactgaacctcttaacagttattcagttattaaatgaagtcttgaaggtgatgaaatatgaacgttgtcaggctgatcaagcaagattgacggtagaccttcactaccttgaaaaagagaccaaatttcagaaggaaagattatcagatctgaaacatatgaggtatagaataaaagatgatctcacaactataagacattctgttgttgaaaagcaaggagaatggcataaaaagtggaaagaatttcttggtttgtctcctttcagtctaattaaaggttggactccatctgtagatcttttaccaccaatgtctccccttttgtttgatcctgcctcagaagaagtgtatgcaaagagtattctttgtcagtatcctgcttcacttccagatgcacataagcaacataaccaagaaaatggttgcagaggagacagtgataccttgggagcgctacatgatctagccaacagccctgcctctttcttgtcgcagtcagtttcatcatcagatagaaacagtgttacagtacttgaaaaggacacaaagatgggaactcccaaagaaaaaaatgaagcaatttctaagaaaataccagaatttgaagtggaaaattctccattatcagatgttgcaaagaatacagagagtagtgcatttggagggtctttgccagctaaaaaaagtgatccatttcaaaaagagcaagatcatctggtagaagaggttgccagagcagttttatctgattcaccacagctctctgaaggaaaagaaataaaattagaggaactaattgactctctgggttctaaccccttcttaacaaggaatcagattccccgtactccagaaaacttgataactgaaattaggagctcatggagaaaagctattgaaatggaagaaaacagaactaaagaaccaattcaaatggatgctgaacatagagaagtattgccagaatcattacctgtgttgcacaatcaaagagaatttagcatggctgattttctcttagaaaccactgtatcagattttggccagtctcatttgactgaagagaaagttatttcagattgcgagtgtgtgcctcagaaacatgtgctgaccagtcacatagatgaaccaccaacacaaaatcagtcagatatgttaaataagaaagtaatttgcaagcaagatttggaatgtttagccttcaccaagctttcagaaactagccgaatggagacattctcccctgctgtcggcaataggatagatgtgatgggtggcagtgaagaggagtttatgaaaatattggaccacttagaagtttcttgtaacaaaccttccacaaataaaactatgttgtggaattcttttcagatatcaagtggaattagttctaagagttttaaagataatgattttggcatattacacgaaactctcccggaagaagttggtcatctaagttttaatagttccagtagttcagaggccaattttaaactggagccaaatagtcctatgcatggtggcactcttctagaagatgttgtgggagggagacagactactccagaatcagactttaatttacaggctcttcgcagtagatacgaggctctgaagaaatctctttccaagaaaagggaagaatcttacctctcgaattcccaaacacccgaaagacacaaaccagaattgagccctactccccaaaatgtacaaacagatgatacgcttaactttttggacacctgtgatttgcatactgagcatataaagccatctttacgcacgtccatcggtgaaagaaaacggtctctttcaccactaattaagttttctccagtggaacaaagattgagaaccacaatagcatgtagtcttggagaactacctaatttaaaggaagaagacattttgaataagagccttgatgcaaaagaaccaccgtctgacttgacaagatgaagacgtacccatttaatataactatgatgcacttaaattgaagctatgccacaggatagaaaatgaattacaacttaaatacatgttggaagtgtaacactgtttttcaaggtttaaaaaaattcctaatgccttttagccttctttaatatttttaggtaaggaaagtatgtttggattttttcctctttgtaggtatatgagattgaaatgtgaagtatttggacaacaaacgtcaagcaatgggaagccattttgatttcttgagtaatcttgtaagcattaagtgaatgacaaagtagtagtgtaacttatttcttatgttataacttcagtcaattaatataaggatagtttttgttgtatgttcactaaatggttaatataatagccattgaatatactaatctttcatcttagagaactatacaacttttattgtttcttaatggaacattctggctaaccagaaaaagtgagaaaagtagtaccttgggatgtgtagtcaagatgacaaattttaagactggaaaagctctaaacaggcttaatgattcttcaggtagaatgatcctgagaagtgatgtttgatggaataaagtgcatgtgatgattaagtgaagactggggcagaatgatttaaaaaaaggaaaaagatggaagatgagtagacacttgcaaggaacactgtcaaactataaatccattcagtgggttgtataacatttatatttagtctaatttagactttgataatttaatgctacttttatattttaacaaaaatataaattaaaattttcatt

SEQ ID NO: 14999 - protein, 668 aa, Homo sapiens
MFQLHIGNVYEAGKLNLLTVIQLLNEVLKVMKYERCQADQARLTVDLHYLEKETKFQKERLSDLKHMRYRIKDDLTTIRHSVVEKQGEWHKKWKEFLGLSPFSLIKGWTPSVDLLPPMSPLLFDPASEEVYAKSILCQYPASLPDAHKQHNQENGCRGDSDTLGALHDLANSPASFLSQSVSSSDRNSVTVLEKDTKMGTPKEKNEAISKKIPEFEVENSPLSDVAKNTESSAFGGSLPAKKSDPFQKEQDHLVEEVARAVLSDSPQLSEGKEIKLEELIDSLGSNPFLTRNQIPRTPENLITEIRSSWRKAIEMEENRTKEPIQMDAEHREVLPESLPVLHNQREFSMADFLLETTVSDFGQSHLTEEKVISDCECVPQKHVLTSHIDEPPTQNQSDMLNKKVICKQDLECLAFTKLSETSRMETFSPAVGNRIDVMGGSEEEFMKILDHLEVSCNKPSTNKTMLWNSFQISSGISSKSFKDNDFGILHETLPEEVGHLSFNSSSSSEANFKLEPNSPMHGGTLLEDVVGGRQTTPESDFNLQALRSRYEALKKSLSKKREESYLSNSQTPERHKPELSPTPQNVQTDDTLNFLDTCDLHTEHIKPSLRTSIGERKRSLSPLIKFSPVEQRLRTTIACSLGELPNLKEEDILNKSLDAKEPPSDLTR

SEQ ID NO: 15000 - DNA, 2971 bp, Homo sapiens
  CDS (1885)..(2769)
attttatcaatttgtaatggctaacaaacttggatagcaagtactagaagattttatgattattcagggacatattttctagcactgaatatgtgccagacattgtcctaggtgctagagctatagtgataaacaaatcagatgaaagtagaaatccatgccctaaagaacttaatgtttcaattgggaaggtcaagtcagataggttaaaaggcaaacacagtagcactgtagacattactatataagctttatggcaactagtgtttgtgcagtgctttacagttagtaaacagtgttcacgtaccttatctcacagtggctttgtgggtttgacaaagtagcaatcctcatctcataggtgaggaaactagggctctttaagattagataatctgtctaatagcatccagccaggtggtcatctgactctaaatcctttgaagtcttacttatgctacagtgcctttctttttcctacagatattgttaggcataattcatcatctagcaagtccagaatcatctttccagagttccagctcattcataataacatgtttcagaaatcagggtcctgtattagttacgtttttcttaaatggagacggaatcaaatgtgactgcatgtagtttttctgttctcatttggcctattttccaagagtaaggttagtagatggctatttgtagcagtaactggacagcatctgtccagtgggacagctggagacttgtctttagtatttggtaatgctgacttatgtgctgcttaatcttttgagtcttgatggatgtattagatttctattgttgtgtaacaaattaccacagaatcatcagtttaaacaacacacatgtattatgtgtttgaaacattattatgtatctgtgggtcagaaggatgggcacagcttaactaggtcatctgcttaggtctcactagactgcaattaaattgtcagctgatatgagttcttatctggaggcttgaccatggaagaatctgcttaagctcactcagactgttggccacattgatttccttgccatcgtagtaggactgggggccccagattcttgctggttgttggctggaggctgccctcagtgtctaaaggctgtttgcagttccttgctatgtgggcttcctagcacgcctgcctacttcagcaagccttcaaggagagtctctcgagtgagtcttccagccagcagcagtgctaatgaaaagcatagtcactggagggacatcatacctcttttgccatattctgttggttagaagccagtcacactcaaggggaaggattatataagggcatgaacttcaggaggtgcgggtcacagggccacttttggatctgtttgccacagtaagaaccttcattggtcccacagagatatactgaggaccactatatccctggaacagaagcaccagtgatacaaagatgagttggtcccggcctgtgttaaggggcctgcctgcgtctagggatgaagactctaagcaggtcactaccctaccgtggggaaagcgctctagcagaggtttgtgcacaggcttctctatggggactgtaggaaagaatgcttttgtctggaggagccagaaaggctttgtaaaaggtgtgcttttgagggcctcaaagagcaagtaggagtttgataggtagagaagaggatgggctaccaggtagcaagaagggtgtgtgttggtactaggtctgtgtgagagaattatgagtaagtgcagtgaggcgtaagcagacagtgttagaggattctggggcgtgactgtattctccaagtgtttgcactgttcttcatttttcacgtttttatgtcataggtggagctatatacctttctggaattgacatgatacatggcacacccgtactagacatcaagccctacatagctgagtatgactcaccgcaaaatgtgatggagcctttagcagactttaatttacagaataaccaacatacaccaaacactgtgtcccagtctgacagcaagactgacagctgtgaccagcgacagctctcagggtgtgatgagccacaaccccaccatagcactaagaggaaacctaaatgtcctgaagacagaacttcagaagaaaactacctgacacacagtgacacagccagaattcagcaagcatttcctatgcacagggagatagcagtggattttggtttggaatcaagacgtgatcagagttccagcgtggcagaagaacaaattggcccatattgcccagagaagagcttttcagagaaaggtacagacaagaagctagaaagagtggaaggagcagcagtcttgcaaggaagcagggcagagacacagcccatggcccctcactgccctgctggaagggctgatggagctccccgcagcgtggttcctgcctgggtgacagaggctcctgtggccactttagaagtgcggtttactcctcatgccgagatggaccttgggcagctcagttcacaagatgttggtcaggcgtcatttaaatattttcagtcagcagaggaagcaaagcgtgccattgaggctgtgctgtcagcggatcctcggtctgtgtaccgccggaagctttgccaggaccgccttttctactttaccgtagacatagcgcatgtcacttgctggtttggtgatggctttgcagaggtgctgaggatcaagccggcttctgagcctgttcatatgactggccctgtggggtccttggtgtctctagggtcttaaggagcctccctcatgtctttaaggtagcatcattgatctttggatgtggcttttggattttctgaacaagctaatgttgtgtcgagaagcaacactttgtgatctcatggctttgattgatttgggctgttcaaaatgtttatttgaaaaacgtatacattaataaacttaacaaagagatataaaatacagagaaatc

SEQ ID NO: 15001 - protein, 295 aa, Homo sapiens [sequence omitted]

SEQ ID NO: 15002 - DNA, 3112 bp, Homo sapiens
  CDS (234)..(905)
agccggggattgccggcgccaggtgctgggggcgactcggacagcgggagcgtggggtggagtaggatggagtctccctcccgagctgggggtgtgggcctaggaaaggctgcttcgccgctgtgttcggagagctctggatactgcggggcttttccgcggaggagcgcccgccggcatctgcatctgggaccgacctcctgggctggctgatcaaagaggaagcagcagcaatgtctgctgtgggggctgcaactccatacctgcatcatcctggtgatagtcacagtggccgagtgagtttcttgggggcccagcttcctccagaggtggcagcaatggcccggctactaggggacctagacaggagcacgttcagaaagttgctgaagtttgtggtcagcagcctgcagggggaggactgccgagaggctgtgcagcgtcttggggtcagcgccaacctgccggaggagcagctgggtgccctgctggcaggcatgcacacactgctccagcaggccctccgtctgccccccaccagcctgaagcctgacaccttcagggaccagctccaggagctctgcatcccccaagacctggtcggggacttggccagcgtggtatttgggagccagcggcccctccttgattctgtggcccagcagcagggggcctggctgccgcatgttgctgactttcggtggcgggtggatgtagcaatctccaccagtgccctggctcgctccctgcagccgagcgtcctgatgcagctgaagctttcagatgggtcagcataccgctttgaggtccccacagccaagttccaggagctgcggtacagcgtggccctggtcctaaaggagatggcagatctggagaagaggtgtgagcgcagactgcaggactgacccctcacttgaccagtcccattcagatccggcttggacaggcacctgagatggtgccaaagtgcagctgactcttcccacgacagccctgcccttcccatgaggcaggctcttcaagcgatatctgaagtggctctgatgcctttgccacactcctcgcatctctgggacatcccttccgcactctctccctgactttcaagaggctgacaatccaggccgctgcttcccagctccttacatccctggggtgcgtccttggtgaaggtcttgggaaccacagtctcctcattcaaacagttattttggaaggtaaagcctgtcactttcagcccgggactgcccagatgactgtctaaccagacctcagaatcagaaacgtctccaaagccaggattctgaggaaagtcctgtggggagattctgaccactgtcccataggattctgattttaggatgtccatgtcctcacaggcctgctcattttcagtcctaatcgtagaatctgaaataaacaggaacaaagacgttccttaggccctgtgctcagagaaatgataagactacaaatgcgggggccagggctcaaggctcccaggatagttgcactgagcactgtgaggccccaggtggaaacgtgcaagagaaggcagagcctttgacagttctcaaaagtggtttcatactttttaccttgttcactcattcgatagcaatgaatgttcattgctggggcagggctgggttctgtgagcagagaggtccatcctacaggcactggtgtggggcacagtccatgcagaggcaaaggagacaaagcaagaccagaagggtgggaagctaccacggattgggctgcggggtcaggggctccagcatccgagctggcgaggaaacagtacagggtctgagttctgaatggagagcatggattgtgatgaggaaacaaggctggaagagctgccaagggacttactacgtgagctcagaagagcactgggcacctaggccgttcatggctactccctggggtgggcttctctgagcaggacccagccccctcagctgcctcctggctgctgctgccaacttgcacctggccacctcccctgcttctccctgggctgtgcgtggccacctctaagaccacactgacttcttccctggggctgcaagtttctggaggcccccaggaggccttccagacatctgcgttccttctggactctccaagtaagcacaggcttctgtcctactctgtaaccctagagggcacctctgctgaggtcagacatctccttgatgtctgtgatcaaaccatgacaggatgcaaccacaacacacggctatgatcatgacaaccacggtccccaccacgacacaatcacgttcacaaccacaaccacgcagccacagggtttcaccgtgttggccaggatggtctcgatctcctgacctcgtgatccgcccacctcggcctcccaaatcgctagaatggccggcgtgagccaccatgcccggctccacggcccctacttttcacaactttggactgtccaacttgcttcccgaggcccctacaagccggtggcctctgtaggacctggtcctgccctgctgcaggagtgacggtgatgacccagcagcaactgaaagggaggtgaggggcttcctttctgcagctgagatgcacgcagacccatctcccttgtcatgctgggcagcccaccggctaagcaggggagcagagcaccaggccgggcgcctgcccagcaggagctgatgccggaggcagtgggtgccctggttagggctgaggaccccaagataggctgaagtcctaacttgaagcacctcagaatgtgaccttgtttggaaacacagtcgttgcagattaattagtcaccatgaggtcactggggtggcccctaacccaccatgactggtgtccttctaaggagatggccacatgaacacagacacgcagggagaaggcagccgtgtgaaggagtcggagatcagagtgagggacgcaaccacaagccaaggaacccaaggactgccagaaaaccaccagctgcccggagaggcaggacaggatccttccctaaagccttcacaggggggcacggccctgcttgctgaccccccggtttcagatttccggcctccacagctgtgagacaataaatttctgttgtttt

SEQ ID NO: 15003 - protein, 224 aa, Homo sapiens
MSAVGAATPYLHHPGDSHSGRVSFLGAQLPPEVAAMARLLGDLDRSTFRKLLKFVVSSLQGEDCREAVQRLGVSANLPEEQLGALLAGMHTLLQQALRLPPTSLKPDTFRDQLQELCIPQDLVGDLASVVFGSQRPLLDSVAQQQGAWLPHVADFRWRVDVAISTSALARSLQPSVLMQLKLSDGSAYRFEVPTAKFQELRYSVALVLKEMADLEKRCERRLQD

SEQ ID NO: 15004 - DNA, 2601 bp, Homo sapiens
tacaggctctgtgctgattgcaaggcactcttgagagaaattcattcttattttgcagaagaagaactgaaacttcattaagtcattaagcaacttgctcaggtggtggaactgagctttaaatatggactttttccagtctcaattcagcattatactaggctgcctccatgtgtttttcaaagccccattcaagttttacttctatggtaaactaattttacatacacaaatcttttcattttctgaacttcctttatggctttactgtcaccccactagtatttgatgtcttagctattaactaattcctgattatttcacttgtcacatcaggaaccctatcctcttagttctcccattgagatttcactgctggactaagattattcttgattcgtagtcattggtttctgtttccattcattttcagcactgattatgttaatcgtattgcttgagttttttctttgttcaatgttgtttattacattcattttgtttcatatacacacattttttttttttaactggcattttgaggacattggtttaatggaaggaaaaaggaatggtgcaaagcacatggtatttgaattccaaagaccttgaccctcagcattagcaagtcacttgttttctgagcctcagttttcttactctcaaatgaggtaatatccgaaagtactttgacaacacactaaagcctgatgcagatttcctttttgaagtaattgtgctgtttctattcatattggatatggtattctatggtattggctatagatacatacattttaaaatgttatttaacagcatgtaaatgttcatttcatgccatgtgatcatgttcccctttatgattttttaaggctgtcttacaagcctaacagtgtactaagtcattaaaagatatatttaaagtaaaatagtctcttttctcaagtacaagctaagaaatgctcataataataaaataagagaatgtagaatgaggagttagagtgtatatgtatgtgtatacaatttttgatagatggtattttgttatttcatatctgtgttgaaaacagtcttttagtttgtcagacatctttttcagtacctgctatgtgcaggcaggtattgagaaaggtctgagaatactgagggttaataagagatggtatattctccagagaaataaataccactaaagtataagagcagatgtcctttttggaagaatgcctgtggtgatggaataagaaaagccatatagaggggtgaggaaaagcttttcttaccaagtgtgtgagctgagttttggaggatgattaggcaagagttagttggcctggtggagaaacaggagccagacattcagctggaggaacaggagtgtggaacagtgtgggtaacacaatggggtgtgtctggtttcagaattataagaaatagtctttagggggaacagaaatgaaggagactaaatagatgatgataaattatctgtgaatatgtactggttcctacatattcaaagtgtgctaagtttgtacagccattacttgtaaggttctaggagttgtctctctaggggttggtttgtaccatagtccattatgtacatctagaacaattctttctttcccggaactgagcccaaggtgggctttctacagtgcacctctggctctggggcagctcaagcaatcagaaagaactgaggcactggtagaaaacaactctgaggatgaacaggataatgttcctgaagtggaatgtggtatcccttcatggttaaatggttgcatacttcagggtcacctatggaaaggtgtcctcagggtagctaaaagtggttaatttccttgtgttttgacttacagatcatttctaggtggacttggggaaaataaagttacttataaaaatattgcttcattggcatttggaggtgttgtattgaaggaggaagtgggttcctatcaccagaaccctctctaggtgtttcagataggaaactgggttgtagaccttgtcccagtaatatctccagcagctccaacacattttgtcaacttcgtattcgttttttaagtttttttccttgctgttggccacctttaccttcttttttttttttttccttctttttcccttattttttgagacagtctcactctggcgcccaagctggagtacagtggggtcatatcggctaactgcaacctccacctcccaggttcaagcgatgctcctgtaatcctagctattcaggaggctgacgcaggagacttgcttgaatataggaggcagacgttgcagtgagccgaggtcacaccattcactccagcctgggcaacaagagcgaaactccgtttcaaaaaaaaaaaaaaatgacttggacttgtggtgaggggaggtcatctgtagactcctggacctgtttttgccttacttattctctaaagactgaaatatttcctaaaatgtatgggcactgtttaccagaaagtaccttagttaaaacataaaatcatttatgccttataaagctatattttttcaattgctttactgagtcataggaggctaataaatttgtgtaaattgtct

SEQ ID NO: 15005 - DNA, 2825 bp, Homo sapiens
atgatttacatttcaagatttcagttacattttttaaggaattcaacaattctgcatcatgaagtattctttcacacaaatgttccatagtcattagtttttacagaacccttttcttatattctgcatttcatctggaatactataagcacaagttcagtttggcattctgttctccactagtgattgagtttgaagcccaaggtcaggatattgattgatgacatttccctttaaagtatttgtatccatttgcaatttggggacagagtgattcccagtatggtgcaggaaataactaaactggaagtcagcctgactcagttttgtagttaattttctttgtgaccttgggcatgtcacttaaccttccaataactgagggagttggcccagaactagcacagtcttctaatgcagacattccacgattctctagggaggattcacttccatagaggtttaaaagtggatacatttttaggttaaatggctttgttcatttagtttttttctccttaacccattttggagcaataagactgtcatggagtaaaaccaaattacctggaactctcaaaaggctgcagttcttatcctattttttttatttttaagggaagggaaaaaaatggcaacaaacaaatttatatccatgagtcaggacaaatccatcccagttttctaacatacacagtgtacataaacatattcaatgaagcactgcagattcttaaccgaaaatggaatatttggtttgacttaccatcctaaatgtgggaagaactgtactttgatatatactttttgagtatttttagcaaaaattgatataagcagttgtcttggttggcaaggacttgtgtataggaacctggctcccagctcagtgacgagtgtattctgtaactttgaataagtcactgaacctttctagatgtcagtgtcctcagctgttagatttgatactgttctgattactaacagatctgtgattagacatttccatgcatttatttcaggcctcttcctgttctcttccttgagagattaacaaatatacccaccccttccctcacacagtctcaggcaattattgatttgtgagggaaaaggggtattttaaaacactttaaatgatacattcaagaaaattatctcgtattggttatcaattgatatataacaacattaccacaaacttagtgccttaaaataatacacatttattatcccacagtttctgtgagtcaggaggagtctgggcacttcttagttgggtcctttgcaaggctgcaatcaagatgttgtcctgggctggggtctcacttacacgcttgactatggaagcataagctactgagcccactgtgattgttggtggaacttatttccttgcagctggaggactagagggacttaatgtttttgctggctaggggctgccctttgctccttgaggccacccacatatccttgtaatgtgtgcttccctaacatggctgctggccccctcagaagcagcaagggagagaacaaggcagtgctgcagtcttttggaatgtaatcacataatcatgtatacataatcatgtatgtccatcatctttgctctactctggttaaaagcaagtcacaggtccctcccacgctcaaggtgagatgatcacacaagggcattgacaaccaggaggcaagggtcatgggggccgtctgaagcatctgtcagccacaccatatttcaggttttttttttttctgtatcttcctttggatctgtgaataagtatctcacttcatactaaagcctcaataagcactgattgacagaaagtctttgtgctcatttaaaacttctcagctccacagagtatttgtaccatgcccttgttttatggagtccccagatactgatgagggcagggtttgagtttgagggctgttcattcttctgcccgccaaccccccaccccgcccccagcacagaactgccagtgttaggtgctcattaagtgtttgtcaaaggattataactgttgttccaattgcagcagtaagtaaatttgaagaagctccctgatattgagtgaattgtattctccaccccccaaattcgtatgttgaagctctaacctccaatgtgatggtagtcccagctaccagagaggctgaggtgagaagattgcttgaagccctggagatgaggctgcagtgagccttgattgtgccactgcactcaacctgggcaacagagtgagaccctgtctgtaaataaatatgtgtgtacagacatacataaggttcacaattcaatttaaaaaagagaaagtgaccatctacaagccaggaagagagcccccaccagaaccctatcatgctggcaccctgatcttggatttccagcctccagaactgtgagaaaatcaggttcgcctgtttaagtcacccagtctttggtatttcgttatggtggcctgagctaagacaggccctgtgttctctgtgtagcaagaggcaggaagctagcacaaaggttgccagatagcagggactggctggctgttagtgagccagggccagtggcatttaattgcagtcattcccattctttgctgagctttggtcataactatttgtagaggacccctagacttttttttttttcttccaggacaaaagtgatccaaaacatactgtcttcagtttttgagcattggactaccaaacaggaacatttaaggaaaacaaaatgttgctgttgtaaagccttgatggtgggaagttatgtagtgaattctcaatttcttcttcctgcatcttgtctt

SEQ ID NO: 15006 - DNA, 2164 bp, Homo sapiens
aaatgaaaccagacccagatcaatattttaggatactagatgttttaatgggttcagaatccagtttgtaggaagattttttaatggttttggttgctcctcccccagctgccaccccccaccttacccttattcctctctgtccacattttctgccccaccttacttctcctccctgacagacatccagcccctagtaatacttaaggcactatggcacttagctttgaagtgacactaccctgtcttccttccgcccgctggtgggtaaccagtgccttccctgtaacggtaatgctgcagaactgcaaccttttgtacctttctttggggaatggggtgggggtgggagaggaggtagatggggaagaaataccccagacccaacaaacctccagccagaaagccagctattttgcatttgaaggaattgacttcctcattcattgagctttttaaaagatcacaacctcaagatggttaaaatccattgacatttgcactttcaaacatgacaagtctcggagctgctgagatgacaggcccctggcctttccacttatgcctccttttctccttattcctcctacctcccgccccgcccaggtctggagttactttcatagcatttttcactcttggcttcttttctcccttgatggtcaagtctcttatgtttcaatatttcttaactggggtgtcttataacaaaaaactcttaggtctaaaatgagaaaaaagagagaaaacaaaatgttatttttataccataacttgagtgtattgccaaaatttggaaatccttcccatgcctgatgagtttatatcccagaaacattgagccatcagaatgaactgtgtacctgatttgttctctgacctggctaggtagggagggggtggttatcgccccaagatggggtccaggctccatccttcctctgtgcagataatacctttttcttgctatagcctccctcctctgcactgtcctgcactctttcttgcaagtgcatctttttccttcccctggactgtcctctgaccctttggctcatcctagattgcagtgtgtcctgtggacaggctggggaattttgctgctccctattgcttctgtttacaaaaatgaatttttcctggtttcccactagggcatgtgggtgggtggcatggactttttttttttttttttttgtcttgagacatggggtttggctgtcttgcaggactggagaaggtggtggttctagcttggtctctgttggccttgaagcaagcatcccccctgccctttttccttgactgttcatttttttcctgccccactgcttgggatggggagttgcaacttcagtgtggaatttcctctttgaggagcctgggcttggatctatcctgatctggtgatgaagccatgattactttagacctagcccaggcttggaggccagctggaggaagaagggtctaaatcctggcctgtagagttagaactaccatttcctccccttagctgcccttgtatgacccggatttgctatgcaaaacaatctatcccaggttctgttctggttggctacattgttcagcaactcacaaaacgtagcacaaacattcattatggagaaagcatcaggactgttgagtaactcctcctttacttttttcctgctggctacagcatggggtgccctataggcacaagcccagctgaagaacagaatggagggctctgggaggaggcagctcactggagagcctacattccttacacaagtgcctaaagagagtgatgctaacactccatctgccctgtccattgccttcatatacagtctacttcgtgttctgtcaccctttggggaggggagttctcctgggacagtgggctctgcatgttctccacttggatacattttggggctaggatcagggcactattcctggagggtccagtcattcaccagcatttgcaaatgtccatagggagcaggtggcagcctctactcccagcaacaagtttgtgttctctccttttctctctttgcctcaccctctccagttggttttcagctggggcttgaaatgcatttttagccctttgacgtggcttatgccattcaagaaataaaaagcaagagaatcagctttgggcaatgac

SEQ ID NO: 15007 - DNA, 2233 bp, Homo sapiens
  CDS (275)..(1375)
aggaacgacaatcgagtggttagaaccaaagatatctttatcaaaccactataaaaatggagctgaccagccctttgcaactgatcagagtaagccggtggcagtcccagaagagcagcctgttgcagaatctggactattagcgagggagcctaaagaaataaatgcagatgatgagatagaggatacatgtgaccacaaagaggatgacctgggagctgtagaagaacaacgtagtgtcatcctacatctcttgtcacagcttaagctgggcatggatttaacaagagtggtgcttcctacatttatcctagagaagcgttccttgctggaaatgtatgcagactttatgtctcatccagacctatttatagccatcactaatggagccacagctgaggacagaatgattcgctttgttgagtactaccttacctcatttcatgaaggccgtaagggagccattgctaaaaaaccatacaatcctatcattggagaaacatttcactgttcctggaagatgccaaaaagcgaggtagcatccagtgtttttagcagttcttccacccagggagtcacaaatcatgctcctttatcgggggagtctttgacccaggtgggatcagactgttacacagtcagatttgttgctgagcaggtttctcatcatcctccagtctcaggattttatgcagaatgtacagagaggaagatgtgtgtaaatgcgcatgtctggactaagagcaagttcttaggcatgtcaataggcgtgacaatggttggagaaggtatccttagtctgttggagcatggagaagagtacacattttctctaccctgtgcatatgctcggtcaattttgactgttccttgggtagaactgggtggcaaagtcagtgtcaactgtgcaaaaactggatattcagccagcatcacttttcataccaagccattttatggtggcaaactgcatcgggttacagctgaagtaaagcacaacatcaccaacactgtggtatgcagagtgcaaggggaatggaatagtgttcttgagttcacatatagcaatggagagacaaagtatgtggacttgactaaattggcagtgacgaagaaaagagtgagacctctggagaagcaggatccatttgaatccaggcgattgtggaaaaatgtgacagactcgctgagagaatctgaaattgataaggccacagagcataagcataccctggaagaacgtcagaggactgaagaaaggcatcgtactgaaacaggcacaccttggaaaaccaaatattttattaaagagggagatggctgggtttatcataaaccactttggaaaataattccaacaacacaaccagcagagtgacacatactatctaaaactcgaccaaatgaggttcttctctgtttaccctaaatcctcccagaatggagtcattgcactgagtgacctgcttcctgattgcgcagactgaaactagctaaacctgaatgtacctactagggcaccataatactgcagcaagaccaaagtggtaaagaaacacagtggaccttttaccaacctgttcatgtgatgtgagcaataccatcttaaaacttgttacctgaatcagtagatgaatcttttatccagttcttgctcctaaagttaagtttgaatcccctatttttgcacaggggcagcagatacacacaacaatgagaactcagtgactttgattcctttgtagtgaaaagtgaagtctccgtttcagagtttgtgtctttctttctgtccataactgaagtattcactactcttgtaaaccaaccaagaggaggagaaagatgacccagaagtggattcagccattgtgcctgaaatcagtgtttaaaaaaaaaaaatcaaccaggttgtggtaacaaggcattctatttcttcaaaaagactgtatgcctgtgtctgaggaacttacctattatccacctctgttggaactctcttttaaaaagtacatttatagattgatcagaattataaccatggagaattttttcttctgagcattttaatatacttgaaaacaacattgacttgaaaaatttcagaacatttttcagtacctagttttattaaatattacacttgagagacactttttaaaaatgtgttaatgtcaatatgatgagattttagcctttctccagaactaaggcattaaagaaaatagcaaatatt

SEQ ID NO: 15008 - protein, 367 aa, Homo sapiens
MDLTRVVLPTFILEKRSLLEMYADFMSHPDLFIAITNGATAEDRMIRFVEYYLTSFHEGRKGAIAKKPYNPIIGETFHCSWKMPKSEVASSVFSSSSTQGVTNHAPLSGESLTQVGSDCYTVRFVAEQVSHHPPVSGFYAECTERKMCVNAHVWTKSKFLGMSIGVTMVGEGILSLLEHGEEYTFSLPCAYARSILTVPWVELGGKVSVNCAKTGYSASITFHTKPFYGGKLHRVTAEVKHNITNTVVCRVQGEWNSVLEFTYSNGETKYVDLTKLAVTKKRVRPLEKQDPFESRRLWKNVTDSLRESEIDKATEHKHTLEERQRTEERHRTETGTPWKTKYFIKEGDGWVYHKPLWKIIPTTQPAE

SEQ ID NO: 15009 - DNA, 2653 bp, Homo sapiens
  CDS (78)..(1562)
agcgcggggaatttcgagtggtgttggagcgccggaggctagtgggtggctgacccccagcatcctcgagagcgaccatggactccctggccgagtctcggtggcctccgggcctggcagtcatgaagacaatagatgatttgctgcggtgtggaatttgcttcgagtatttcaacattgcaatgataatacctcagtgttcacataactactgctctctctgtataagaaaatttctgtcctataaaactcagtgtccaacttgctgtgtgactgtcacagagccggatctgaaaaataaccgcatattagatgaactggtaaaaagcttgaattttgcacggaatcatctgctgcagtttgctttagagtcaccagccaaatctcctgcttcttcctcttcaaagaatcttgctgtcaaagtatatactcctgtagcctccagacagtctttaaagcaggggagcaggttaatggataatttcttgatcagagaaatgagtggttctacatcagagttgttgataaaagaaaataaaagcaaattcagccctcaaaaagaggcgagccctgctgcaaagaccaaagagacacgttctgtagaagagatcgctccagatccctcagaggctaagcgtcctgagccaccctcgacatccactttgaaacaagttactaaagtggattgtcctgtttgcggggttaacattccagaaagtcacattaataagcatttagacagctgtttatcacgcgaagagaagaaggaaagcctcagaagttctgttcacaaaaggaagccgctgcccaaaactgtatataatttgctctctgatcgtgatttaaagaaaaagctaaaagagcatggattatctattcaaggaaataaacaacagctcattaaaaggcaccaagaatttgtacacatgtacaatgcccaatgcgatgctttgcatcctaaatcagctgctgaaatagttcaagaaatcgaaaatatagagaagactaggatgcgtcttgaagctagtaaactcaatgaaagtgtaatggtttttacaaaggaccaaacagaaaaggaaatagatgaaatccacagtaaatatcgtaaaaaacataagagtgaatttcagcttctggtggatcaggctagaaaaggatacaagaaaattgctggaatgtcacaaaaaacagtaacaataacaaaagaagatgaatctacagaaaagctatcttctgtatgcatgggacaggaagataatatgacctcagtaacaaaccacttttctcaatcaaagctggactccccagaggaattggaacctgacagagaagaggattcttctagctgtattgatattcaagaagttctttcttcatcagaatcagattcatgcaatagttccagttcagacatcataagagatcttttagaagaagaggaagcctgggaagcatcacataaaaacgatcttcaagacacagaaataagtccaagacagaatcgccgcacaagagccgctgaaagtgctgagattgaaccaagaaacaagcgtaataggaattaatgtgggcttttgctgacttttcaaatgcattgattagaataccgtacttttggttgccacagatagattttctatttataaatgcccaaggaaagatgctaaattctaaatattacggttagctgatattcattcttttctgcttttccagaggggaaaaatgttacaaaatatccttacttggtcagttgcctcctgcctctaaaacatctctctctaaaaatactgacatttcacacaggtaccagctttgcagaggaggtagactctttggcactttggcacagggatttggtttggtttggtttggtttgataattaaatttcagaatgtccttaggccattctccttctcttccatggagaatccagcctcacaaaaggattctttcaacttctttattgcaagaaacagttgagttaaatgtttgtttttggaaaggcgggatgtcagttcacatccttggtgtgtgtaagtaccgatgcacgccaccaccatgcctgtgttacagcagctccatgatggttgttgcccgaggttaatgtagttgtttgttagacctgtgtcttacacatttctcagagtaggatattagtattataatttaaagctacgacagtcacaaagtcacaataacttagaaacattgcgcatattcttctgaaatagcacttaaaaatgattagtgtcagtattttttcacttgggtcaatcaaatctgtaacactgaatccaagctattaaacaaaaagtatgcaatgaatgaattttgtaaatgaatagagagtatcagtttacaataatgttcttaaaacagtatcctctggatagttgagtatgggttagaaatcattgaaatggattggtcagaaattgctatctgtgtaaaatgtctaccagtagccagatgcttccagagttcttaatgcctctctggcatttcagagccagcatcccccaactcccacccctctgccatcacccagcccaaacacatcagctttcaaatgagatgatagtaaatgcggcaatgttaagacaagaaatttatgatttgccagattcaacatttatgacctccccttcc

SEQ ID NO: 15010 - protein, 495 aa, Homo sapiens
MDSLAESRWPPGLAVMKTIDDLLRCGICFEYFNIAMIIPQCSHNYCSLCIRKFLSYKTQCPTCCVTVTEPDLKNNRILDELVKSLNFARNHLLQFALESPAKSPASSSSKNLAVKVYTPVASRQSLKQGSRLMDNFLIREMSGSTSELLIKENKSKFSPQKEASPAAKTKETRSVEEIAPDPSEAKRPEPPSTSTLKQVTKVDCPVCGVNIPESHINKHLDSCLSREEKKESLRSSVHKRKPLPKTVYNLLSDRDLKKKLKEHGLSIQGNKQQLIKRHQEFVHMYNAQCDALHPKSAAEIVQEIENIEKTRMRLEASKLNESVMVFTKDQTEKEIDEIHSKYRKKHKSEFQLLVDQARKGYKKIAGMSQKTVTITKEDESTEKLSSVCMGQEDNMTSVTNHFSQSKLDSPEELEPDREEDSSSCIDIQEVLSSSESDSCNSSSSDIIRDLLEEEEAWEASHKNDLQDTEISPRQNRRTRAAESAEIEPRNKRNRN

SEQ ID NO: 15011 - DNA, 2798 bp, Homo sapiens
accagcgccatgctgggctcgcgagccgcggggttcgcgcggggcctgcgggctttggcactggcgtggctgccgggctggcggggccgctccttcgccctggcgcgtgcggcaggcgcgccccacggtggtgacttgcagccccccgcctgtcccgagccgcgcgggcgccagctcagtttgtccgcggcggcggtggtggactctgcgccccgccccctgcagccgtacttgcgcctcatgcggttggacaagcccattggtgagtgcgggcgggcgggcagcccgggaatttgcaagtagcagccgccgagtcggctccgcggagctgtccgcggcggccggccggggcgtgatggaaatgagaacctgaaagcttgggcttggctgccgggtgccgtgcgccctggggcgaatcacctcgggacactttgaaatgagagcctgaaagcttgagcttggctgccggctgccgtgcgccctggggcgagtcacctcaggacacgcagtcgggacagtctcctaaaggacccgccagtttcacgtctgtctgcatcctgagcacctgaagcgggcaagataattctcattccacaaacacttgtttaaatggtgactcaagcggaaggttccgttctcgtggccctccttcatttattagaatgtttgattctccccgcaatcttgtaaggcccacaaagacaatccttaagacagttaagacgctgaggaaactaaggctcctcgtcagagccagaccagaagaactctgtgttttgatgctgagtcggagctcttttacctgcatcacccataaggcaaagatttaattcatttgaacgcagcagggacagcgcttacggactgcctgtcagcttacaatcgcccccgacagaaagattttcctgaccttcctattttaattaacacctaccaacctcactttctatcgctttatccgcaatttttcttaatagcactcaccactaactaaccttatgcgcttgttgattgattggcttctccagtagtgttaagtgaattaataagttcctactacgttgtccggccatagagatagaaaaagctatggaaaccctttgctttcaaggaactctggtctagttgaaaaagactatttggtgagctaggaaaatatggatcaaatatgagtgatacaaaagcaagtgctacaggaaaaagagaaattactgtggatcccttgctggaaagtttcgagaagaaattatactccaaaggacaagttgattttgcagaggagggaagagatcttagtgcgggaagtacttttgcaaagacccaagggtggagtgttagaacactaagaatacgagcctgacctggaacaccaagtgggtgtggaaaatgggaaacgagactagacaagaacatatctgaagaagctggatagcgtggaggaagaagtgaaggatgaactccagccaatctagatgatgacatttgccattgcagtgtatggagatgtagtcaaaggcctaggtacatttactccacttttgcccgtacaagacccgaattaggccttgcttttggtattctagatttatgcacgacctatttgggattagagcactaagttataacaatcagctatcaaagcataaaagcctactgaatgataggtacagccctgccatcattgggaagctgtgtatgacccccatgagttttggggccacattcacgttgagaggcatgcatttccaagcccagttccaatctgaagcctggctgtaattctgttcttggagtctgtggcatggagtggcagtgtagccttatagatgaacatctgccattattcccatttccccagttaaacctctggcttctatcttagtggctggaccttccgccatgtaacagaaggcaacaaaggggttatgagcaaaactttggagccaaacctcttggatgtgaacctccaccctgctcatctgagggaccttggataaattacttcacctctctgggcatccgttttcatctgtaaaatgaagatactattaatgataatatggacgttatgaggtcacgaaaattcattaatatatgttaagtgcttagaacagtgcctgtcataatatgtgctgaagaaatagccattattatcttagaagtggggaatggagaaaattgtacttacagattgtgtatgtttggaagataccagcctgcatggtttggttctaaataaggtgatcattacaggatttttcagaaaactaaatagtactatgttagaattcgctcaacaaatgtattttgaacccctaccatatgccagaaacaataattgacaggagtagaattccaggtttgataattctttatttaaattcttattttgtgggataattatgtgttcgttgttttactttgttgaagttatatcttgttaccttcattgatcaatagtaggttttcgttgtttttgagaaggcaatacagcttctttcaaatgggctaaactaccttattccagaaagtgtcagcaggtggcactctttccaccaaattggaagtgtaattttttgttttaccacgtttatgggtgattatgttgtcttgaagatcatctgtttttgatctgtccatcacccctcagaacttgctcattttatttcatctcccatagagtttttcccttttctacaaaaacatttctttttgcaatctacttgtctcttgtctttgctacctctgcgtctttcttcacagaaaagtatggggaatgaaagtgtcatatggaagac

SEQ ID NO: 15012 - DNA, 2479 bp, Homo sapiens
atgctattgaagacagcagacaggcccggactgagaccgtggttgatgactgggacgaagagtttgaccgagggaaggaaaagaaaattaaaaaatttaagagagagaagaggagaaacttcaacgccttccagaaacttcagactcgacggaacttctggtctgtgactcacccagcaaaggctgccagcctcagctatcgccgctgactgtgcccctgtggaaggaggactaccgtggtttgttctgcagcctcctggagacaaggcgtcccttcccgggagctgtcggtctggatctgagggagctctctgtgtgggctctgctgtgctgggagcctgtcacggtaggagctctcccggtaccagtgtccacagaccgcccaacatagaggctttgaggcttctctagatcggaacctctttggtgacattcccgaccagccctgcaagagaaacgacagtgtgtgtgtgagcagaggtggctgcacacctgctggacatctttgccaggctgtgccttctcatgtttcatagacagtggtctgtgctggcagaggctgctgcccctggttggggctatcaggagagtgggggatggtggccacatgtcctccaggtggtctcccggtgcatagctggtggctctgggcaagccatcccttgcttctcggggctgacgccaccgttgtgtccgagcccgccctcccctgcttcctcagcgggaccccttcatctgttggccttacctgtcctcagaaaggaagaggtgaccccacccagccacctctcccttttatggaactcgagagggtggccctactgtgcaccccttccttgtgagtagctctcaactgtcctggagagcagaggctatttggggtcggaggagccctcgatacctgcgaatacatctgctttccaggctgctgtttattctgagacgactgtgctgtagcttcccttgcagctgcaataacccgcaggtcttcactgaggtggaggctttggggtagaattctccatttattttactacttaatacaaaacatttatttttgaccagtcctgtggcttccattagcaatatgtttcctttcccaaatatgcaaatagtggctttgtttgctcaattttgtgagtgctttggaatttaaatgattgtataactcaagaagattacttttctatgttgctcaagctgtgcctaccaacttgtaacttaataaatacaggaaatcctcagagaaggtgatattttcaggaaaaagacaaatgccctcatagtagtgggaagtgtgaaggtgaccgtgaacatccttcctcatcgggtctgtccccgtcatttcctcccggagtcgtcgcaggtggagatggacaacgtggtgttggacttagacctccttcagtgtggctctgctgggccagaggcatcctgctgtcccgggtggctgcctcgctgtctgcaccccctctccctggggcagctttgcttcctgcccctgtgctcggggcctgggtggttactggcgtgtagatggaattgcttttttaatatgggaagatacatttatttttttccatgtgggtgggtgtctctttttggattttcttctgtttttacgtttctcttcttagaagggtgggagagaatcaagctcctgtggccacctgtgtcccagcagcagtgagtggagctgctcagggtgccctctcctgcggaccagtctctgaatgttcaaagatgagggcctggcttccgtgctctggctttgtaacttatctggaagggaaagcacatgccttcacgggcagggtatgttccttttcttctcggggtgttgacttgcattcctgtgtgaactgttccctctgccatgtttaccgtgtgatgttctgtagttgaaaatgttagttgtctgctggcacagaatttatctcgttcctttctctcccttctctcctccaaatcagtctcttcccttctccactagataactgtaaaaccttttcctggggtacatacattcgttaattcttgggcagtggtgagcacgagatgactttctgcagcgtttatcactgttgggtggagtcacgtcccttccctccaccgaagtcatcaaccagatagggaagggaaagatgaggcccagaaaacgagttcaaactctaggtcttgtacacgtatgtaagtaaatgtcaataacccaagcctttgtcatagcagtcacttggttgacttaggatctgggtctgttgaattttgtgcttgggaatggagctggagggagtggggcctgtgtacagcagctacctctcccaggtcctctcacttgcctgccccgcgtcctggttgcatggccgcacctgtgtgtgtgcagaggtctgtgtcccatcctctgcacctcctttccgggggcctggggagccccacgtgttgccaagatcttggtgcaataaaatactccggttctgtg

SEQ ID NO: 15013 - DNA, 2215 bp, Homo sapiens
  CDS (198)..(1397)
catcaaaatatgaagtcctgacagttcaagagcctccaaggattgaagatgccgaggaatttcccaacctggcagttgcatctgaaagaagagacagaatagagacaccgaaatttcaatctaagcagcagccacaggataattttaaaaataatgtaaagaagagccagcttccagtgcagttggacttggggggcatgctgacagccctggagaagaagcagcactctcagcatgcaaagcagtcctccaaaccagtggtagtctcagttggagcagtgccagtcctttccaaagaatgtgcatcaggggagagaggccgccgcatgagtcaaatgaagaccccgcacaatcccttggactccagcgccccactgatgaagaaagggaagcagagggagatccccaaggccaagaagccaacctcactgaagaagattattttgaaagaacggcaagagagaaagcagcgtctccaagaaaatgctgtgagtccagcttttaccagtgatgacacacaagatggagagagtggtggtgatgaccagtttcccgagcaggcagagctgtcagggccagaggggatggacgaactgatctccactccttcggttgaggacaagtctgaagagccaccaggcacagagctccagagggacacagaggcctcccaccttgctcccaatcacaccaccttccctaagatccacagccgcagattcagggattactgcagccagatgcttagtaaagaagtggatgcttgtgttaccgacctactcaaagaactggtccgtttccaagaccgtatgtaccagaaagatccagtcaaggccaagactaaacgtcgacttgtgttggggttgagggaggttctcaaacacctgaagctcaaaaaactgaaatgtgtcattatttctcccaactgtgagaagatacagtcaaaaggtgggctggatgacactttgcacacaattattgattatgcctgtgagcagaacattccctttgtgtttgctctcaaccgcaaagctctggggcgcagtttgaataaggcagttcctgtcagtgtggtggggatcttcagctatgatggggcccaggatcagttccacaagatggttgagctgacagtggcggcccgacaggcgtacaagaccatgctggagaatgtgcagcaggagctggtgggagagcccaggcctcaggcacctcccagcctacccacacagggccccagctgccctgcagaagatggccccccagccctgaaagaaaaagaagagccacactacattgaaatctggaaaaaacatctggaagcatacagtggatgtaccctggagctagaagaatccttggaggcttcaacctctcaaatgatgaatttgaatttatgagagttcttgcctgtgtgtctgtattttgggtaaggaggggaggtctgaaaaagactttggggctttttcttctgtttttcatgacaatgtaatttgtgtaactgttgaatctggaaattgatcagcattaaagggcacatgaagcagtgtctgcaggcgttcagtgctgcggagcctgttaaaggtcactcagatgtgcaggtgttaatcttctctaaaagcctggtgatacagctctggctttctgagcacactacggatctggaaaatactggaaaatgtgatacttagaatactttggctgctaaggaaacttcctctccattgcagaatagctgagccaagtgagtgagtttgcagaaagcaggtggtgagctcctgcctgctggaggttgccatggagggccattcctgcccggcaacagcaccgtcctgcagggagccacttggcagaagggtgcagggctgctggtgtcagagcaagagggctacagggaaagggccctttctcaggggatgtagcttttttaaaagatttgggaacacttggaggatttgctaaaatgagcctcagaaggaaaattggttttctaacctgtgactttttgaaatgaattattcctttcagtctttatttttcaaagaaacaatgtgtattgaagtacctagatttgtttgataatcaacaaatctttcctttttcaatgaacatattctgaatgtggtttctgtcttagaccaggaggacagagtttgctttcatattttccctgtaagtaagagggcttatttattttaaataaagagtaattatt

SEQ ID NO: 15014 - protein, 400 aa, Homo sapiens
MLTALEKKQHSQHAKQSSKPVVVSVGAVPVLSKECASGERGRRMSQMKTPHNPLDSSAPLMKKGKQREIPKAKKPTSLKKIILKERQERKQRLQENAVSPAFTSDDTQDGESGGDDQFPEQAELSGPEGMDELISTPSVEDKSEEPPGTELQRDTEASHLAPNHTTFPKIHSRRFRDYCSQMLSKEVDACVTDLLKELVRFQDRMYQKDPVKAKTKRRLVLGLREVLKHLKLKKLKCVIISPNCEKIQSKGGLDDTLHTIIDYACEQNIPFVFALNRKALGRSLNKAVPVSVVGIFSYDGAQDQFHKMVELTVAARQAYKTMLENVQQELVGEPRPQAPPSLPTQGPSCPAEDGPPALKEKEEPHYIEIWKKHLEAYSGCTLELEESLEASTSQMMNLNL

SEQ ID NO: 15015 - DNA, 2764 bp, Homo sapiens
  CDS (19)..(1140)
agacgcgcaagggcgccgatggaggcagactcgccagcgggccccggcgccccagagcccctcgcggagggagcggcggccgagttctccagcctgctgcgcaggataaaaggcaaactcttcacctggaatattttgaaaacaattgccctgggtcagacgttgtccttgtgtatatgtgggacagccatcaccagccagtatttggcagaaagatacaaagtgaacacccccatgcttcagagctttatcaattattgcttgctgttcctaatttatacagtgatgctggcatttcgatcaggcagtgataaccttttagtaatcttgaaaagaaaatggtggaagtacatcctgctgggactagcagatgtggaagctaattatgtgatcgtcagagcctaccagtacacaactctaaccagtgtccagcttttggattgctttgggattcctgtgttgatggctctgtcatggtttattcttcatgcaagatacagagtgatccacttcatcgccgtggctgtctgtctgttgggtgtaggaaccatggttggtgcagacatactagcagggagggaagacaattcagggagtgatgtattgattggtgacatcttggtccttcttggggcttccctctatgccatttcaaatgtttgtgaggaatacatcgtgaagaagctgagcagacaggagtttttaggaatggtgggcctgtttggaacaattatcagtggtatacagctattgattgtggaatataaggatattgccagcattcattgggactggaaaattgccctgctgttcgtggcatttgccctgtgtatgttttgcctgtacagcttcatgccattggtgattaaagtcactagtgccacttccgtcaacctgggcatcctgacagcggacctctacagcctttttgttggactctttctgtttggctataagttttcaggactctacatcctgtccttcactgtcatcatggtggggtttatcctgtactgctccacccctactcgcacggccgagccggctgaaagcagcgtgcctccagtcaccagcattgggattgacaacctggggctgaagctggaggagaacctccaggagacccactctgctgtcttgtagctggagaagatggcgcacccatcccccaccaggataaagcagagcctgctgcctgctgaggggacacttggggaaatagcagactcagaatggacactctacaaccctgggttggatccagtggttaggttttagaaaggaacactgaacaaagttcaaaagtagaaataccaaaatagagcagaaaccaagctaagagtgtgtttctgtgtttgaggaccaatatctgttcgtgttgaggagatgaggtgcagactccacactggggtcttagaggcaccggtgggaaagcaggactggggagagatccaggactgagccagcctcaggccagggcgggaaagcaggctgtccaggctgggcttggtggtcaggaacaggggcagctcacggtggctctggagtacgtttcctctgtcagatgcttcaaggtttttttttttttttttttttgctgaggcagttattgtccacaggcctttgggtacagatgaggcctcggggctgactgcatgtggcagaaaacgggtgggtcagcccttgaaaagtcttgagatataagtgtgagtactatacaagcattaaactggagtgcagtaaacctaggaaccttcccacaattgtttttttgtttgtttgagatgcagagtctagagtgcagtggtgcaagctcagcttactgtaacctctgcctcctggattcaagtgttagtagctgggattacaaaagcatgtggccccacgcccagctaagttttgtatttttagtagacatggggtttcaccatgttgcccaggctggtcttgacctcccgacctcaagtgatctgcctgccccgacctcccaaagtgctgggattacaggcttgagccaccgtgccaggcctgttttgtttgtttttgtagagagatggggtttcgccatgttgcccaggctaatctcaaattcctgagctaaagcgatctgcccacctcggcctccgaaagtgctaggattacagatgtgaaccactgtgcctggcctgtttgtttgtttgtttaaaacatttctccatcactcattccaggtcccagagcaaactctctctgctctcggagcctgtgacactggctatgtgctccacagtttcagtcccaggtcatactctccaacagttttcagagctccatatatatgtagatgccatcctttctaaaaacttctcacgacctcctggaatattcctattgatctcattttatttagcatcagctcaagaaactaagtcttagtgcacagtatcacaacaaagaaaaagctttgtttttataactggtaaaaacaagaaaagattctcatcaaaatgaaaatataaaattaatcatttctcaccaaagagtatgcctgggagcctccagctgttaaaagacaatgctattactacttcttatcaaaaatctgtaatgccctgtgatttttatgatacttcttcaatacaaagtgttaatatgtgtcatcagtataataacaaccaacaaaatgccactttcagaaaactgtatgtaaattttttgtaacaatgtaaaaaagaaatggggagtaagtgttcacatcattaaaaggctttgaattcatggaaat

SEQ ID NO: 15016 - protein, 374 aa, Homo sapiens
MEADSPAGPGAPEPLAEGAAAEFSSLLRRIKGKLFTWNILKTIALGQTLSLCICGTAITSQYLAERYKVNTPMLQSFINYCLLFLIYTVMLAFRSGSDNLLVILKRKWWKYILLGLADVEANYVIVRAYQYTTLTSVQLLDCFGIPVLMALSWFILHARYRVIHFIAVAVCLLGVGTMVGADILAGREDNSGSDVLIGDILVLLGASLYAISNVCEEYIVKKLSRQEFLGMVGLFGTIISGIQLLIVEYKDIASIHWDWKIALLFVAFALCMFCLYSFMPLVIKVTSATSVNLGILTADLYSLFVGLFLFGYKFSGLYILSFTVIMVGFILYCSTPTRTAEPAESSVPPVTSIGIDNLGLKLEENLQETHSAVL

SEQ ID NO: 15017 - DNA, 3422 bp, Homo sapiens
  CDS (803)..(1738)
agcattgggatgctgtctatgagagagaactgcaaactttccgagaatatggagatacaggtgaaatctggtttggagaagagagtatgaatcgactaataaggtggatgcagaaacacaagattccactggatgcttcagtgcttgatattggaactggaaatggtgttttcctggttgaacttgcaaaatttggtttctctaatattactggaattgattactctccttctgcaattcagctttctggaagtattatagaaaaagaaggtttatctaacattaagttaaaggtagaagactttttgaatctctccacacagctgtctggatttcatatttgtattgacaaagggacttttgatgccataagccttaatcctgacaatgcaattgagaagaggaagcaatatgtgaaatctctctccagggtgttgaaagtaaaaggcttttttctaataacgtcatgtaattggaccaaggaagagttgctaaatgaattcagtgaaggatttgaacttctcgaagagctaccaacacccaagttcagctttggaggcagatctggaaacagtgtagcagcattggttttccaaaaaatgtgagactttttcttggacgaattcagggagttgaccacatttggccatttcccagaagggccccaccccaagggtgagtggccaatggggagctgtttctgctgacatcaattccccaggaggtactcaccccaagtctgcccaagtgaagatggctgatacccaccctgggatggagcccagcgcctgaggcccttatcatggtgatggtcctaagtgaaagcctcagcacccggggagctgactccattgcatgtgggaccttcagccgtgaactgcacacgccaaagaagatgagtcaaggacctacacttttctcttgtggaattatggaaaatgacagatggcgagacctggacaggaaatgccctcttcagattgaccaaccgagcaccagcatctgggaatgcctgcctgaaaaggacagctcactatggcaccgggaggcagtgaccgcctgcgctgtgaccagtctgatcaaagacctcagcatcagcgaccacaacgggaacccctcagcaccccctagcaagcgccagtgccgctcactgtccttctccgatgagatgtccagttgccggacatcatggaggcccttgggctccaaagtctggactcccgtggaaaagagacgctgctacagcgggggcagcgtccagcgctattccaacggcttcagcaccatgcagaggagttccagcttcagcctcccttcccgggccaacgtgctctcctcaccctgcgaccaggcaggactccaccaccgatttggagggcagccctgccaaggggtgccaggctcagccccgtgtggacaggcaggtgacacctggagccctgacctgcaccccgtgggaggaggccggctggatctgcagcggtccctctcttgctcacatgagcagttttcctttgtggaatactgtcctccctcagccaacagcacacctgcctcaacaccagagctggcgagacgctccagcggcctttcccgcagccgctcccagccgtgtgtccttaacgacaagaaggtcggtgttaaaaggcggcgccctgaagaagtgcaagagcagaggccttctctagaccttgccaagatggcacaggcagcacagtgcagacttctgctgcgtgagtgagttgcgggggccccagaagcacgaagcccagcccggcgtggcccactgtctcccgtgcatggccctctgcttacccggactcaggagaagggcgtgtttgcggcctggaggacaggcgtggagaggtttgcttgatttccataactcaacacttgcccacacaatctgcccatggaagtctggcctagaatgcttgttagggccagagcagcccctctgggaatgaggctctgtagcccccgcttttcttttggtttttgcttttagcaagatttttttttttttaagtctatgagcactgaactcaagaaacaaacatgtgaagtggggctgctggggggaggtgagccccttgtcctcactgccgtccctgcagccctgccttacccaaggcctagggactcactgattcgaggctggatgcattgacttccccagcacaccctcctctcacccctgcctccgtatctgacagatgactggtgggccaggggctggcggggggcttctacccagcgcagtgcccccacccttgtgccccacctgagggtagggcacagagtggccctggaattacctctggcccttaccagccccttgctgcccccaatccctagatgaggtccctggctggatagcagctccgttctgcccccacgtggggcctggccccaggcctcacccccagtgcagtgcccaggccaggcacaggtgcttctgacatggggcacacgtgtagtctccttacctgcacagcgatcataaccctgtgggcttacgagagagactcagccactctgtccagtgtgcagggaaagggctggaaggaagaaggccgaaaggaaaggccccagagagcacagtgctcagactcccgggtgacttctggtttctttttatatacttctgttaaatttcctgtaataacacatgctgcttttataatgttaaaaaaaccacgtagaatgtaggctgccccgtgtgttcacctcctaaaccaggacagttctgaggggcagctggaactgttgacacgcactctggcacgggaggcggacccaagagcacccaccccagaggggcaccacactcgcccgtcccgccctgtgtccccacctctgccctgaggtgaacacaggaggctttccacctgccagctgccagccaacctccccgagaggggcaggaaccgaccagcaggacagacccacccaggacagcggcaccaggtcaggcctcagcctttccgatcctctggagggctcaagccgaacggaaggagggaagaactgcagtcacctgggccggtggcgctcacatctgacgtggaggcctctgcttcacttggcccagctcccagccttgtcggcagtgaggacatggaccctcgctggcatccgtcctccgtctggcacaacgtgccgtgttctctctggttagggtttgggtgggacggagactgcgcccctgttcctggtccgcctaagtctctgccagtctgagtctcgtgggccttttctgcaggccctggggttgcggagcaggcagggggacgtcggtggctgggggacatcccgccacctgccaagtagctgcaatgggaagagatgcggttcccgtgacagccaggcctggatgttcaagtcatgtgagaccaccaaataccttgttgcactaagcc

SEQ ID NO: 15018 - protein, 312 aa, Homo sapiens
MVMVLSESLSTRGADSIACGTFSRELHTPKKMSQGPTLFSCGIMENDRWRDLDRKCPLQIDQPSTSIWECLPEKDSSLWHREAVTACAVTSLIKDLSISDHNGNPSAPPSKRQCRSLSFSDEMSSCRTSWRPLGSKVWTPVEKRRCYSGGSVQRYSNGFSTMQRSSSFSLPSRANVLSSPCDQAGLHHRFGGQPCQGVPGSAPCGQAGDTWSPDLHPVGGGRLDLQRSLSCSHEQFSFVEYCPPSANSTPASTPELARRSSGLSRSRSQPCVLNDKKVGVKRRRPEEVQEQRPSLDLAKMAQAAQCRLLLRE

SEQ ID NO: 15019 - DNA, 3263 bp, Homo sapiens
  CDS (831)..(1748)
gctgtagaagaggggaggaaacaagccagtgcaaggggagcaaaagagaaaaggagccaggctgggcttcctgatcccacagcatcgcagagctcgggaggcacagctcacagacacaggaaacacaggactgctattctgctctcctgcccacggtgatctggtgccagctggtggaacagtgggtgatggcgtccctgctgcaagaccagctgaccactgatcaggacttgctgctgatgcaggaaggcatgccgatgcgcaagtctcaatctctgatgtggagacaatacgtaatggccatgattccgagttgctgcgtagcctggcagaggagctccccctggagcagggcttcaccattgtcttccatggccgccgctccaacctggacctgatggccaacagtgttgaggaggcccagatatggatgcgagggctccagctgttggtggatcttgtcaccagcatggaccatcaggagcgcctggaccagtatcggcaggatggagtcagggtgggggtgagggatcacgctatccctgaaggagccagatgcaacaggtttaggaaaggcagcagacacgtcccagtctggaaccctggaaggagaagaattcgtacagttctataaggcattgactaaacgtgctgaggtgcaggaactgtttgaaagtttttcagctgatgggcagaagctgactctgctggaatttttggatttcctccaagaggagcagaaggagagagactgcacctctgagcttgctctggaactcattgaccgctatgaaccttcagacagtggcaaactgcggcatgtgctgagtatggatggcttcctcagctacctctgctctaaggatggagacaccttcaacccagcctgcctccccatctatcaggatatgactcaacccctgaaccactacttcatctgctcttctcataacacctacctagtgggggaccagctttgcggccagagcagcgtcgagggatatatacgggccctgaagcgggggtgccgctgcgtggaggtggatgtatgggatggacctagcggggaacctgtcgtttaccacggacacaccctgacctcccgcatcctgttcaaagatgtcgtggccacagtagcacagtatgccttccagacatcagactacccagtcatcttgtccctggagacccactgcagctgggagcagcagcagaccatggcccgtcatctgactgagatcctgggggagcagctgctgagcaccaccttggatggggtgctgcccactcagctgccctcgcctgaggagcttcggaggaagatcctggtgaaggggaagaagttaacacttgaggaagacctggaatatgaggaagaggaagcagaacctgagttggaagagtcagaattggcgctggagtcccagtttgagactgagcctgagccccaggagcagaaccttcagaataaggacaaaaagaagaaatccaagcccatcttgtgtccagccctctcttccctggttatctacttgaagtctgtctcattccgcagcttcacacattcaaaggagcactaccacttctacgagatatcatctttctctgaaaccaaggccaagcgcctcatcaaggaggctggtcaggaccaaaatggagggatggggagggaagtgggatggataggttcaggcctgatggactggcaggtaagtcccaagaaaaaagacaaggtagctaaggagagatgaaggagttcagaaactccttagagcagacaagggcagaggagttatgaatagtggctcaagggtctaggggcaggaaagctggtctggatggacagagtagagaggcacagtgaaactttctggagccagcttcagatgctggagagaagggtgaagagtaggcagggtccttgggactagggaagtgggagattccaccccacttccatctccctctctatacccttttacaggcaatgagtttgtgcagcacaatacttggcagttaagccgtgtgtatcccagcggcctgaggacagactcttccaactacaacccccaggaactctggaatgcaggctgccagatggtggccatgaatatgcagactgcagggcttgaaatggacatctgtgatgggcatttccgccagaatggcggctgtggctatgtgctgaagccagacttcctgcgtgatatccagagttctttccaccctgagaagcccatcagccctttcaaagcccagactctcttaatccaggtgatcagcggtcagcaactccccaaagtggacaagaccaaagaggggtccattgtggatccactggtgaaagtgcagatctttggcgttcgtctagacacagcacggcaggagaccaactatgtggagaacaatggttttaatccatactgggggcagacactatgtttccgggtgctggtgcctgaacttgccatgctgcgttttgtggtaatggattatgactggaaatcccgaaatgactttattggtcagtacaccctgccttggacctgcatgcaacaaggttaccgccacattcacctgctgtccaaagatggcatcagcctccgcccagcttccatctttgtgtatatctgcatccaggaaggcctggagggggatgagtcctgaggtgggcatttcacgggaagggttggtatgctggctttagacggggagaaacatctggaaggatgctcgagagaacaaatggaggtggtgaaaatcaagctttggattgtgcattcctaggcacaaaattacctcattcttcctaacaagcaatctgggacctgattttccaccttttttctcttttcttcccttcctttgttttcataagcctttggtatctttcctgcccttttcctttgtgtactctatactggagttcccttcttcctcttgctgtaggctcaatcccataccgacatctacaactaatctttcccatcaactctgtgtgaaggcaggttgcaactagaaattcagaggggcttggaatagagaaacctaaagaagcatcatcccctccatccccaacttcctcaaagcccaaagccaagggaaggataaatcaaggctcaaggcttccccagcaaagattagggaaagagacttgaccccaggactgtactacgactcttaagagaacactgcacagcactcaaagtcccccactggactgcttcctccttagccccactggtataaatacatctctctcc

SEQ ID NO: 15020 - protein, 306 aa, Homo sapiens
MDGFLSYLCSKDGDTFNPACLPIYQDMTQPLNHYFICSSHNTYLVGDQLCGQSSVEGYIRALKRGCRCVEVDVWDGPSGEPVVYHGHTLTSRILFKDVVATVAQYAFQTSDYPVILSLETHCSWEQQQTMARHLTEILGEQLLSTTLDGVLPTQLPSPEELRRKILVKGKKLTLEEDLEYEEEEAEPELEESELALESQFETEPEPQEQNLQNKDKKKKSKPILCPALSSLVIYLKSVSFRSFTHSKEHYHFYEISSFSETKAKRLIKEAGQDQNGGMGREVGWIGSGLMDWQVSPKKKDKVAKER

SEQ ID NO: 15021 - DNA, 3729 bp, Homo sapiens
  CDS (296)..(3037)
ccttacaattccagcccctagacatacagtagatgtgcagcttcccagagaagacaaccctgaagaacctagcaaggaaatcacctctcacgaggaaggaggtggagacgtttcacctcgaaaagaacctcaagagcctgaggtttgccccacaaagattaagccgaacctgagcagctcccctaggtcagaggaaacgacagcctccagcctggtgtggcctctccctgctcaccttcctgaagaggacctgccagaaggtggctccacagtctcagctcccacagcaagtgggatgtcttctcctgaacacaaccaaccaccagttgcactgttggatacggaggagatgagtgtaccccaggactgtcacctccttccctccactgaaagcttttccgggggagtcagtgaagatgtcatttctaggcctcattctcctcctgaaatagtcagtagagaagaaagtcctcagtgctcagaaaatcagagttccccaatgggcttggagccccccatgagtctgggaaaggctgaggacaaccaaagcatcagtgctgaggttgagtctggagacacccaggagctaaatgtcgacccactcttgaaggaaagcagcacttttactgatgaaaaccccagtgaaactgaggaaagtgaggcagcaggtggtataggaaaattagagggagaggacggtgatgtaaaatgcctgtcagaaaaagacacgtatgatacaagcattgactcactcgaagagaatttggacaagaagaaaaaaggtaaaaaattccctgaggcctctgataggtgcctaagaagtcaactttcggattcttcctctgctgacagatgcctaagaaatcagagttcagattcttcctcagcttgtcttgaaatcaaagttcctaaaaatcctagtgcaaaacgttcaaaaaaagaagggcaccctggtgggacaacacctaagggccttctacctgacagtttccacacggaaactctggaggacacagaaaagccaagtgtcaatgaacgcccctctgagaaagatgctgagcaggagggcgaaggcggggggatcatcaccaggcagactttgaaaaacatgctggacaaagaagtcaaggggttacgaggagagattttccccagcagggaccccataaccacagctggacagccactgcctggagagagattggaaatctatgttcagtctaaaatggatgagaagaatgctcatatcccctcagaaagtattgcttgtaagagggacccagaacaggcaaaagaagagccagggcatattcccacacagcatgtggaggaggctgtgaatgaggtagacaacgaaaacacccagcagaaagatgatgagagtgatgccccatgcagctctcttgggttgtcgagtagtggaagtggtgatgctgctagggcaccaaaatcggtgccaaggcctaaaagattgacctcttcaacctacaacctaagacacgctcattctctgggctccttggatgcttcaaaagtgacttcagaaaaggaagctgcacaagtaaaccccataatgccaaaggaaaatggagcttcagagagtggagaccccctagatgaggacgatgttgacaccgtggtagatgaacagccaaagtttatggaatggtgtgctgaggaggagaaccaagagctcatcgccaacttcaatgcccagtacatgaaagttcagaagggctggatccagttggagaaagaaggacagccaacaccaagagcaaggaacaaatcagataaactgaaagagatttggaaaagcaagaaaaggtcacggaaatgtaggagttcattggagagtcagaagtgttctcctgttcagatgctctttatgacaaactttaaattatctaatgtttgtaaatggttcttagagacaactgaaacccggtctctagtcattgtgaagaagctcaatactcgccttccaggaggcgttccccccgtcaagcatcctcttcagaaatacgctccttccagcctatatcccagttcactacaggctgagcgcttgaaaaagcacttgaagaaatttcctggagctacccctgctaagaataattggaaaatgcagaagctctgggccaaatttcgagagaatcctgatcaagtggagccagaagatggcagtgatgtcagccccggccctaattctgaagacagcatagaggaagtcaaggaagatagaaacagtcatcctccagcaaacctgcccactccagccagtacccggattcttagaaaatattccaatattcgaggaaagctcagagcccagcaacgtttaatcaagaatgagaaaatggaatgcccagatgctctggctgtggaaagtaagccaagtcgtaagagcgtatgcatcaaccctctgatgtcccccaagcttgccctgcaagtggatgcagatgggtttcctgttaagcccaagagtactgaaggaatgaagggaaggaaggggaagcaggtgtctgaaatcttgcctaaagcagaagttcagagtaaacgcaagagaacagaaggcagcagccctccagatagtaagaacaaggggcctacggtgaaagccagcaaagaaaagcatgctgatggagccaccaaaacccctgctgccaagaggccagctgcaagggacagaagcagccaaccccccaaaaagacgtctttgaaagagaataaagtgaagatccctaaaaagtccgctgggaagagctgccctccctccaggaaagaaaaagagaatacaaacaaaaggccttcccagtctattgcctcggaaacactgacgaaacctgcaaaacagaagggggccggtgaatcctcttcaaggcctcagaaagccacgaataggaagcagagtagtggaaagactcgggccagaccctcaacgaaaaccccagagagcagtgcagctcagagaaagcgaaagctgaaggcaaagctggactgttcgcacagcaaacggaggcggctggatgcaaagtgattggaaagatggtagccaagagtaaaactgttctatagaagtaaccttttattttgcattaactaaatctgcttttataagcttatcaagcctttcaaatttacagttaatggagaacaccgtaatttgagatgtcagaaaatgcatctcagatggagaagggaacttgcagagtccttctctgaggctaagggaagttatatattatattctggttgttccttgggttttaaacttggaaccaagcagttttcgtttttaaaagtacagtgccttatttatcctttttgtttttaaatttacaaaagctaaaaagctgatctatgtgattaaaggcttgtattttatacttgatgcacaagcacttgtactgtagccgagaagaccaccatcatgcacataaaaggagcttttcagcagccaccctgcagcatctgcccacgaacagatgcccttctttgcaaaccccagcagtgaacttccctctctgtcttgtttgtttgtttagatgatgtttgaaagctaaaccaaatcattttatggtatgcagaggatttataattataaaagattactatttctgttacccccttttaaaaaagatcatgttcattgttggtccctcctctcacctttgatgttttgtcatttgagagcatgtattctaaattatgtgcccatgggacaag

SEQ ID NO: 15022 - protein, 914 aa, Homo sapiens
MSSPEHNQPPVALLDTEEMSVPQDCHLLPSTESFSGGVSEDVISRPHSPPEIVSREESPQCSENQSSPMGLEPPMSLGKAEDNQSISAEVESGDTQELNVDPLLKESSTFTDENPSETEESEAAGGIGKLEGEDGDVKCLSEKDTYDTSIDSLEENLDKKKKGKKFPEASDRCLRSQLSDSSSADRCLRNQSSDSSSACLEIKVPKNPSAKRSKKEGHPGGTTPKGLLPDSFHTETLEDTEKPSVNERPSEKDAEQEGEGGGIITRQTLKNMLDKEVKGLRGEIFPSRDPITTAGQPLPGERLEIYVQSKMDEKNAHIPSESIACKRDPEQAKEEPGHIPTQHVEEAVNEVDNENTQQKDDESDAPCSSLGLSSSGSGDAARAPKSVPRPKRLTSSTYNLRHAHSLGSLDASKVTSEKEAAQVNPIMPKENGASESGDPLDEDDVDTVVDEQPKFMEWCAEEENQELIANFNAQYMKVQKGWIQLEKEGQPTPRARNKSDKLKEIWKSKKRSRKCRSSLESQKCSPVQMLFMTNFKLSNVCKWFLETTETRSLVIVKKLNTRLPGGVPPVKHPLQKYAPSSLYPSSLQAERLKKHLKKFPGATPAKNNWKMQKLWAKFRENPDQVEPEDGSDVSPGPNSEDSIEEVKEDRNSHPPANLPTPASTRILRKYSNIRGKLRAQQRLIKNEKMECPDALAVESKPSRKSVCINPLMSPKLALQVDADGFPVKPKSTEGMKGRKGKQVSEILPKAEVQSKRKRTEGSSPPDSKNKGPTVKASKEKHADGATKTPAAKRPAARDRSSQPPKKTSLKENKVKIPKKSAGKSCPPSRKEKENTNKRPSQSIASETLTKPAKQKGAGESSSRPQKATNRKQSSGKTRARPSTKTPESSAAQRKRKLKAKLDCSHSKRRRLDAK

SEQ ID NO: 15023 - DNA, 2709 bp, Homo sapiens
  CDS (227)..(1936)
gttgggggtcaggtgccggaagaggaaacctctcgctggggctaggagttcggcggggcgcgcgccggcggctgcggagctggcaggtgcgaagcgtctgcacctggcgggcgatggcgcccgatgcgggcgccccgggatagcgtgggcgaggctgcggggccccggcgcgcacgcccgcacctctccccagccctggcgtgggcccagcccggcccaggcagcaatggggttcctgcagctgctggttgtagcggtgctggcatccgaacaccgggtggctggtgcagccgaggtcttcgggaattccagcgagggtcttattgaattttctgtggggaaatttagatacttcgagctcaataggccctttccagaggaagctattttgcatgatatttcaagcaatgtgacttttcttattttccaaatacactcacagtatcagaatacaactgtttccttttctccgactctcctttccaattcctcggaaacaggcactgccagtggactggttttcatccttagaccagagcagagtacatgcacttggtacttggggacttcaggcatacagcctgtccagaatatggctatcctactctcctactcagaaagagatcctgtccctggaggctgtaatttggagttcgatttagatattgatcccaacatttacttggagtataatttctttgaaacgactatcaagtttgccccagcaaacctaggctatgcgagaggcgtagatcccccaccatgtgacgctgggacagaccaggactccaggtggaggttgcagtatgatgtctatcagtattttctgcctgagaatgacctcactgaggagatgttgctgaagcatctgcagaggatggtcagtgtgccccaggtgaaggccagtgctctcaaggtggttaccctaacagctaatgataagacaagtgtttccttctcctccctcccgggacaaggtgtcatatacaatgtcattgtttgggacccgtttctaaatacatctgctgcctacattcctgctcacacatacgcttgcagctttgaggcaggagagggtagttgtgcttccctaggaagagtgtcttccaaagtgttcttcactctttttgccctgcttggtttcttcatttgtttctttggacacagattctggaaaacagaattattcttcataggctttatcatcatgggattcttcttttatatactgattacaagactgacacctatcaagtatgatgtgaatctgattctgacagctgtcactggaagcgtcggtggaatgttcttggtagctgtgtggtggcgatttggaatcctctcgatctgcatgctctgtgttggactagtgctggggttcctcatctcgtcagtgactttctttactccactgggaaacctaaagatttttcatgatgatggtgtattctgggtcactttctcttgcatagctatcctcattccagtagttttcatgggctgcctaagaatactgaacatactgacttgtggagtcattggctcctattcggtggttttagccattgacagttactggtccacaagcctttcctacatcactttgaacgtactcaagagagcgctcaacaaggatttccacagagctttcacaaatgtgccttttcaaactaatgacttcattatcctggcagtatggggcatgctggctgtaagtggaattacgttacagattcgaagagagagaggacgaccgttcttccctccccacccatacaagttatggaagcaagagagagagcgccgagtgacaaacattctggaccctagctaccacattcctccattgagagagaggctctatggccgattaacccagattaaagggctcttccagaaggagcagccagctggagagagaacgcctttgcttctgtagatgcccaggggcttggtcagtgtgcctcagctttggagttcatgcctggagtggttcaacagtctctggtgcaagtctaataagagatcaggcatatatatctgttctttgcataatattatggtgcccttattgatatatggtaagggtgtactaggggattaggatgattgtaagagaatgagaaagatgaccaaaaggttggtggtagggaggctttttcttatttccaaatacttgagaaattaccttttggtttacaaatctatgatcaacttattccattaaatagatacattaaaaaaattaaaaactgattcttctgcagagcactggtgtttctttttataaccccttgaaacaagtctctcacctgagcctgtctaaactttcggagggagtttattattgagtctttatctgtgacagtatttggagatttagggatttgatacttaggcctttgaattttagaatacaaaaagagaagcaagccagacatggtggctcacacctgtaatcccaatactgggaagccaaggtgggagtatcgcttgagcccaggagtttgagaccgacatgggcaacatgacaagaccccatctctacaaaaaaattaaaaaattagccaggcatggtggcacatgcctactcccagctcccaaggagactgagatgggaggatccctggagccctgaagattgaggctacagtgagccttgattgtgtcactgcactccagcttgggtgacagagaccctgtctcgag

SEQ ID NO: 15024 - protein, 570 aa, Homo sapiens
MGFLQLLVVAVLASEHRVAGAAEVFGNSSEGLIEFSVGKFRYFELNRPFPEEAILHDISSNVTFLIFQIHSQYQNTTVSFSPTLLSNSSETGTASGLVFILRPEQSTCTWYLGTSGIQPVQNMAILLSYSERDPVPGGCNLEFDLDIDPNIYLEYNFFETTIKFAPANLGYARGVDPPPCDAGTDQDSRWRLQYDVYQYFLPENDLTEEMLLKHLQRMVSVPQVKASALKVVTLTANDKTSVSFSSLPGQGVIYNVIVWDPFLNTSAAYIPAHTYACSFEAGEGSCASLGRVSSKVFFTLFALLGFFICFFGHRFWKTELFFIGFIIMGFFFYILITRLTPIKYDVNLILTAVTGSVGGMFLVAVWWRFGILSICMLCVGLVLGFLISSVTFFTPLGNLKIFHDDGVFWVTFSCIAILIPVVFMGCLRILNILTCGVIGSYSVVLAIDSYWSTSLSYITLNVLKRALNKDFHRAFTNVPFQTNDFIILAVWGMLAVSGITLQIRRERGRPFFPPHPYKLWKQERERRVTNILDPSYHIPPLRERLYGRLTQIKGLFQKEQPAGERTPLLL

SEQ ID NO: 15025 - DNA, 2880 bp, Homo sapiens
tgcattttataaattagtgattattgttagttgaatgatctataagtaaaatccttgcacatgcattcaacagaatacactaggatagaaaatttctgaaaggtataccagaagctatacatggtggtccctagagagtgcagctaggtgtggggaggaagcagacttattttactttatgccagttagtgccctttgaaatggtcttaaacagaaatagtgtattactgtaataattatagtgaagtactgcacttgggcaggatattcccttccagggctcctaccctctcctgattttgcatccagggacgtcctctgtgcttttgaatgtattaaggagtgacgtacggctggattcactctgatctcattcactgacagtggtgggagagcccagagctgagtagaaactggttctggggcatcgtgtggctagggtgccaaagccgagaaaggtcccgtagtccctgtgtggtcagcagggaaggcagcagtgctctgtcagtattgattcttcaggggcaggctgcccacttaccaaagttatgcttagcagaggggctctggctcactccccgtccctcatcctaccaggtgtgaggctgccaggagccgatcgcacaaggcttggcaaggcagatgctccccagctcctgacatcagagagaagggctgggattgtggcctgcggttggtgggcaggagagcctggtctgatgacagcaaccaccctttgactaccttctctgtggctgttactgtctgattccaaccttccactgttgaacagacctcctaccactttcctactactccccctaatgataacatactgaactcacttttatgaatttgttgagaccttaccacttttcaagtgtgtgttcaggaacagcaaacttttgtcttgcttggatccacccacatacccaaatcaccatgggtatcagacacactgggtagctgagtgctcagaggaagatgcgaggtattcagggaaagtgtcagtggggtctcccagtgcctgtttggtccacagttaggagaggccctgcttgcacttctaatacagtcccggaaagacggggccagaacttaggaggggagcgctttgcagcaacttttcaagaaaaggggaaaatttaagcaccatactgttatgtggtccttgtacccagaggccctgttcagctccagtgatcagctctcttagggcacaccctccaaggtgcctaaatgccatcccaggattggttccagtgtctattatctgtttgactccaaatggccaaacacctgacttcctctctggtagcctggcttttatcttctaggacatccagggcccctctctttgccttcccctctttcttccttctactgcttcagcagacatcatgtgaccttgaggatggatgtcacatgctggaggaaacagaaggccgaaaccctgatgacttcacagagctgccaaaacagttcctgactgtttattccgggtctttaacaaagtgatgaaaagaaatccttgcagtatgaaaacaacttttctattccatggagccaaacctcattataacagataacgtgaccctcagcgatatcccaagtattttcctgttctcatctatactatggcaaaggggcaaatacctctcagtaaagaaagaaataacaacttctatcttgggcgaggcatttcttctgttagaactttgtacacggaataaaatagatctgtttgtgcttatctttctccttagaattattgaatttgaagtctttcccagggtgggggtggagtgaagctggggtttcataagcacatagatagtagtgtctcttagcttccgtttaaatatgggggtagcgatgtggagggcccagaagtatcagagaggagagacaggctgctctgattgcctttgtaaaatgcacatttgagcttgtgcaaagccctgggcctgagctcagaaaaagcaaggccaggaatgaggctcttggttcagttcccctgcacaccctgggcggggaggggttgttagagtcatggaacccctatttttttttttttttttttgaccgggtcttgcttggtcacccagccagagtgcagaggtatgtgcacagctcactgcagcctcaacttcctgggctcaggcgatcttcctgcctcagcccccagagttgctggagctacagccccatgccactacacctgtctaacttttgtactttttgtagagacagggttttgtcatatcgcccaggctgctctcgaactcctgagcttaagaccaggttgctcaagtgatccacccacgtcggcctcccagggtgctaggattacaggcatgatctacccctcctggtttatctttcttaagcttggagtcatctttttaaaacagccacaatgaggtataattgatatacaatacactgcttatatttaaagtggataatttgataagttttgccatatgtttacatctgtgaaactgtcaccacaatcaacagggggatcatatccatcacccacaaaagttttcttaggcctcttccccctgagaaaaccctctctctggcagccactgaactgctttctgtccctgcagattcgtttgcattttcttaagttttatataaatggaatcatagagtacgtgctcttcttttgtctgtcttctttcacgcagcataattattttttagattcttgtgtcttgtgtgtgtcaattcttttctttttattgatgaataacattccattgtatggatataccacatctgtacagtttgtttaatccattcacctgtcgatggacatttggatcacttccaatatttggctattaaaataaagctactctgaac

SEQ ID NO: 15026 - DNA, 2405 bp, Homo sapiens
  CDS (1373)..(1717)
atgttcatcttttgtaaagttaaaaaaaaaaaaaaaagccagcctccaaggctgagaatcgatattaatttcatgggcttatgggcagtgagataaagcaggtttctggcagccctttccagccctattggattttacaatcttgaactgtgaagacagcgaataaaggtatcaagggctctgcccgtctccagctgtctcgggccagagctcatccaaatcccccaccttccatcccagcctgcagccctctgaaaggcaggttggatggcaagaaatgtcagcttgagccctcgaagacggctcactacaaggacagttgggattgtggctttaggagggatttatgcagctcctctggggcaggtgaggaccacggggtcatgctagagagtcagctcaacgtggctgcctgggacacgtctatgtgccagagggcagccaaggggatgactgactctacatctggttttagaccagggctgctcgtccgggcaccattgaggtagggcaagaatgggctcagcgtgctggggaccatcctcctctgcaaccctgccctccctgcatttacgagcccgtgcgtggcactgcccgcaccagctagcctgggcatcttccctctgtgtgatccatttcagggcctgttgcttggtctttctgaaactccagcttcgtgggggtgacccacacaagtgaaccttcgccccctccttgtactctgctatagccactttgaatttctcactggatgactgtgccgggttccgccacctccaggctcacacaggctgctccaactgccagaaatcctcacccttctagctttgcttggtggcttcttacccttcctcagttctcagtgtccacgtcatgccagaaaaaccttctcggcccttctcccctatcccctctctggccccggccccaaggccacgctgtgcctagcatgttgtaggtcccagttgaagttgaatgaataaatgagtgaaaagccaagggagaatggccacccaaccagtgcctgggatggaggcgcagctgtggccagcagcagaagccccatgctcccccaatccagtgtcacctcttgtgcctcccttcttcctccgtatcagggtgggcggcttcccggactgctcccagtcctgtcccagctcctccatcttgagttcagtgtggacctgcctcctcttcaccctgcaggtcgccagctctccagatcctgctgaccaacaccaaagtccctcgcaataccagggcccttgtggctggcgtcagaaacaggctgctcaagttcccagagatcgtggcccccctcctgacctcaatagatgccatctccctggagtgtgagcgcgtgctgggagagatgggggaagccccagccccggagcagtacctcgtgctggaagagctcattgacatgaaccagcaccatctgaatgccctcggcgtgggccacgcctctctggaccagctctgccaggtgaccagggcccgcggacttcacagcaagctgactggcgcaggcggtggtggctgtggcatcacactcctcaagccagggctggagcagccagaagtggaggccacgaagcaggccctgaccagctgtggctttgactgcttggaaaccagcatcggtgcccccggcgtctccatccactcagccacctccctggacagccgagtccagcaagccctggatggcctctgagaggagcccacgacactgcagccccacccagatgcccctttctggattattctgggggctgcagttcgactctgtgctggccagcgagcgcccagctcctgacactgctggagaggccccagccgcttggcgatgccagccaagctctgcagtcccagcggtgggacctagggaggcatggtctgccctctgcatcctctggagccagccgagcaggaggcctaggagggtcctctgagactccagacctgaggcgagaagggctgcttccctgaagctcccacagtcccatctgcttcaggcccccgccttggcctgtgttcttcctggccgcctgggtccaatgctcaggtgctggggcctggttcccggagaagtgtgccttctctctcccttttcagggaccgccccctgtctctcagggccaggcctctccctcctccaggaagccttcccctaccccttgtcgcccctccctcccagagcacctgctgtctgggtggctcactcagcacttggtgtggccttcccttctacctagcgggatggggctcccccaggggctgtcccggaggcggtgggcctggttaaataaggcagggtttatatgcactttcttccgatctgtacctgagaggtttgtggaaaagatggcaaatggggaataaaaagattttgtgtcaac

SEQ ID NO: 15027 - protein, 115 aa, Homo sapiens
MGEAPAPEQYLVLEELIDMNQHHLNALGVGHASLDQLCQVTRARGLHSKLTGAGGGGCGITLLKPGLEQPEVEATKQALTSCGFDCLETSIGAPGVSIHSATSLDSRVQQALDGL

SEQ ID NO: 15028 - DNA, 2663 bp, Homo sapiens
agaccactttcttcattcttttctaaactgctgcagattgccgtgaactctatcaatagtctcttttccgcaggcaaagtggcattttctaaacatgtttgcttactgccaggtggtttgaaatctatgatttactgcagtagtatgtgcttaaaacaactgttgaggtcttttaagcaggaaagttcaaaaggaagtgtcctgataatggtactggtttttctacaaatataagtagtcattagaagtttgcaaccaccaccaagtctgagagaactctgggatattctgtgggttttggcatattagatagagaaaatgacagatctagatgaagggagcttttggatgtgtgcctttaaaaactgattatgtataaatactgatatttcacatacggagatatttgaagacccaagtctgcctttcacagagccctccattccaagtttagtttttgtcaaaatatgaatcattttatttgactgtactatcagtacacaaatgcatgagtatgtttatacagtgttagactgatgtgaatttgcatttgttacattacattgccagcgcatatcatttagcaagttggcattaacatttatgctttaattaaatgccagtatacctatgtgtgcagcagtaaaaaattagtgagaaaaagcaactttttgtcactcttaggaaatattttgtcttattagtgttcttggcacatgtatattactaaagtagataattccaatgagaaatactaccagattattgttataaaattaatttacaatgtccctgatattgagctaactcttaaaaaaaccaaacaaaactcgtatctgagtgtaactttgccaatattttaaaagccaaaatattctctggacaacaaatttgtattgctcagggacagtttaccttgcctggtaaaccttcccaaacagaaatatagctatactatctttggttttgtttttttgttttttttgtttgtttgtattagatggaatttcactcttgtcgcccaggctggagtgtagtggcgcagtctcagctcactgcaacctccacctcccgggttcaagtgattctcctgtctcagctccctgagtaactggaattacaggtgcacgccaccacgcccggctaatttttgtgtttttagcagagacagggtttcaccacgttggccagggtggtcttggactcctgacctcaggtcatcctcctgcctcggcctcccaaagtgctgagactacaggtgtgagccaccgtgctcagccactagctttggttttttaaacatagattatattcctcaagatgaagggcttaacatatccacagcttcctcagtttgctaactccccatgcatctttgtgaaggacagtatctagtttatctgtaggtcagtgttccttgtgctgtcatttcccttatatctggaatttgtcagcattcctgaaaacctacacgtgtatatcagtaaccaaaatgctatgccttttttgcacctttgtacagcagccaaatcatgaactcaaaatgtatttgatcacagttctataatgtttttacctacctattatggaataatcagtttttacagagattattaatatggtagaaccctgttatgtaattccaaaacttaagaaccatatttacattgcttaacacagaattttacatctaagcaaggactggctttagaagcagtgtagttctacctctcattttacagatgagaaaaccgaagcccagaaaaactctcatttgctcaaagtcacagagaaaattagtggcaaagccaaaaagattcagatcttctgactcgaagttgagagttctttatactctattatgctgcctctccagtgtaatatttgcctttctgtaaatgggattaaatatgatttgtaaataaaggacatctgacctccttttttggtacattaaggcactttataaatggacttttattgtctcatttttcgtatataattatttccatcatattctttatggaagatgcaattaattttaacttttttactcttataaaaccagttcctgacattttaaaaaacaatatctgtaaaatggatccttttatgagtgaatttttctgctaattgcccaaggctaaatccaatttaaggattgcttagtttctttattttgtttatggtctctgaactggtatttttttataaaccaggctaattcacaggtcataccatttcattcttgtcgtgttggcttccagtcactggaaaagcttttgcattttaaagatttttagagccatgcaaaactgggcattaaatgttgcataaagcaaatcttttaagtaaggtaaaatgttgaagtcttaaccagaattcctacaactaattactaaaactgctatttctaactcttcatgaaagcattacctttggaaagttaaactttttttttcctttcatcaccgtctttgaaacaaattattttccaattcataagaactttggtaaaaaaaaaaataaaaggaaattatatgtttttctttggacattcattggaaggcttgttgaagacatgatcccccagaagccttagtgacccagatctcaaccagagactcaagatagcctcaaatacagtgaaagattatgtatcc

SEQ ID NO: 15029 - DNA, 3535 bp, Homo sapiens
  CDS (266)..(772)
aaagcggcgggagggagccgagagacccgagtgcacgtgtggagaagcggcggcacaagcgcggcggcgggagacactcccgcccccaccagactcaagccctcactcgactctcgcggccttcgttgctcgcacagctccctgcccaggctaggaggccggcttgcggggttgagtggcccgagctaagggtgcggagacctaagggcggcgactacgacggcgttgatatcggtggtaacgacggcctcagcaggcggggaagatgaaaggtagccggatcgagctgggagatgtgacaccacacaatattaaacagttgaaaagattgaatcaggtcatctttccagtcagctacaatgacaagttctacaaggatgtgctggaggttggcgagctagcaaaacttgcctatttcaatgatattgctgtaggtgcagtatgctgtagggtggatcattcacagaatcagaagagactttacatcatgacactaggatgtctggcaccttaccgaaggctaggaataggaactaaaatgttaaatcatgtcttaaacatctgtgaaaaagatggtacttttgacaacatttatctgcatgtccagatcagcaatgagtcggcaattgacttctacaggaagtttggctttgagattattgagacaaagaagaactactataagaggatagagcccgcagatgctcatgtgctgcagaaaaacctcaaagttccttctggtcagaatgcagatgtgcaaaagacagacaactgaacaaattacaaatgaactttcttgcacttgcttgtcgccaaataaaagagaggcccattgattcctcccccaccccaacacttttcctttaaagcttttctccctccttgttcttgtttttctttcttcctttccttttctctgagagttttaatactttcaaggactttaaaaaaataatcatgtttgaattgctttctcttatttttgtgaggtggtttgaaggaaggacaaggtagatctgtttagttttgcagttgaagttagatggtcctaaacatttaattgtcaaataatttcaaatttaatgtcctgctttcacattgaagggcagagcctacaaaacattgtatatttcaagagacaaaaagaagcagcagcagtatcttgttctctaattcatagacaagttgagtgtgtttgtggtactttgggtttttaaacactttgggatactaatccctagacattgccttcactccacctttagtccttctgagcactctctcgggagttggaacattgttatccttgtaagaaatactaagcttatgttgatttttaagtaattatatcttctcttcttgctggtgggtggggcagtttggtttagtgttatactttggtctaagtatttgagttaactgcttttttgctaatgagtgggctggttgttagcaggtttgtttttcctgctgttgattgttactagtggcattaacttttagaatttgggctggtgagattaattttttttaatatcccagctagagatatggcctttaactgacctaaagaggtgtgttgtgatttaattttttcccgttcctttttcttcagtaaacccaacaatagtctaaccttaaaaattgagttgatgtccttataggtcactacccctaaataaacctgaagcaggtgttttctcttggacatactaaaaaatacctaaaaggaagcttagatgggctgtgacacaaaaaattcaattactgtcatctaatgccagctgttaaaagtgtggccactgagcatttgattttataggaaaaaatagtatttttgagaataacatagctgtgctattgcacatctgttggaggacatcccagatttgcttatactcagtgcctgtgatattgagtttaaggatttgaggcaggggtaattattaaacatattgcttctattcttggaaaaatagaagtgtaaaatgttaataatacaaatgtcactgtgacctcctccactgagaggactggtttatgccagatcattttccggcacacacggagtggctttgacagattgataactttgtaagatgggagacatctgaaatattcatgttttccttttgtagtcccatctccactatttagaaatgttctcagactttaaaataatgcacagggcttgagctttctgtcatttgactttaaaaggaagtttcattcatatttatcctcttatgtaaaattgcggtataaagtctcatttccaaatatgttaaatgacaaaattattttataaaatgtttatgcacactttataaccttaagtttttatttgagaatgtgaaagtacaaagtgcagtagacttcaacaatcttgagtgccaagaataatacagaaaaagaagacagttgatgaatgagtttatagggttctaatcttaagatggtaaaaatgtagaaagaccttgctggttttttgggggtattcgtttcttaaacaatccaaatctaagcttagaagaaaagtttagcgttaagcacctttatcttcatgaataagcttcagcttgctcttggcaagagaagagtgcttgagttacagaaggcataagtagtttgaagaatgcagcagcctttttgtaaacttcccagatatcaaaatagactttgatatataaatggttttctgagatgacactgcctctatttctataaccatttcacctggactatctaatcagtcctatgaatgtatccctaaatgtggttattgaaaacctaatagctgcctcatgacaagtacatgttatttaaggaggaaaaaatattaaattttgaattgagtgtgtaggctccctatcattatatatagagtttctttttccacggtagtcagtgacttaacctgaattgtaaatgtttgtaaagggttaattgtcctacatcaaacttagttaaataattccatccacttatggaggaggaggagaatgtggaagaggtaaaaagctgggcacaagttcatatgcctatgagtcagtaaagactgaagtaatgtcctatgttgagctggttattttgatatatgataataattatctttgaagtagaacaattctgttaactggaaaatcacaggatatatccatcatatttttcaggacagatagtttttactgtggggcaaataggctaaaattacactatgttagttgcatttaggttttaaagcaaagaatctgtagagaaatctatgcaatatatagtttgtccagattagctttcatttggggaatgaagttctgaaatatctaaagcagtttactcatcaattgaaaagtcctccaaaaagagaactattgggaaaccatggtgcggtggtggaaaagaaaagctccctcagttttttggagggaataacttaaaaaaatacttaaatggctaagtttacttggtgcagttaagaattaaacttgtcaattttaacattgctgttacatctgaaataaacttatgtgatgtt

SEQ ID NO: 15030 - protein, 169 aa, Homo sapiens
MKGSRIELGDVTPHNIKQLKRLNQVIFPVSYNDKFYKDVLEVGELAKLAYFNDIAVGAVCCRVDHSQNQKRLYIMTLGCLAPYRRLGIGTKMLNHVLNICEKDGTFDNIYLHVQISNESAIDFYRKFGFEIIETKKNYYKRIEPADAHVLQKNLKVPSGQNADVQKTDN

SEQ ID NO: 15031 - DNA, 2429 bp, Homo sapiens
  CDS (74)..(709)
agcagtttctgtgggcggacagggaaccctgcgtttctactgtgtgattctgccaccttcctggcccgacgccatgggagtgacttgtgtgtcccagatgcctgtggccgagggcaagagtgttcagcaaaccgtagagctccttacccggaaattggagatgcttggggcagagaagcaaggaacattttgtgtggactgtgagacttaccatacggccgcctctacccttggcagccaaggtcagaccgggaagctgatgtatgtgatgcacaactcagagtacccattgagctgtttcgccctctttgagaatggcccttgccttattgctgacaccaactttgatgtgcttatggtgaagctcaagggctttttccagagtgctaaggccagcaagattgagacccggggcaccaggtaccagtactgtgacttcctggtgaaggtgggcacggtcacaatggggcccagtgcccggggcatctctgtggaggtggagtatggcccctgtgtggtagctagtgactgctggagtctgctgctcgagttcctacagagttttctaggcagccacacaccaggggctcccgcagtgtttgggaacagacatgatgcggtctacggcccagcagataccatggtccagtacatggaactcttcaacaagatccgcaagcagcagcaggtgccggtggctgggattcgttagtgatgagcagctgccagctgagctctgtcaccaggggtactccacaggaggagcaggtgctgactttcaggtccctggaccccagaaacccagggtagacatggactctactctccttctctggttctcagctgtggcttttgttctggggctgagtcccctccccaaccccctgactctcacacatagccccccatcagctgttttactccgtgccttactggatttggcctgtcctcaagaatggtaattatgaagagtggagaagtttggaccttgcctcctttaggggaaaggtaggacaggaatgtccctgcctggtactggtgggggaaatagtccgtatccccaactattaaggatttgtcccaggccaatggtgaacatgctgcattttatgtttggattgtgctgtaataagagcctcttccttccctcagaggatgtggctgggcttctatcctagagatggagtagaaggcacaactggtttgatagttactattttctgacctgtttgctgaagtgatttgcgaattgactttcctagggtgttgcctgagtcctttgaaatctccttctgacatctttcccttctgttgtgaaatatgttaagccacaggccaaactgctataagatcgaagtttgtttttttctcacctaataatagagaggtaatcagatggtctagggcagatttaactctacaaggttatcaggaactttgtttccttctgtcttattcagccattcccagtatgttttcttacccataagatcaaagcagactcatcagctccatatctgcattccactggggaaagagagagagaaaagagcagatttttaaaaaaagatatgactgagcattgctcagatcactgtggccacactttgctgaaagagatgctgggacatagaacctcttatctgggcagtcatgtgctgagttaaaactcagggattctgtgactacaagatgaaagacaatttggttgctgagatgcagttaatggcttctgttacatggagctcaatggacgtgcccaggaatgcttttggctgttattttgcagttaatacctcctgtaactaaagcatttgtttatgggttgacttgagagaagggctgatctcagagccgctttgagctaagttggattagtcacactaggaagttaattccacacctttcgtctaagtctcagtattgaggcctctccagttctcatgcaccctgatcttagggttagaatacttgaccctgatacctgcaccatgcttcatggttcctgagctctttctcctgtttcatttgagcctccaaactacatatttggtcatattgcctgcctaccccatgcctgctgcagaaatattcatccaggttaaccttgatatacacagagatggtcttggagaattgtgaatgtatgtactgtattgtcatcaaggatactgtcccttatttgaaggcatctaaagagaaactgttttcagatccaagtgctcagatctaaagcctctgcaacaagtcaggtggtggtcatgtttcccttctagttttggctgacaggaagctcagttcagtaccataactacagaacctgtcatctgtattttttgttctcaccccgtttttgttattttgtttctggttttttatattgaggtatgttttagatatagtttacaaaaataaaacgcacagatctt

SEQ ID NO: 15032 - protein, 212 aa, Homo sapiens
MGVTCVSQMPVAEGKSVQQTVELLTRKLEMLGAEKQGTFCVDCETYHTAASTLGSQGQTGKLMYVMHNSEYPLSCFALFENGPCLIADTNFDVLMVKLKGFFQSAKASKIETRGTRYQYCDFLVKVGTVTMGPSARGISVEVEYGPCVVASDCWSLLLEFLQSFLGSHTPGAPAVFGNRHDAVYGPADTMVQYMELFNKIRKQQQVPVAGIR

SEQ ID NO: 15033 - DNA, 2316 bp, Homo sapiens
  CDS (120)..(1727)
ctactccgagaggccccgggtccctctgccacaacttctgtcgctctgccgcctgcaccgtgacccgcactattcacgggagccctagagaggacaccgggacacccagaagccggggaatgatgtttcaggattcagtggcctttgaggatgtggctgtcagcttcacccaggaggagtgggctttgctggatccttcccagaagaatctctacagggatgtgatgcaggaaaccttcaagaacctgacctctgtaggaaaaacatggaaagttcagaacattgaagatgagtacaaaaatcccaggagaaatctaagtcttatgagagagaaactctgtgaaagtaaagaaagtcatcactgtggagaaagcttcaaccagattgcagatgacatgctgaacaggaaaactcttcctggaataacaccatgtgaaagcagtgtgtgtggagaagttggcacgggtcattcatctcttaatacgcatatcagagctgacactggacacaagtcatctgagtatcaggaatatggagagaatccatatagaaataaggaatgtaagaaagccttcagttatcttgactcctttcaatcacatgataaagcttgcactaaagagaaactctatgatggtaaagaatgtacagaaaccttcatttcccattcatgcattcaaagacacagggtaatgcacagtggagatggaccttataaatgtaagttttgtgggaaagccttctattttctcaatttatgtcttatccatgaacgaattcacactggtgtgaaaccatataagtgtaaacaatgtggtaaggcctttactcgttccactacccttccagtacatgaaagaactcacacaggagtgaatgccgatgaatgtaaagaatgtgggaatgcattcagttttcctagtgaaatccgtagacataaaaggtctcacactggagaaaaaccctatgagtgtaagcaatgtgggaaagtcttcatttctttcagttccattcagtatcataagatgactcacactggagagaaaccctatgaatgtaagcagtgtgggaaagcctttagatgtggctcacaccttcaaaagcatggaaggactcacactggagagaaaccctatgaatgtaggcaatgtggtaaagccttcagatgtacctcggaccttcaaaggcatgaaaagacacacactgaggataaaccctatggatgtaagcagtgtgggaaaggctttagatgtgcttcacaacttcaaattcatgaaaggacgcacagtggagagaaaccccatgaatgtaaggaatgtggaaaagtattcaagtatttttcttccttgcgtatacatgaaaggacgcacactggagagaagccccgtgaatgtaagcaatgtggaaaagcattcaggtatttctcttccttgcatatacatgaaaggacacacactggagataagccatatgagtgtaaggtatgtggcaaagccttcacttgttccagttccattcgatatcatgaaaggactcacactggagagaaaccctatgaatgtaagcactgtggtaaggcctttatttccaattacattcgatatcatgaaaggactcacactggagagaaaccctatcaatgcaagcaatgtggcaaagcctttattctgccagttcatgtcgagaacatgaaagaactcataccattaatagatgagaaatccttttagtggaagcaatgggagaagctttctgttgtcccacttcctttgaaacacaagaaaagagagtggtgaaagaacctctggataactgctttttgaattgagaagagagacttgcgataggacaataaaatctagaagaacttggatggtttcgtaatacaattcacctatagccaatcttgcatgagatttcaaaggcacagaaaaggaaggcatcagtcacatattagaggccccacacagggagagaggtgtgtggctacccgcttccagcccattttcctgattctttggcttgttaatcgagaatatcccccaaatcacttgtctctgttcctcagagttgtaggtctccagatatgtccccagtgctccacattaaagatacatgcccactttgctgtttcttcagaaatgttaaaatgtttaccagagaactaataaatgttgttatggctggaaatactcactgatgcccaactcttctatagattgagttggtttaagaggtctactttgtattgcaagcattgttgtttctacggattagcgagcctgttcttgattaaaccaactagatgggagcttg

SEQ ID NO: 15034 - protein, 536 aa, Homo sapiens
MMFQDSVAFEDVAVSFTQEEWALLDPSQKNLYRDVMQETFKNLTSVGKTWKVQNIEDEYKNPRRNLSLMREKLCESKESHHCGESFNQIADDMLNRKTLPGITPCESSVCGEVGTGHSSLNTHIRADTGHKSSEYQEYGENPYRNKECKKAFSYLDSFQSHDKACTKEKLYDGKECTETFISHSCIQRHRVMHSGDGPYKCKFCGKAFYFLNLCLIHERIHTGVKPYKCKQCGKAFTRSTTLPVHERTHTGVNADECKECGNAFSFPSEIRRHKRSHTGEKPYECKQCGKVFISFSSIQYHKMTHTGEKPYECKQCGKAFRCGSHLQKHGRTHTGEKPYECRQCGKAFRCTSDLQRHEKTHTEDKPYGCKQCGKGFRCASQLQIHERTHSGEKPHECKECGKVFKYFSSLRIHERTHTGEKPRECKQCGKAFRYFSSLHIHERTHTGDKPYECKVCGKAFTCSSSIRYHERTHTGEKPYECKHCGKAFISNYIRYHERTHTGEKPYQCKQCGKAFILPVHVENMKELIPLIDEKSF

SEQ ID NO: 15035 - DNA, 2922 bp, Homo sapiens
  CDS (218)..(682)
gaggcgctccgggatactgagggcggagggcggtggcagcgctggcgctggggaccggcttggtggcttcgggaaacagtttggcgccggcggccgtccgtgttactccgcatcccgccccgtctcggcacggctagcagccccctggccaccagcgtccagcaatgtgtctcaccggccgggcgtagcagctgcgcgtgcgcggaaccgcggggccatgagcgaagccggcggccggggctgtgggtccccggttccccagcgagcgcgatggagactagtggcggcgacggccgcgttctgcctggtgtcggccacctccgtgtggacggcgggggccgagcccatgagtagggaggagaaacagaagcttgggaatcaagtactggaaatgtttgatcatgcttatggtaactatatggaacatgcttaccctgctgatgaactcatgcctttaacctgtagaggtcgagttagaggccaagagccaagtcgcggtgacgttgatgatgccttgggaaaattttctctgacactgattgattctttggacactttagaggtgattacctctagccatcagccttactccatcccatgtttggtatgcaatttgagccacaaggctcgtatcgccaacagctatatacattttgttccatttttctgtcttacagagccatgatagaactgtggttagtgagttaaaattcctggagtaactactgtttttctcctttgaaacttaggtttctaaagttgcacctaaggaatctgtcacattttctgttgaatcatggtttttgtttttgtttttaacagatattccttctgatacggacttgaaaattagtgtatggtgacctgtgtttaaaaaaaaaagtacaatacaactacatatagctatatagcttaatgagacttccaccccccccctttttttttttggtttgttgttgttgtagtagtctggtgctggccacatttaagtcttaaaaatttttaaattttgttgttgatgtttgtagacagccctgttgttgaaatcatggctttattcattttatctattttttaaacttgcctgaatttgttctaaaggaatatttaagagacataattttcttctctgtaccataacattacacaaaactttttcctaaaacacggttgtgaggtactgatgaggtgtaagtggagctgttaaaaacagcagtgctgtattgcagttatgtatattcgtgtacagtatgtttagatcccaggtaaacatattcttttctgagaggataaatacctgcattcagatattccaggtaaatataattgagtcagggagtagtaaatctgatggagaattcactttggggaggggaaaaagaatagtatgcaagacccttattggcttttaattatacctgaaaccaaaatggatatttttagtctctctgcatgtgagatttggtgtaacaagatagaactataatatatacagtatatggaaggatagatatagtgctttgttcattttaattgcaaagctgccaaaatagttgaagcttaattacttgacttgccttgatttataggactggggcttggagaaaatgagcagatgttcctctaagacatcgattacagaagccttatatacatggatttgattttgtatttgtagctgaaagtcactgttgtctaaaactaacttttctaagttatcaaaacaacctaatttcttttccaacaaggagaacttaatggcatgaaggattgtgtgacacattggaaaagccagcttaccgccactctcttcctttggccattagagggaggtgttgcctttcattgacgcttagaagcaaattgttcacttgttaagaaaagtaaatccttaaaaaaagaaaaggaaaaaatttaaccaatttttcttaatacccagaaggaattatactcaatatttccctagttaagaaaagaggagataatgttcgtctaaaaaactccaacgttgtaattacaactctacattcatttacttacttgacatactgccacaaagtagtttttgagttcattagaaattccaaaggcattagttgtttttttttttttttagtgttttgttttttagttaacttttatagacattttagtaacttgctaaagattcaggggattctatgaaaccccgaatttagaaacatctggtctacctcagttaaatgttgactgcttagaaatatagctgaagtgatcaccacagccataaaattgtttaagaaagatttatataatgtttacaaatctggaatcaaggattttagctgaaatcctttaagagatattagagcaagtatttaattcaggtattttcaagttttaaaacttaacctgtttacctactaaaaataaaatagctagtttttttctgcatataaaagttcattgaaatgatatgcccttatttgcaatacttttcccataaagttttaagtgtgaaagaattgtaatttactagatatgtttggtatgggatattttgttaggcaagttttcttttttcttcttaaattgcaataggcttccaaaaagagtataattgtttcagaacaaattaactcttggcattatacgtctccctttttctttacagtattagtaaaaagaaaaattgtacactttctgattttaacttcactaatgtaattactctctcaagaagcttttaaaatttaaattaccatcacacaaccttttttatagtaaagccaacatttgttctctcaccaaaccccatgccaaattcatcatgaagaaagctcagcataagtagttcaaatactgcttataattttagaggggggtagaatttagtaaatattccagccggtcgttttatgcacaaggcttcagtcagaacat

SEQ ID NO: 15036 - protein, 155 aa, Homo sapiens
MSEAGGRGCGSPVPQRARWRLVAATAAFCLVSATSVWTAGAEPMSREEKQKLGNQVLEMFDHAYGNYMEHAYPADELMPLTCRGRVRGQEPSRGDVDDALGKFSLTLIDSLDTLEVITSSHQPYSIPCLVCNLSHKARIANSYIHFVPFFCLTEP

SEQ ID NO: 15037 - DNA, 2464 bp, Homo sapiens
  CDS (62)..(1249)
atttcctccagctagaggagctcaactgatctgttttctttcgcccagccaaaatcacagaatgaaggcggtgaagagcgaacgggagcgagggagccggcgaagacaccgggacggggacgtggtgctgccggcgggggtggtagtgaagcaggagcgtctcagcccagaagtcgcacctcccgcccaccgccgtccggaccactccggtggtagcccgtctccgccgaccagcgagccggcccgctcgggccaccgcgggaaccgagcccgaggagttagccggtccccacccaaaaagaaaaacaaggcctcagggagaagaagcaagtctcctcgcagtaagagaaaccgaagtcctcaccactcaacagtcaaagtgaagcaggagcgtgaggatcatccccggagaggacgggaggatcggcagcacagggaaccatcagaacaggaacacaggagagctaggaacagtgaccgggacagacaccggggccattcccaccaaaggagaacgtctaacgagaggcctgggagtgggcagggtcagggacgggatcgagacactcagaacctgcaggctcaggaagaagagcgggagtcttataatgccaggcgacgggagcatcgccagaggaatgacgttggtggtggcggcagtgagtctcaggagttggttcctcggcctggtggcaacaacaaagaaaaagaggtgcccgctaaagaaaaaccaagctttgaactttctggggcacttcttgaggacaccaacactttccggggtgtagtcattaaatatagtgagcccccagaagcacgtatccccaaaaaacggtggcgtctctacccatttaaaaatgatgaggtgcttccagtcatgtacatacatcgacagagtgcgtacctactgggtcgacaccgccgcattgcagacattccaattgatcacccgtcttgttcaaagcagcatgcggtctttcaatatcggcttgtggaatatacccgtgctgatggcacagttggccgaagagtgaagccctacatcattgaccttggctcaggcaatggaaccttcttaaacaacaaacgtattgagccacagagatactatgaactaaaagaaaaggatgtactcaaatttggattcagtagcagagaatacgtcttgctccatgagtcgtcggacacttctgaaatagacaggaaagatgacgaggatgaggaggaggaggaagaagtgtctgacagctagcaaactaagaacccaaactattgatacacggtttccttcttggaagtctttgattgactcagagagcactatggtggtgggtccagcactatggtgctctctgtaatgcctcttactgccttaagtctttcctctgttgctgaccagattgtgttaccatttgaatacactgactaatgtttgttaaactttttctgtggcaccttggccacatgcctgcaggcatttgttttcagaacagtctcaccaattacaacacaccgtgttttagtagaagtgttgtggttttagttggtgctttcagaactgctgcctaggaaactataaacccttggttaaggggaaatcatggcttgttctctttgtacagttactttatttatataggtgttaagctttgtggaccaggtgtttttcttttggggcgaacccctgagcagagaatcttactaggctttggttatcaccaaaacaacctccagtatataccaaagctttgacttgtttgagctcttgagcttagaagttgattttgcacttatttttttggggggtgggaatgtactgcagtcagtaaacattattgactgtttaacttaaacagatgctttatggcacctgctcaagcccgtgactgtacagaaggatcctggttgctaccagtgggtgctgattcagcatcacaagtgactgaaattggctgtggatctgttctttgtgaaagaattcctgatttctccatggagcatgtacacaacaattttgatcatattaactgtacttcagttttgcatttttattcaaatgttatctctttttttctttgagaaataaactgtcactgatgtgacagcgttctttctttattctaataacatgtatagatctaaagcaggttgtgttgtttacatgtttctacacatttcatcctttaaaaagttgttgagagaggttgtatttaccttcccaaggttggaaagcaggggaatttcccagtgtcctagttttccaccagaggaatatgtgtaagtagcaaagtatttgctgcttacatatagtgtgtatgtatgtatatatgtaaattgtgtgttaaagagctgatactgattttcatatgacaatgttaggcaaaggcctccctgcatttgaagagcaggttttcatttatatgtatttttgggataaaaaaataaaatttgtaaatatagcccc

SEQ ID NO: 15038 - protein, 396 aa, Homo sapiens [sequence omitted]

SEQ ID NO: 15039 - DNA, 2504 bp, Homo sapiens
actattccatattattaaaaagaaaaaaaaaaagccaaaaagaaaaaaaaaaaaaaagcaagccacctctctctttcttttcttgctctctttttctttctctctctctcaagtttgtgcagggagatggtgaactgttttgtcagaacttaaatggaaaaaaaaataaaactacaacaagcctaccttttataactgggtgtttagtgctaaacagccagaaccacagagacagtattgtatgaccaaagcatttgatgccaaaatttgacgttaaagtaatgatttgatttcctgccctggttttgaaggtccatttttttcccttttgcattgacttgcttgtttcccctttgaaacacctaaaaatacctttccaaaacatcgcgagagcatacatagacaaaaatgaaatagaaagctcttgcatgcttgagtccaccattgggggaaatgacagaaaactggacctgagggcattaggaacatcctacagagttgtgtttagtgtcgtttgccatggtatttcacagtgaaacatggatactctccacacatcatttacttcatgctgtgtacttatgtactggtttttgcattttactcacttgataagtctgctccactggtttcatcagatagacttgctgctactggcttttccattgtagattgggttattttacacgcagttcgccaaatgggattgctctgtatagtcaaattggtgatggacagatggacagaatgcagaggtacatagatgagctgaggctgatccagctcccctgaaattcagagtgttaactttgtagaccctgcacaatctcttggtgctatctagccattacccccattttttttttaaaggccatctgaaattccatttgtcatggtgggaagcattttggatatgatgcaggaaatctcttcctggagtcaaaagttcccaagaggtcctgtatttttaagaaatggaatttatttaaataatatttaagcttgtgcccatgttggccgggcaacttttttcaatggtgcttattagaagaagttttttcatcttgtcattttaagaaaataaaactggaaattgaatatgggtggcatgattgtacccttttagttctcttatttttctactcctctgtccctctataactatgccatactattagatgctggtccactgaatgctgagatgatctgttttttggggttttttttttttaagaaatattttcactggttttctgtgactctctaaacacttcatcgaaactagaagactgaattatgaggaaactatttggattagtggccagaaacgatgaaatcttatagatcttttgacagtttctctgtttaggggagcctagactgatatcaagtttcttcatatcaaagcttcattggtgacctcatttgctttacaagtgaccagccatcttgcaggcttcatgcttctgagagccttacttagaagatgctgctggagtcacagctgaggagaggaatactgtcaacatgggctatcctgggaaagagctaggaagtagatgctgaggtccccatccaaacagcaagctaggaaaaagcctgccttgaaaatatttctagacatcaaagataacttacaacccaaagtgaataataagtaaatagtctgatgaccctcttaatagcattgcaattgtattgaatcacataatgattcataagtaactagggaaccaactgattttgctaagcaatcttccccttataacaccacaggcccttctgacacacaaaaaaatgaaagttaatcctgggtacagcatacagttttacatttaaacgcacagtcttacgtggacaaatgcaagcacaagcctaaagcaaggtcaagcagatggcaaaaccgaatttgcctgcaaagaaatctatttaactgaatcagcccataatatttgaggcacgaggttactgtgattgataggaaagataaaaatgatgtctgtttttgtagacgaataaccatcaacatgacaacaaaattcactggggtctaccagcgtgcattccatttcccactgaccatgcaggtgcacgtcgcggaaatactggtttaactactagtgtgttactgcctcatttatctacataacattattaactagaacataatgctttcaaagtttaagttaatgttatatattatgtataaatatatatattcataatgagatatatgtaatggatagtacaaagtttggagactcaacaaatgctctaaccttctagagacaaaagtcctatttctgttttcttttgtctttttattttcaattagtgacccattgttaaatccaaatccacttttactgaaaaatactgtacaagtgtaaaatgttcagttgtttttttgtaaaatatagtagaacggttgtaactgatactggccaaaatcaatgttattccatattttattttttctattaaattaacctaagttcctgttt

SEQ ID NO: 15040 - DNA, 3652 bp, Homo sapiens
  CDS (53)..(2773)
acttccgccccaggtacgctaggccgcggccttcgttcctcccagaaaggagatggtgacattcaaggatgttgctgtggtcttcactgaggaggagctggggctgctggactctgtccagaggaagctgtaccgagatgtgatgctggagaacttcaggaacctgctcttagtagcacatcagcccttcaagccagacctaatatcccagctggagagagaagaaaagcttttgatggtggagacagaaaccccaagggatggatgttcaggaaggaagaatcaacaaaagatggagagtattcaggaagtaacagtaagctacttttcccccaaagagctttcctcccgtcagacctggcaacaaagtgcaggtgggttaatcaggtgtcaagatttcctgaaagtttttcaagggaagaattctcagttgcaagaacaaggtaattccctcggccaggtttgggcaggaataccagttcagatttctgaagataagaactatatattgactcatatagggaatggctccaattatataaaaagtcaagggtatccatcttggagggcacatcattcttggaggaaaatgtatctgaaagagtcacataattatcagtgtagatgtcagcaaatttccatgaaaaatcatttctgtaagtgtgacagtgtcagttggctctcacatcacaatgataaactggaagtacacagaaaagaaaactacagctgccatgactgtggagaagatatcatgaaggtatcattacttaatcaggagtcaattcaaacagaggagaagccctatccatgtactgggtatagaaaagccttcagtaatgactccagctctgaagttcatcagcagttccacttggaagggaagccctatacatacagttcatgtggaaagggctgtaattatagttcacttcttcatattcatcaaaatattgagagagaagatgatattgagaattcacatctgaaatcctatcagagagtgcatacagaggagaaaccatgcaaatgtggtgaatatggtgagaacttcaatcactgttcccctcttaacacttatgaacttatccacacaggtgagatgtcctataggcacaacatttatgagaaagccttcagtcatagcttagaccttaatagtatttttagggtccatactagggatgaaccccatgaatatgaggaaaatgagaatgtctttaatcagagttcatgtcttcaagtccatcaaaaaatccacactgaagagaaactatacacagatatagagtatggaaagagtttcatttgtagttcaaatcttgacattcagcatagggttcatatggaagagaattcatataattctcaggagtgtggtaatggcttcagtctggcctcacattttcaggaccttcagatagtccacactaaggaacaaccatataaacgctatgtgtgtagtaacagcttcagccataatttacatcttcaaggtcatccaaaaattcacattggagagaaaccacgtaaggagcatgggaatggcttcaactggagctcaaaacttaaagatcatcagagagtccacactggacagaagccatacaaatgcaatatatgcggcaaaggtttcaatcatagatcagttctgaatgttcatcagagagtccacaccggagagaaaccttataaatgcgaggaatgtgataagggattcagtcggagttcatatcttcaagcccatcagagagtccacactggagaaaaaccttataaatgtgaggaatgtgggaaggggttcagtcgaaattcataccttcaaggccatcagagagttcacactggagaaaaacgatacaagtgtgaggagtgtgggaagggcttcagtcggagttcacaccttcaaggccatcagagagtccacactggagaaaaaccattcaaatgtgaggaatgtgggaaggggttcagttggagctttaatcttcaaattcatcagagggttcacacaggagaaaaaccctataaatgtgaagaatgtggtaaaggcttcagtaaggcctcaacacttttggcccatcagagggtccacacgggagagaagccataccaatgtgatgagtgtggtaagagtttcagtcagagatcataccttcagagtcatcagagtgtccattctggagaaagaccatatatatgtgaggtatgtggaaagggcttcagtcagagagcatatcttcaaggtcatcagagagtccacactagagtgaaaccgtataaatgtgagatgtgtgggaagggctttagtcagagttcgcgccttgaagcacatcggagggttcacacaggagggaaaccatacaaatgtgaggtgtgtacaaagggtttcagtgagagttcacgccttcaagcacaccaaagggttcatgtggaagggagaccctataaatgtgaacagtgtggtaagggtttcagtgggtattcaagtcttcaagcccatcacagagtccacacaggagagaaaccatacaaatgtgaggtatgtggaaagggcttcagtcagagatcagatcttcaggctcaccagagagtccacacaggagagaaaccatacaaatgtgatgcatgtggtaagggtttccgttggagctcaggtcttctcattcatcaaagagtccatagtagtgataaattctataaaagcgaagactatggtaaggactacccttcatcagagaatctacacagaaatgaagattctgttttgttttgaagtcctcaaatgggagctgaaattttccagtcactagagttctttcagtagaaaaagaatttttaaaaattaaaatgtaatgttgctgcccaacttcaacattcataatggccaggagaccacacaacagagacatttaatgagaggggtttcacgagggattttgttagaactttaacatcagtcattgcacaggagctaaggcttataaaatatgagtatggtcaggaatttaataaaagtacagtgatgagcatgcctaaatccatgttctctagaatgtaagcttggtgaaagaagggactttgttcattgctagtctacaaaactaggacatttcataacgcaatgtaggtgctcagtactttttgctaaataactaaaagtatgtaaaggtaaaaggtttgaaatttttaagcgcattttttaaaacttaaaatgtatttggaggagaaatcctgcaagtaatcttaataaaatcatttcaagtaaatatttgaaatgtagaacaataagcattatgatgatctgaaataacattaatttgattgtaaccctattggggttagttcccaccctttgttccatcttgagcagagatgtgctgcatttcttaacgtttggtctctatacattataccatctgctgaagtttagctttgtgtgtgtgtatatgtacccatgtgtgcactttaaatatcagtacaaactgataaacaatgtttctggttaatgttgcaaaaatggaacactgtattttacataattgattttctactcctgccctgtgaattaaggcagagttttactgtaatatttgcaagtatccaaaatggttactgatgacaaatactttttaataaatgtcaaaatcac

SEQ ID NO: 15041 - protein, 907 aa, Homo sapiens
MVTFKDVAVVFTEEELGLLDSVQRKLYRDVMLENFRNLLLVAHQPFKPDLISQLEREEKLLMVETETPRDGCSGRKNQQKMESIQEVTVSYFSPKELSSRQTWQQSAGGLIRCQDFLKVFQGKNSQLQEQGNSLGQVWAGIPVQISEDKNYILTHIGNGSNYIKSQGYPSWRAHHSWRKMYLKESHNYQCRCQQISMKNHFCKCDSVSWLSHHNDKLEVHRKENYSCHDCGEDIMKVSLLNQESIQTEEKPYPCTGYRKAFSNDSSSEVHQQFHLEGKPYTYSSCGKGCNYSSLLHIHQNIEREDDIENSHLKSYQRVHTEEKPCKCGEYGENFNHCSPLNTYELIHTGEMSYRHNIYEKAFSHSLDLNSIFRVHTRDEPHEYEENENVFNQSSCLQVHQKIHTEEKLYTDIEYGKSFICSSNLDIQHRVHMEENSYNSQECGNGFSLASHFQDLQIVHTKEQPYKRYVCSNSFSHNLHLQGHPKIHIGEKPRKEHGNGFNWSSKLKDHQRVHTGQKPYKCNICGKGFNHRSVLNVHQRVHTGEKPYKCEECDKGFSRSSYLQAHQRVHTGEKPYKCEECGKGFSRNSYLQGHQRVHTGEKRYKCEECGKGFSRSSHLQGHQRVHTGEKPFKCEECGKGFSWSFNLQIHQRVHTGEKPYKCEECGKGFSKASTLLAHQRVHTGEKPYQCDECGKSFSQRSYLQSHQSVHSGERPYICEVCGKGFSQRAYLQGHQRVHTRVKPYKCEMCGKGFSQSSRLEAHRRVHTGGKPYKCEVCTKGFSESSRLQAHQRVHVEGRPYKCEQCGKGFSGYSSLQAHHRVHTGEKPYKCEVCGKGFSQRSDLQAHQRVHTGEKPYKCDACGKGFRWSSGLLIHQRVHSSDKFYKSEDYGKDYPSSENLHRNEDSVLF

SEQ ID NO: 15042 - DNA, 2591 bp, Homo sapiens
  CDS (31)..(666)
aaactacaacgaaaaaagacagagctcataatggatgctatccataaacaaaagagcttacaattcaagaaaaccatggatgcaaagaagaactatgagcagaaatgccgggacaaagatgaggcagaacaggccgtcagccggagtgccaacctggtgaacccgaagcaacaagaaaagctttttgtgaaactggcaacttcaaagaccgcagtagaggactcagacaaagcatacatgctgcacatcggcaccctggataaggtccgagaagagtggcagagtgagcacatcaaggcctgcgaggcatttgaggctcaagaatgtgaacgaataaacttcttccggaatgcattgtggttacatgtgaatcagctgtcacaacaatgtgtcaccagtgatgaaatgtacgaacaagtccgaaagagtttagaaatgtgcagcattcagagggacattgaatactttgtgaatcaacgcaaaactggacagattccaccagcacccatcatgcatgagaatttctactcctcccagaagaatgcagtcccagcaggaaaggctacagggcctaacttggcaaggagaggacccctcccaattcctaaaagctcaccagatgatcccaattactctttggttgatgactacagtttgctctatcagtaaaatcaatgaaaccagagctttttccggctagtgcttctgtgatatggaaagggcacccagagcagcaggacctatagccacgttatgtcagcaatgaagactttgaagtgaacccttgctataattttttagagatttaaaatttatggtagacatttaggacaacataagcaagtagagttctgcagttttttgaagtttacaaattgccccattctgaagaattattctttcccagttactcaggttatgaatgaattaggttttcaacatgggaagcatgaaatccacttctggatttggagcatccacttgaggagcagaggtggcagcagaggattctgagccaccaactgcagtagtggctcctttggctttgggcagcctggctgtggagtttccacggcgacacacagcctcagtggtgcaagatttaaaattaccttcctttttggctggaagacttagaagccgcctgatcatactttctcattttacagatgaggaaataaagcctacaagtgtgaaattaatttccttacagttttcctagctgatgagggacagaaccagaactagagcctgagcccaacccacatcactattcttctaacccttcctgaagttgtgatgctcatgctgaaatttaagatgccaaatatttttgccagcactttttcagttgggagaatcaccagggtttaaatgtcagatttatttttatgtggatccctgtgtatgctgaactacagagcatgatgtttaatctaatttaaggagccactgattgtaaaacatgccattattttatgttgcactaagaaggtggggtcgaggagttgccaataaacttgggacagactattgatggccaagcccatctgaatttaagatgctaaagtatgaaaaaaatacatcttagaatcaatgaaataccatattttgattccattcctcaagataattttagagttataaaaccagtcctcaattttgggtcttcacagagaatctttcccttgctagaccccagaattttaaatgcatccgtcttacactttcacaaatatttgggttttcctttttcactcacaaacagcagggaggtcatgtactttttgtacaacacctgtgcactatgagaaaatggtaccttttagttattgacaagttaaaatagcactctcagtttttcagtattacagagagcaaatagtttcctctcctgctctgtgcagtagcttttccagaactatggacaaattgatcagaagaagattgattatttcctcatctttttttcttttttttgaggcagagtctctctctgtcccccaggctgaagtgcagcggcatgatctcagctcactgcaacctctgcctcccgggttcaagtgattctcctgcctcagcctcctgagtagctgggattacaggcacccaccaccacacctggctaattttttgtatttttagtagagacagggttttaccatgttggtcaggctggtctcaaactcctgacctcaggtgatccacctgcctcggcctcccaaagtgctgggattacaggcgtgagccactgcgcccggcctatttccccacctttcgtgtaaggtgctactgaacatgacagcttcttgtcatgacaggaaacttgcatcagttggatatccttttgagaaactgaattttgcaaagggccaaatttccccaaactgaacgggctcaggaaatgttcctttacactcagaacattctattttaagtatattatttattgttggcagttcctcagggatttcccttttctctgtattggtcagtgtagttgatgtaaaaccgttttgtggatggaaaatatttttattttattgctcttttagtttggtaggttaaataaaggttcttggtaatttggg

SEQ ID NO: 15043 - protein, 212 aa, Homo sapiens
MDAIHKQKSLQFKKTMDAKKNYEQKCRDKDEAEQAVSRSANLVNPKQQEKLFVKLATSKTAVEDSDKAYMLHIGTLDKVREEWQSEHIKACEAFEAQECERINFFRNALWLHVNQLSQQCVTSDEMYEQVRKSLEMCSIQRDIEYFVNQRKTGQIPPAPIMHENFYSSQKNAVPAGKATGPNLARRGPLPIPKSSPDDPNYSLVDDYSLLYQ

SEQ ID NO: 15044 - DNA, 2966 bp, Homo sapiens
  CDS (41)..(1105)
tagaaaatgccactcctcgggggaagtccagaatggcaagatgtccaccaacggtgtgtccaacggtgtgtccaatggcctgcaccttcatagcaatggcttccggctgccggagagtaggggacatgtcagcccccaagtagagctaccaccatacctggagcgtgtgaaacagcaagccaatgaggcttttgcctgccagcagtggacccaagccattcagctttacagcaaggctgtgcagagggcccctcacaatgccatgctttatggaaaccgagcagcagcctacatgaagcgcaagtgggatggtgaccactatgatgccctgagggactgcctcaaggccatctccctaaacccatgccacctgaaggcacactttcgcctggcccgctgcctctttgagctcaagtatgtggctgaagccctggagtgcctggacgacttcaaagggaaatttccggagcaggcccacagcagcgcttgtgatgcattgggccgcgacatcacagctgccctcttctctaaaaatgatggtgaggagaagaagggacctggtggcggcgccccagtccgcctccgcagcacgagccgcaaggactccatctcagaggatgaaatggtgctgcgggagcgaagctacgactatcagttccgctactgcggccactgcaacaccaccacggatatcaaagaggccaatttctttggcagcaacgctcagtatatcgtcagtggctctgacgatggctccttcttcatctgggaaaaggagaccaccaacctggtccgtgtgctccaaggggatgagtccattgtcaactgcctgcagccacaccccagctactgcttcctggccaccagtggcatcgatcctgttgtgcggctctggaacccccgaccagagagtgaagacctcacaggccgagtcgtggaagatatggagggtgcttcacaggccaaccagcggcgcatgaatgcagacccgttggaggtgatgctgctcaacatgggctaccggatcacgggcctgagcagtgggggtgccggggcctctgatgatgaggacagctctgagggccaggtgcagtgccggcccagctagaccctccagccctggtccccagcccctgctactggctggaccctctgccctgggcaggaggtcaggggattctgttttggtttgtcttccccaccacccttttttttcatttcccctgttttgtttgttagtttggcgttaggggtggaggtttctacaacttgctggctttcggactctgggctgattgtcccctgactatccccagccctgaaaaaaagagcaggaggggacacccctccatatgcccccccccatctcctgctttcatgtccctggagggctctggcctgcctcaaaaccccttctgcctcaggtggggaggaacaagctgaactgtcttcagggactgtcctgccctttagctggcagcagcaggaggagtgggattcccaattggtaagggctcgccttggcctgttgccactcttgctccctagcctgcaaggctagctcccctgtggtcttcaggaaaggttttgaaaaaggatgggtcccaccctccctccagagccaccagtgttagagcggagcccaaaggaaggatgggagccctggagtgggcaagaccaggccacctgctgaggtcgctgtggagcaccctcgctcctctcctggctactagctctggccctgcacctactctcactggccacctctggaggctctgcctttcccaagggccctggcagagggtggggcactgcaccttaccccacccatccatgccagcacttctgcactacggccattctcctcttgggcgctcctcagcctcactgtgacctttctgccagagctcccagccaggcctactctgctgaggtggcgcttcctgctaagggcccttctctgccctttctgccctccttcccaacccacatgctgagccgccacaaagaccaaagaagtgatggcttttctctgtcccctgctgctctgaggggagaggggtgggtctcctgagccactcagatgggaaagtcccttactcggcccctccctccccagcagccccaagctttacactggatgcagcgctcaacccaccactcaccaggcctctcctcccctctgcccccggctcttagctccagctgctccaggtagttggttcatccttccccctctctccctccctgcttccccttcagtgcttacttggctccagccctccagctgcagcccctggggaaaagcagcctcccttctcctctccctccactccctcgctccctccctcagcccctgtctctgccaggtgcctcctctcagtcaggcttcagagcagccctggagacaggagggccatgttaaaagctttttcacagttttaagaagacaagtggagggtgaggatagtggtggggggtctggcaccatctcattgctttaatcccagcaacacaggtggcagcttctcccccttccttcccaccccagtccctcttcccacccctctcttctagcttggtaatgaagtatatttattggtgaaggaaacagctgctgctgcttctcctgctgctgggacctgctcccctgtctcttctccgtgacctttctctagccagggagaagggagagcaggagtattggggctgggccctggggcccaaggaccagctgggtcccctttgctttcttgtgttccagccacctgccatttcctccctgcctcccaccctccctccctgccccctgtcctgcttcccaccccctgcctgcccagcctgggccctgcagtgtggagagacacataagccttactgtcctctgggggcaggagccgagcctttttgttgctccgctcccaggagagtgagggtgacgcaattgattaaaaccattttgttct

SEQ ID NO: 15045 - protein, 355 aa, Homo sapiens
MSTNGVSNGVSNGLHLHSNGFRLPESRGHVSPQVELPPYLERVKQQANEAFACQQWTQAIQLYSKAVQRAPHNAMLYGNRAAAYMKRKWDGDHYDALRDCLKAISLNPCHLKAHFRLARCLFELKYVAEALECLDDFKGKFPEQAHSSACDALGRDITAALFSKNDGEEKKGPGGGAPVRLRSTSRKDSISEDEMVLRERSYDYQFRYCGHCNTTTDIKEANFFGSNAQYIVSGSDDGSFFIWEKETTNLVRVLQGDESIVNCLQPHPSYCFLATSGIDPVVRLWNPRPESEDLTGRVVEDMEGASQANQRRMNADPLEVMLLNMGYRITGLSSGGAGASDDEDSSEGQVQCRPS

SEQ ID NO: 15046 - DNA, 2698 bp, Homo sapiens
  CDS (1651)..(2091)
catagctcactgcatcctcgaactcctgggctcaagcgatcttcccaccccagcctcccgaggagctgagactacaggcgcgcgccactactcccggctaattgttcaatatttttgtggaaacagggatcttgctatgttcctatggtggtcttgagctccttagcctcctaaagtgttggtatcacaggcgtgagccactgtgcccggcgttaacaatcttctgccccagggtcggccacagttggacaggagcaccctgcctcccctgtagcattcgtccccgtgcccggagttaactcctggacgacgtacacctgctgcactgctggatatagccattcttcatttttccctcctccacccaccatgtacaccccatcagcaagtcccatccgatatacccactacatacatctgccagctgttcccatctccacccacaccccggcctccagcatctgtctggactgctgcggcagatcctcactggtttctctgcttccactctcgcccttcccctaggtccattctccacgtagcagccaaggggattcttatatttatttattatttaatttagttttagagacagggtcttgtcctgatgcccaggctggagtacagtggcatgatcatagctcactgtggcttcaacctcttgggctcaagtgatcctcctgcctcaggctcctgagtagctgggactacaggtgtgcaccaccacacctaggtattttttatttattttattttttgcctcacactctgccaagtctcaatgcctggctaattttaaaaattattttgtagaggccacgtgaggtggctctcacctgtaatccagcactttgggaggctgaggcaggcggatcatttgaggtcaggagttcaagattagcctggccaacatggtgaaaacccatctctactaaaaatacaaaaattagcgggcgtggtggtgggcacctgtaatcccagctacacgggaggttgaggtgggataatcgcttaaacccgagaggcagaggttgcagtgagccaagattgtgccactgcactccagcctgggcgacaaagctagactctgcctcaaaaaaacataattttttttttttggtagagatggggtctgggtatgctgcccaggctggtcttaaaccttggctcaagcaatcctctcaccttggcctccagagtgttgggattacaggtgtgagccactgcatctggcttgagtttttatctaaagccccaaacattaatgagtccctgctgtgtgctgatacccacaactgacagcttatggccacacggtctgtaggatagacaagcccataaataattctgtacacaatggtaaaacaagaactgctgttgatgtgtgtaccagaagggcagtgacatcagcctggagagttggcctgggcctggcagggagtaaggaaagaattctgggtgcagaagacagcaaataccaaggcctaaaaaagaatgaattatttgctgtttgggaaatggaagcccacgctgagtgctgaagcacagggactctgcgcaggaagaggaggggaagcaagaaatgaatttgggtccttgtgatggcagtggctgctgccatcacgctgtgtggctagggctgcacacttcatggagccggtggaagccccgtccctcatgagttgggactggagccgcaaaccgctgctgcagacccaggccttctgctctatggagcaggcaggagccccaccctcttgggcagggctacagccacccaaactgcagctgtggatccgagcctctctgctcctgggggagccgggaacaggcagaatttgcccttccagatgcagctgcagccgcgcaggcaggagccagggacaagtgggagccctgcctcttccaagttggcggggtgggagctcccaggtgcagctgtggctgcccccccaggcacaggacgagggcatctctgtagcctgcaccatcggccatcccaggaaggacagcccccttcaccctccatccctgcaggctcaggggtgtctgcttccactgcctggcctctctccactccagcaactgctctgatcttggaggggagtcggagccaagacctgcagccatgaatggcagcaggaggaagggggtggggtccccagtaaggccccaccctcaggccagggagggcctgaattctgggggctgggctgccagtccctctgaccagagtggaaactcgtggagccttttctgggcctgccaatggcccaatcagcacacacttcttccccgctgaggtccataaaaaccctaggctcagccagagcagcgcagagaatagccagaggatgaagatggtagagacgaggggacaggatgaccagctgcagagagcagtaccctctctgctgatagctggagacggtggggtgaccagctacagagaggagtaccttctccgctgaaagctacagagaccacctgccagcagagaggagctacactctgctgcgagcttcagagacctgcagagacattggaatgacttgcctgcggagaggagccactctctccagggcctcctctctgttgagagctgaatgattgagctcatgggacaatctgtctccagagaggagctacccactcctctgagctcttctaacactaaataaaactcctcttcaccctt

SEQ ID NO: 15047 - protein, 147 aa, Homo sapiens
MEPVEAPSLMSWDWSRKPLLQTQAFCSMEQAGAPPSWAGLQPPKLQLWIRASLLLGEPGTGRICPSRCSCSRAGRSQGQVGALPLPSWRGGSSQVQLWLPPQAQDEGISVACTIGHPRKDSPLHPPSLQAQGCLLPLPGLSPLQQLL

SEQ ID NO: 15048 - DNA, 2426 bp, Homo sapiens
  CDS (7)..(1116)
tacaaaatgctgggatttaccaaccacatcaatccagccatggactttacccagactcctcctggaatgctggccttggacaacatgctgtacttggctaaagtccaccaggacacctacatccggattgtcttggagaacagtagccgggaagacaaacatgaatgcccctttggccgcagtgccattgagctcaccaaaatgctctgtgaaatcctgcaggttggggaactaccaaatgaaggacgcaatgactaccacccgatgttctttacccatgaccgagcctttgaagagctctttggaatctgcatccagctgttgaacaagacctggaaggagatgagggcaacagcagaggacttcaacaaggttatgcaagtcgtccgagagcaaatcactcgagctttgccctccaaacccaactctttggatcagttcaagagcaaattgcgtagcctgagttactctgagattctacgactgcgccagtctgagaggatgagtcaggatgacttccagtccccgccaattgtggagctgagggagaagatccagcccgagatccttgagctgatcaagcagcagcgcctgaaccggctctgtgagggcagcagcttccgaaagattgggaaccgccgaaggcaagaacggttctggtactgccggttggcactgaaccacaaggtccttcactatggtgacttggatgacaacccacaaggggaggtgacatttgaatccctgcaggagaaaattcctgttgcagacattaaggccattgtcactgggaaagattgtccccacatgaaagagaaaagtgctctgaaacagaacaaggaggtgttggaattggccttctccatcctgtatgaccctgatgagaccttaaacttcatcgcacctaataaatatgagtactgcatctggattgacggcctcagtgcccttctggggaaagacatgtccagtgagctgaccaagagtgacctggacaccctgctgagcatggagatgaagctgcggctcctggacctggagaacatccagattcccgaagccccaccccccatccccaaggagcccagcagctatgactttgtctatcactatggctgagcctggagccagaaacgacggtacccaggagaagggattttgggcccaggagaaacacttacattctggtgccttgtcttttgcttgtacagaatctgtagtgattttggtggccagtaaatgccagccatttctcaaacccacctcggaccacccagagtttcctcttggtccctgtctactaagagtcatgaaggcagggtgctctgcccactccatcaccatgaagcctgggattgggccacgaggaacaaacagcagatgcccttgccttccagtccaagaaactgcttcttgaaatggatttaacaacagccactcaccttttcctcctgagcctgctctctgatcagctggatccccacgtgagcaacagctggcccaggaaaggctgcctgcagaggacaggtgtgttgggcgtgttgagagccttgaagtgactacctgtatcttagatctgagtacaagcctgaggcttttgcttttgtcttttttgatgagggctcactccagcttcatatggtgccaagacgttgctgcttctgaggttggctctaacatctctggtctttagagccaccagatctctctggcccatacagatatcagagcagacggaaatttctccctgcaagcgctcagtctcatcccagcaagtcaaagacctcctggccaagtcctgccctcttaagtctccaggaacgctgcagggaaaacccagctgaggcctgggcctagactgtggtgaggtcactagattctactgctcttcccccacattaataccttttccttcctcagagagaaatctcccctaacctgaattgcagccccctccagtttgctttcctttggccttccagaccccaggaagttggccttcccttcctagtgctatggtttctgccattggccatgatttcagggagctggctgaggccggctgaggccacacctgtgccagtggggcttccctggtgctgcagcacttgtaaaccacacacacagcctctctccctggacatacgttagcacattggcattcagtattggtggcctggcatggtaggtactacccaatgaagagtgtactatatattttcattactataggccatacttatacagacgtgtatatatatttatataagatctacctatcttaggatggaaccttggggaaaaataaaattgaggggaagtaaaaagtatgtaacacttccagttgtgagccaagattgtaaccagagagcagccaggagcttcctgtcagtaaccatgttttcaataaatactctttcatgtac

SEQ ID NO: 15049 - protein, 370 aa, Homo sapiens
MLGFTNHINPAMDFTQTPPGMLALDNMLYLAKVHQDTYIRIVLENSSREDKHECPFGRSAIELTKMLCEILQVGELPNEGRNDYHPMFFTHDRAFEELFGICIQLLNKTWKEMRATAEDFNKVMQVVREQITRALPSKPNSLDQFKSKLRSLSYSEILRLRQSERMSQDDFQSPPIVELREKIQPEILELIKQQRLNRLCEGSSFRKIGNRRRQERFWYCRLALNHKVLHYGDLDDNPQGEVTFESLQEKIPVADIKAIVTGKDCPHMKEKSALKQNKEVLELAFSILYDPDETLNFIAPNKYEYCIWIDGLSALLGKDMSSELTKSDLDTLLSMEMKLRLLDLENIQIPEAPPPIPKEPSSYDFVYHYG

SEQ ID NO: 15050 - DNA, 2470 bp, Homo sapiens
ttattttgctttattcagagagaaagttgattactgagtgctgaattatacaatttaggctaggaaactcgtaactttggtatttaataaaagaaactatacatattctgtttgtaatgtaaataatctataccccatgcacaaatatctgtttcctgggtgtgatatattaaagtatgtattcttattttgaggtatcttttggaaataattgaaagagattaaataacaatttatgccacatgaaaaataattacttagaagtagttaggtatcatgtcttatggctttttatgttccattttggctttttttctcatttgctttattactatatgtacttgcatgtaacagtttgtaagcatatattctgacttattttccttctgtcattatctagtgctgttatgccttcctatcagaatcgataagtcaaactcagaggtgtgattttggtgttgaagttttcaggacagagatactatttccatggatgcattttaagtaataaaattaggggaagtgaaatcagaaaatgaaaaatgattacaaaataactttcaggttttctataatcaatggctttaaaaagtagacagtcttaattaattttaaattagcttgctcagaaaggtcatgccatacagtcctatcataaaaggaacactataagaattaagcaatgaacagcatgatttctgatcacccagtgaggactgacagtgtataaaagatacaggtatgctactggatgtacccgataattgtttgagagttttctagtgaaaaactcaaatatgctagcttaaccacagtagtagggggcaaccttattatatgggagagcttcaaaacatactgtcattttgtagaaggagcccaggtaaggatgcctaatcctgtccagtttggctagaactccatagccaaaaatgcagatttggattgaacatttttttgatgggacttctatcaatgcttaactagtaaaaacacatcttttctataagactttagaatactgtggtttctaatgggttcttgaataatgattttgcattgtgtttttctagttaatggtttttggtagtatttaatgatagcacagtttggggttttattgttcttgaagggggaggatattgaatttgtttttcttagagaaaacatcaggtttgctcaaatagactaacaacctgttgtccttaagcacatactaccatgaataaactcaggaaacaattttcaagaaaattcgaatgcagtgctggtgatggggatttttgtgggaaaaaacaatggtttcaagtccttcacaaagatcaaacttcagcctattttgttagactcagcaatgtctaaaacattgttttttgtaatttattgtcattggtaattcaatataataaaacaattttgatagcacctctgtttggctcaaagggattccatatgtttaggcaacccacaaccttaagaacagatgcttggtatttataatgtctgcccattggaacaacatgttaaaatagtactgcccagagaaacttccatacagattgactagtattttctagatagaggtctttcatatatgaagaaggaaaacaaccatttatcttggccctaaggcccacaagaaaacttaggctttaaagtgggcaaagcatatttgtggtattctgtacattctctttctcctggctttccagccccttcatgctatctatcttatttgagcacctcacagcaatactccatcaacgaaatttaccctatccccagaaggattctgtgtgatccttactccttgttccttcctcttcctcttccccaaatcaggatatccattctatcagaacagacatttccagctaaaaaggtgaaagagaagctatcttattaaattaatttacatttttctgtcagtggctaatagttaattggcattttttaaggaagttgtgcattaatcaagtttttagttgctggatcttcaggcaatctaacaaggtgataattttaaattcagttcctatcacggaaaatattttgggggaaaggaacagtgtgtcccagggtcagagtatctaataaactgtttctttttttgcacaatttccttcctacttcctttctacttctcaatctaccttttctcttaaaaacttttaaactttttaatcacaatgaacttctatgacaaaatgatgtggaggtagacagagattggcgattatttctgtatatgttgtttttaaacccatagttttgtattcttgtttctcacagtacatgacctatatagcataagaagttttattccccccaccccccatcccattcctgttataaagaaaaaaaaaagcacagagagattgaatccaaactactcatggagtccaaatttttccagatcccttttccagattttaggacctagaaatcctttaagtcacaatgttatttc

SEQ ID NO: 15051 - DNA, 3277 bp, Homo sapiens
  CDS (45)..(2117)
gcactgtgctgcctgtggccaccatccagaacgccagtactgccatgctgatggcagccagtgtggctcgcaaggctgtggtgctgcctggggggactgccaccagccctaagatgattgctgagaacgtgctaggcctggtgccccaagccctgcctaaggctgacgggcgggcagggctggggactgggggacagaaggtgaatggtgcctcggtggtgatggtgcaaccttcaaagacagctactgggccaagtacagggggcggcacagtgatatcacggacccagtccagcctggtggaggccttcaacaagatcctcaacagcaagaacctgctccctgcctatgggccaaacctgagcccaccagctgaggctgggctggccctgcctcccaccggctaccgctgcctggagtgtggggatgccttctcattggagaagagcctggcacggcactatgaccgtcggagcatgcgcatcgaggtcacctgcaaccactgcgcccgccgcctggtcttcttcaacaagtgcagcctgctcctgcatgcacgtgaacacaaggacaaggggctcgtcatgcagtgctcacatttggtcatgaggcctgtagcccttgaccagatggtggggcagccggacatcacaccgctgctgcctgtagctgtcccacctgtctctggacctctggccttgcctgccttgggcaagggtgagggggccatcacctcctctgccattactacagttgctgctgaggcccctgtcctgccgctctccacagagccgcctgctgccccggccacctctgcttacacatgctttcgctgcctggagtgcaaggaacagtgccgggacaaggctggcatggcagctcacttccagcagctcggcccccctgcccctggggccaccagcaatgtgtgcccaacctgccccatgatgctccccaatcgctgcagcttcagcgcccaccagcgcatgcataagaatcgacccccccatgtctgtcctgagtgtgggggcaacttcctgcaagccaattttcagacccatctccgggaggcctgtctgcacgtctctcgccgtgtaggatacaggtgccccagctgttcagtggtgtttgggggtgtgaactccatcaagtcccacatccagacgtcgcactgcgaggttttccacaagtgccccatctgccccatggccttcaagtctgggccaagtgcccatgcccacctctactcccagcatcccagcttccaaactcagcaggccaagctgatctacaagtgcgccatgtgcgacacagtcttcactcacaaacccctcctctcctcacacttcgaccagcacttgctgccccagcgtgtcagtgtctttaagtgcccgtcttgtcctctgctctttgcccaaaaaaggaccatgctggaacatctcaagaacacccatcagtctgggcgcttggaggagactgctgggaaaggggccgggggtgccctgctgacccccaagactgagcctgaggagctggctgtttctcagggaggggcagcccctgctactgaggagtcgtcttcatcttcagaagaggaggaagtacccagctcccctgagcccccccgtccagccaaacggcctcggcgggaactagggagcaaaggcctcaagggtgggggtggggggcctggaggctggacctgtggcctgtgtcactcctggttccctgagcgtgatgaatacgtggcccacatgaagaaggagcatggcaagtcagtgaaaaagttcccctgtcgcctgtgtgagcgctccttctgctccgcccccagcctgaggcgccatgtcagagttaatcacgagggcatcaagcgagtttacccctgcagaagcaagggccctggccttcgggctgtgccgctgctgccatcctgtcctctcccatttcaggtattgcacagagggaaaacgcaccttcagcagccgcctgatcctagagaaacatgtccaggtccggcacggcttgcagcttggggcccagtcccctggccgggggaccaccttggctcggggttccagtgccagagcccaggggccaggtcggaaacgccgccagtcttctgactcttgcagtgaggagcctgacagcacgacaccgccagccaagtcccccaggggcggacctggatctggaggccatggccctctgcgctaccggagcagcagctccacagaacagagcctcatgatggggttgagggtggaggatggtgcccagcagtgcctcgactgtggcttgtgctttgcctcccctggctccctgagccgacaccgtttcatcagccacaagaagagacggggtgtgggtaaagccagtgccctggggctgggggatggggaggaagaggcacctccatcaaggtctgaccccgatggtggagactcacccctgcctgcttctggaggcccactgacctgtaaggtctgtggcaagagctgcgacagccctctaaacctcaagacccacttccgcacgcatggcatggcgttcatcagggctcggcagggggctgttggggacaactagtctccaaggcctgggactgaccagccccttcctcttggagcctggttttccctactgctgcctgatccctcggctggggagttttcattaacattaatattttgttaattcctgtctctccaacctgaagaagaagagcatttgaggattattctagttatttgcaacctccctttgggtttggccctggagtcctagtagagtggaccctccattcctcctttctgagcccaacactaattaattttatgctcctgctgcagaacccccagtgtgggcctgggggtgggaggatgggacttaggtatgcctgctagacaggttcagggaaggactgatgggggtgtcatggatggacacacctctccacaattccttcaggcatggactggaactttcctcctctaggccgggccctgccctagtgcccacccccgcccccgcccccgcccaaccccaactcactggcactcaagccccctacccctgcagtgcctttcacttctttttttccccagaaatccggggcgggggggtggggggttggtagggatgagtcctgtcaagggggccacaggagaggaggggacaggctctcaggaatcctttattcttgtagtaataataatactaacaaacagttggggaactagggagaaaaccagaccattaaaactgtttgtggtcgaatctc

SEQ ID NO: 15052 - protein, 691 aa, Homo sapiens [sequence omitted]

SEQ ID NO: 15053 - DNA, 2513 bp, Homo sapiens
  CDS (105)..(1073)
ccccctgggtcccaccctccctcaaggcctcctccacctccacctccaccccgcctggcctggcgtccacctctgcggctcctacctgggtgcaatcgagttaaatggctgataagcagatcagcctgccagccaagctcatcaatggcggcatcgccgggctgatcggtgtcacctgcgtgtttcccatcgacctggccaagaccaggctgcagaaccagcagaacggccagcgcgtgtacacgagcatgtccgactgcctcatcaagaccgtccgctccgagggctacttcggcatgtaccggggagctgctgtgaacttgaccctcgtcacccccgagaaggccatcaagctggcagccaacgacttcttccgacatcagctctctaaggacgggcagaagctgaccctgcttaaagagatgctggcgggctgtggggctggcacctgccaggtgatcgtgaccacgcccatggagatgctgaagatccagctgcaggatgcagggcgcattgccgcccagaggaagatcctggctgcccagggccagctctcggcccaggggggtgcccagccctcagtggaggctccagctgcccctcggcccacggccacccagctgacccgcgacctgctgcggagccgtggcattgccggtctctacaagggactcggggccacgctgctcagggatgtccccttctctgtggtgtacttcccgctctttgccaacctgaaccagctgggccgcccggcgtccgaggagaagtcgcctttctacgtgtccttcctggccggctgtgtggctgggagtgccgccgctgtggccgtcaacccctgtgatgtggtgaagacgcggctccagtcacttcagcgaggcgtcaacgaggacacctactctgggatcctggactgtgccaggaagatcctgcggcacgagggcccctcggccttcctgaagggcgcctactgccgcgcgctggtcatcgcgccccttttcggcatcgcacaggtggtctacttcctgggcatcgcggagtccctgctggggctgctgcaggacccccaggcctgagcccagcacccgctccaccccagccagctgggcagggccggtgtggggctggagccaggcagctagcccaggacggagcaagggaagacccctccccagccctcccgtcggcaggggcagcagggggcagggtgcagggtccacataggtggtgcacacgcaagccccccggggtgctgcctgcaccgttgggatcaatgtctcatttatgtagaaaatgcagaaatctttacattcctcaagctagcccctgccccaatcctgccctggcctgaacacccccagggacagagctggtctctgggctgggggcccccgggcctgggccgggcaggctggaccatacccccagtccaccagctccagtctccacagccatcctggcccacacaggcaccccacacaaacctatttattgaatctgctggacccaagcggctctccagcccttctgtccttccccagccgctcttgtcgccttggcaggacttgactctgcctccctggccagccttgcaagaggactggggtctcctgccctctctgttgagccaggaatcccaagtgaggggttgccctgaggtctgactcttggggcaagcccgccacccactgtgggactttctggtgggctcctcagctcccaccccaggctggggcccagattgtgaggtctgtgtgcatgtgtgtgtgtatgtgtgtgtgcatgcgtgtgtgtgttgtggggatctggcctggcccttggggatggggctgctggggactgccccccttcccgccgtggccaggcgctctgtgtgctgtgtgtgccccaggctctgttgaccccgtccaggaactaacttacccagcttggtctctcctgagtcctccaccctggcctgggattggccagggagcagggcgggcattgggaccagtgtggagcctgagggtgcctgccctgctctggagggagggccaggagctgccacacccccaagtcctctcagggcccaccctcctttttcagcctctgcataaggcccctgggtacactgcagaagccccatccttcccgcctccgggcataaggcccctgaccacacttcagaagccccatcccccctgccaccgggcgatccctgctgtgagccgaagctctccctgccccgccctggccatgtgatcgtgttggtgacagaccctgatgtgctggtgctgtgtccccaaaaccggggccctccacagaggccccttcccagcgacactacctggggctcaggcctggacccccccagttcacggttgctcctgggagctgccccacccgtcacatcagaaccttggaagctgctgctgctgcttacagaattatatttttttcttttgaagagttttaagaagttgtaactttttgtgtcttgtcatgtcagagaataaataaatattctaagt

SEQ ID NO: 15054 - protein, 323 aa, Homo sapiens
MADKQISLPAKLINGGIAGLIGVTCVFPIDLAKTRLQNQQNGQRVYTSMSDCLIKTVRSEGYFGMYRGAAVNLTLVTPEKAIKLAANDFFRHQLSKDGQKLTLLKEMLAGCGAGTCQVIVTTPMEMLKIQLQDAGRIAAQRKILAAQGQLSAQGGAQPSVEAPAAPRPTATQLTRDLLRSRGIAGLYKGLGATLLRDVPFSVVYFPLFANLNQLGRPASEEKSPFYVSFLAGCVAGSAAAVAVNPCDVVKTRLQSLQRGVNEDTYSGILDCARKILRHEGPSAFLKGAYCRALVIAPLFGIAQVVYFLGIAESLLGLLQDPQA

SEQ ID NO: 15055 - DNA, 2465 bp, Homo sapiens
  CDS (181)..(2445)
gaagattctgaagctgtggggatctccagcattatcagcaacctgataaccgtgttcccacgaaatgttttaactgccattccaagtgaacttttctcctcctttgttaactgcctcacacacctcacttgttcttttgggcgaagtgctgcattggaagaagtgcttgataaagatgacatggtatacatggaagcatatgataaattgttggagtcctggttaactttggttcaagatgacaaacatttccataaaggcttttttacccaacatgcagttcaagttttcaattcctatattcagtgccacctagctgctccagatggcacaagaaatttgactgccaatggtgtggcctctcgtgaggaggaagaaataagtgaacttcaagaggatgatcgagaccagttttctgatcaactggccagtgtaggaatgctaggaagaattgctgcagaacactgtatacctcttctgacaagtttattagaagaaagagtaacaagactccatggtcagtcacaacgacatcagcaacagttacttgcttcaccgggttcaagcactgttgacaacaaaatgcttgatgatctctatgaagatattcactggcttattttagttacaggctacctcttagctgatgatactcagggagagactccgctaatacctccagaaataatggaatattccattaagcattcatctgaagttgacattaatacaacacttcaaattttgggatctccaggagaaaaggcttcttccatcccagggtacaacagaacagattctgtgattaggctgttgtctgccattctcagagtttcagaagttgaatctcgagcaataagagcagatctcactcatctactaagtccccagatgggcaaagatattgtttggtttttaaaacgctgggcaaagacttatctcctggtggatgaaaaactgtatgatcagataagtctgccattcagtacagcgttcggagcagatacagagggttctcagtggataattggctacctcttacaaaaagtcatcagtaacctctcagtctggagtagtgagcaggaccttgcaaatgacactgtgcagctccttgtcactttggtggaaagaagagaaagggcaaacttagtaattcaatgtgagaactggtggaatttagctaagcagtttgcaagccgaagcccacctcttaatttcttgtcaagtcctgtgcagaggacattgatgaaggctctagtcttaggaggttttgcacatatggacacagaaaccaaacagcagtattggacagaggttcttcagccacttcagcagcgattcttaagagtgataaaccaagaaaacttccagcagatgtgtcagcaagaggaagtcaagcaggaaatcactgccacactagaggccctgtgtggcattgctgaggctacccagattgacaacgtagcaatcctgtttaattttttaatggacttccttaccaattgcattggattgatggaagtttacaagaataccccagagactgtcaatctcattatagaagtttttgttgaagttgcacataaacagatatgctatcttggagagtccaaagctatgaacttatatgaagcctgccttactttgttgcaagtgtattctaagaataatttagggcggcaaagaatagatgttacagcagaagaagagcaataccaagacctgcttctcattatggaacttcttactaacctgctgtcaaaagaattcatagatttcagtgatacagatgaagtgtttagaggacatgagccaggtcaagcagcaaacagatctgtgtcagcagcggatgttgtgttgtatggagtaaacctaattctgcccttgatgtcacaggatctcttgaagtttccaaccctttgtaatcagtactacaaattaatcacatttatctgtgagatttttcctgaaaaaataccacagcttcctgaggatctgtttaaaagtctgatgtactccctagaattaggaatgacatcaatgagttcggaggtttgccagctttgcctggaggccttgacaccgttagctgaacagtgtgcaaaagcacaagaaacagactcaccactttttctagcaacacggcactttcttaagctggtttttgatatgctggttttgcaaaagcacaacacagagatgaccactgcggctggcgaagctttctacacgttggtgtgtttgcaccaggctgaatattctgaactggtcgaaacattactatcaagtcagcaagacccagttatttaccagagattagcagatgccttcaacaagctcactgcaagcagcactcctcctacgctggatcggaagcagaagatggccttcttaaagagtttagaagaatttatggcaaatgttggtggtctcctttgtgtaaaataaacaacagaactttaaag

SEQ ID NO: 15056 - protein, 755 aa, Homo sapiens
MVYMEAYDKLLESWLTLVQDDKHFHKGFFTQHAVQVFNSYIQCHLAAPDGTRNLTANGVASREEEEISELQEDDRDQFSDQLASVGMLGRIAAEHCIPLLTSLLEERVTRLHGQSQRHQQQLLASPGSSTVDNKMLDDLYEDIHWLILVTGYLLADDTQGETPLIPPEIMEYSIKHSSEVDINTTLQILGSPGEKASSIPGYNRTDSVIRLLSAILRVSEVESRAIRADLTHLLSPQMGKDIVWFLKRWAKTYLLVDEKLYDQISLPFSTAFGADTEGSQWIIGYLLQKVISNLSVWSSEQDLANDTVQLLVTLVERRERANLVIQCENWWNLAKQFASRSPPLNFLSSPVQRTLMKALVLGGFAHMDTETKQQYWTEVLQPLQQRFLRVINQENFQQMCQQEEVKQEITATLEALCGIAEATQIDNVAILFNFLMDFLTNCIGLMEVYKNTPETVNLIIEVFVEVAHKQICYLGESKAMNLYEACLTLLQVYSKNNLGRQRIDVTAEEEQYQDLLLIMELLTNLLSKEFIDFSDTDEVFRGHEPGQAANRSVSAADVVLYGVNLILPLMSQDLLKFPTLCNQYYKLITFICEIFPEKIPQLPEDLFKSLMYSLELGMTSMSSEVCQLCLEALTPLAEQCAKAQETDSPLFLATRHFLKLVFDMLVLQKHNTEMTTAAGEAFYTLVCLHQAEYSELVETLLSSQQDPVIYQRLADAFNKLTASSTPPTLDRKQKMAFLKSLEEFMANVGGLLCVK

SEQ ID NO: 15057 - DNA, 2747 bp, Homo sapiens
  CDS (2305)..(2745)
gagagagaatgttaaaggatgaagtttccaaatgtgtatgtcgctgtgaagatctggagaaacaaaacagattacttcatgatcagatcgaaaaattaagtgacaaggtcgttgcctctgtgaaggaaggtgtacaaggtccactgaatgtatctctcagtgaagaaggaaaatctcaagaacaaattttggaaattctcagatttatacgacgagaaaaagaaattgctgaaactaggtttgaggtggctcaggttgagagtctgcgttatcgacaaagggttgaacttttagaaagagagctgcaggaactgcaagatagtctaaatgctgaaagggagaaagtccaggtaggtatactaagctttaagaaagcacttgttaaatcaaaagagaagcactcatttatatctctaccatttaacgtaatgtaaaatttaacttgaagtaagcattcttctaaacttgtaaattcattaagcatttgttaaacactaatatagtatagtgcttaaaagtaaaggctctgtaaccaaactgcctggtttcagattctagcttcataccattagctgtggccttgggtacattgtttaacttccctgctcttagtttcttcatctgtaatatttggataataatgaggtttaattgagtttgtgcacatgaagcatttagaagcatgtctggtatgtagtgggtgcttaataaattccagctatcttaatttattatagttatggattatacgtgtggatagtcattctaggataaagtgatttaaactgctacagaatatctttctcacccaaggagcaaaaagtagtaaaaactaacaaccaaaggaaaagaagctgtggtagtgaaatggatgataataagacaagcttgactccttaccccacactaccacccaaagcttattgttgagttacttcattcttaggagctacagtaatatacccccacctctagaaggaaggaaattaagatcttaaaacatttatcttcttttaactgatgagtagtcaaaatgactgttaagaagaaaccattgaacagggaaaagtaaataatgaattttatgggatttatgtgttcagcaaaagctaaaggttccagaattatatcctgtttaattcaaatgtatctcaccatggaaataatagagcctccagttcaatagagttaatacttggaggaaaagggacagaatcagagtctctaacaaagactgcatattgtttcagtcttttccgcttcattttttattcctttgggctatagaaagtaaatactagaaaatgcccgcctacgaatgagttcatagggggaaaccaactcttaaatacaggaagaagagagtcaacaagtaacatagattatataaaaaataatataatgggccgggcatggtggctcatgcctgtaatcccagcactttgggaggccgaggcgggtggatcacgaggttaggagattgagaccatcctggctaacacggtgaaaccccgtctctactaaaaatacaaaaaaattagctgggcatggtggtggcaggcacctgtagtcccagctactcgggaggctgaggcaggagaacggcgtaaatccgggaggcggagcttgcagtgagccgagatcacaccactggactccagtctgggcgacagagcgagactccgtctcaaaaaaaaaaaaaaaaattataatagcaatgtaatgtctgtctaagcatgaacagtgtagcatggcaaccacgaaatatgctatagctttaaaaacagtgggggaagaaagtaataccaagtgcagaagatggataattataacctatgagaaggaaaaaattcttcacagataattcagtaaaatttctcatggccaaagtgatgaaacaatggatcaaaatgagagatttctgaacaagagggaataaactgaggattagaataacattttagaactaataaatttagtgcagcaaggaaaaaaagatacagaaaggtaaatagagatttggattaatgtttttacctaatgttaatactttgttggtgggatttgtagcatcttttcacttttgtctttgtaattcttgtatttgtttaaagtctgcagttcgcatgcctctcagaaaagtaaacgtgaactttcaataattttagttctaaaagttgaaacttaaatcctctttattttgtcatagggaggatttgagctcataggaacaggtagactttcaactattgttagatgttggtatgtatatttatttgaaatgtttaggtaactgcaaaaacaatggctcagcatgaagaactgatgaagaaaactgaaacagtgaatgtagttatggagaccaataaaatgctaagagaagagaaggagagactagaacaggatctacagcaaatgcaagcaaaggtgaggaaactggagttagatattttacccttacaagaagcaaatgctgagctgagtgagaaaagcggtatgttgcaggcagagaagaagctcttagaagaggatgtcaaacgttggaaagcacgtaaccagcatctagtaagtcaacagaaagatccagatacagaagaatatcggaagctcctttctgaaaaggaagttcatactaagcgtattcaacaattgacagaagaaattggtagacttaaagctgaaattgcaagatcaaatgcatctttgactaacaaccagaacttaattcagagtctgaaggaagatct

SEQ ID NO: 15058 - protein, 147 aa, Homo sapiens
MAQHEELMKKTETVNVVMETNKMLREEKERLEQDLQQMQAKVRKLELDILPLQEANAELSEKSGMLQAEKKLLEEDVKRWKARNQHLVSQQKDPDTEEYRKLLSEKEVHTKRIQQLTEEIGRLKAEIARSNASLTNNQNLIQSLKED

SEQ ID NO: 15059 - DNA, 2492 bp, Homo sapiens
atatatgctgtaataatttaagtaaaattaccttcttttgtggaaatgtagaacagctgctcactgaaatggatatttcttcatatccttgaaaactgttgagtcacccttagtattctcttcttagatataataagttctaatttttccttacttggctcatttttaacccttttatctttttattattctgaaatctctccaaggccctcacatgtcctcaagttgtagagtcttaaattggacaacactttaattacagcctgaaggttaggtagttgttattccatttatatatcttagtatttgagtttacttttgaaatataaagtcttagtgactaatttagcatgtggttctctgccactcccttcctgaccacccaccacccctcattcttatcttctttttttaccttgtttgtacaaaaaccagttgttgcctattttatttcttctgtccataccctgtctgtctatgcatttaaaaacagagaactcattccttataaaacagacaaaccagggataattgtcaacatcaaaaaagaattctttaaatcactgcaggcttcctttaaataggtgtttcctgtggtggttttaagtgtttttatataggtcatcaactgcttgatataaagaaactaaagataaagggttaagaggcagtgccagttgaagaacagttagaaattgggataaaacagtagttcttaggtaaacagtaaaatacattcagattcacagaaaaaaaatatgtatatatatattttttgagatggagtctcacagtgttgtccaggctggagtgcagtggcgtgatctcagctcactgcaatctctgcctcccgggttcaagcgatcctcctgcctcagcttcccgagtagctgggactacaagcgtggcaccaccatacccggctaatttttgtatttttagtagagacggggtttcaccacgttggccaggctggtttcgaactcctgagctcaagtgatctgcctgcctcggcctcccaaagtgctgggattacaggtgtaagccactgtacctggcctgatttatgtattacttttcaagagaatgttataccaataatattttttgtctagatacagtgaacttttcatcatctgtactaatggaggcatgtacattttaattttgttatgcatttttgttgtaacatttaaatatagggatgtctaatcataaaatttaaaaatatttcataatttcatcatactgaagactcaggaagatctgaaaagaaacagaaagagtaccagacctggaatagaaacctgacttctaaaattggctatatagctagctataggaccttagttgaattgcttcaccattttaggcctgttttctgaactatacaatgagggatttcgactaaatgagggattttgaccaaatgatctctgaggtatcttaaatctctagctttttatgatttcccacccttgccaaggagttgagtaaacattggaggtgatgccaccaaaaaagtgaaagcacaatttttcctttatatgatggagtttgctgtagtgtagttttctctttcagaaatgaacgattatcctgattagattttgtttgcccacatcctgttatatcaagtcatgagtatacccccattgaaactcagagttgatttggtttacagttgttctaattgtatcctaagtcttctagctaaaattttaaaatgaagtagtcaccccatggcgttatttatttattttttgagagggaatcttgctctgtcgctcaggccagagtgcagtggtgtgatcttggctcactgcaacctgtgcctcccgggttcgagcgattctcctgcctcagcctccagagtagctgggactacaggggcatgccaccacgcccggctaatttttgtatttttagtagaagcggggtttcaccatattggccaggctggtctcaaactcctgaccgtatgatctgcccacctcgacctcccaaagtgctgggattgattacaggtgtgagccactacgcccagcccccatggagctatttttatttaaaacacatacattataactctattgatctgattacaaaagtgcctattttgttaaaatgttttattgtgataaaaattcaaaaattattaatgttagccaacaaaattcaagcaaaacataaatgtgtaaagtaaaaagtgaaagatttttccttagtccctctcaccactcccattctccaagaataacttaatttggtgtgtgtcttcccagatgttgttctgtttgtgtttatatattaatatacacatatatacatatatgaatacccacacatttgtatataggttttttttaaatgaaatgggatattatatgtactgttttgcaacttttttcactttgcattgtattctggacctcctcttgcattaatacatggaaatttacctcatttaaaaaatgactgcataacatttc

SEQ ID NO: 15060 - DNA, 2848 bp, Homo sapiens
  CDS (143)..(865)
aaacttcattgagcacctgggtcgttttcctgctcatatcctggactgtctttcagggatttactaccggcttccgggacttgagcaagtcttgaatacgcaggatgttcaggatgttcagaacgttcagaacattttagaaatgctgttgcgactcctggacacttaccgggacaagattcccgaggaggccttgtcaccatcctacctgactgtgtgtctgaaactgcatgaagccatctgcagcagcacaaagctacttaagttttacgagctgccagccttatctgccgagattgtctgcagaatgattagacttctatctctggtggattctgcaggacagagagatgaaactggaaataattcagtccaaacagtcttccaagggacccttgctgctacgaaaaggtggctccgagaagtttttacaaagaacatgctcacatcttcaggtgcctcattcacatacgtcaaggaaattgaggtctggaggcggctggtggaaatccaattccccgcggagcatggctggaaggagtcgttgctgggagacatggaatggaggctcacaaaggaggaacccctctcccagatcactgcctactgcaatagttgctgggacaccaaaggcttagaggacagtgtggccaagaccttcgagaaatgcatcattgaagccgtgagctcagcctgccaggtgaacaatctctcctcctgggaaacggattcgggctcacagctgtgttctgccatgacccagctaagggctatgaagcacccgctgggtctcagctcctccgctaactcagagattgggaagtgggcaccctcctccctcgccaagggcaatggcgctgagatctagttctctccggattcctcagtgtgctgcacagtccctgctgctcgcaccatcctgcatgtgttccatatggaatcacggccgtgcgcgtgtggcacaagtcacacgggcttgcaggccgttcctcagatggccctgtcgtcactgtggctgctggtttgattgattgttaacacttgctcagtaggtgtgcgggaagagactccaaaggttgacagaacatttatggaagcaaaatatgtgaaatggaaaattgtatcaatttatttagctcttttcggcaaaggggaagagattgtgcccccctgtctcccaggaacagtctcgcaggcaatgccacatgaggaagctccctgctggccatggctgccctgctcacatttcctaattggacacttaacccctgtacaagcacagccttgcggccacaggggaagtccagaaacattgaggtcattgaattccggggaccaaggggttctaattttttaagtgactgatacctttgataaggttttcctttccctttttcgttaactctttgttgagatattgttcgtatgccatacggtacatctgtcaaaagttccagttcagcaggttttggggtagtcacagatatgtacagtcatcaccacagttaatgacagagcattttcatcacttcaaagagaaacccggcccctttagccatcatcctcctcccctctagtcacccactcccctctgcaggcataaacaattgctgaacataaacaactgcttctgtggctttctctgttctgactgtcatatgaatggaatcatatcatatgtggccttttgggtatggcttatttcactgagcataatgtttttttgttgttggtggtggtggttgtttgttgtttttgggaccgagtttcactctttttgcccaggctggagtgcagtggtgcgatcctggcttaccgcaaccactgcctcccgggttcaagtgattctcctgcctcagcctcccaagtgctggaattacagctactttttgtttaaagagtcttttaattgtttaaagaacaatgtgccgccacactcggttccttttgtatttttagaagagacagggtttctccatgttggtcaggctggtctcgaactcccgacctcaggtgatccacccaccttggcctcccgaagtgccgagattgcaggtgtgagccaccgcgcccggccgagcataatgttttgaaagaccgctcaggctggacacggttgctcacgcctgtagtcacggcactttgggagcccaggagttcaagacaagcctgggtaacagagtaagaccctgtctctataaaaactaaaaaataaacaaaaaaaattagccaggcatggccgggcacacctgtggtcccagctacttgggaggctgaggtgggaggctcccttgggcccagaaggtcaaggcagcggtgagccatgatcgcaccactgcacttcaacctgggggacagagcaagaccctgtctcaaaaagcaataacaacaaaagtccatccatattgtagcttgtgtccgtttacgttaagtattccttacccaaaatgcttgagaccagaagtgttttggatttcagatgttttcaaattttggaatatttgcatttacataatgagatgtcttccagatgggacccagagtctaaccacaaaattcacttgtttcatatacatcttatacacatagcctgaaggtaattttatacaatatttttaacaattttgtgcatgagacaaagtttgtattaagtatttgtatgttgaatttttcacttgtggcatcattatactcaaaaagtttggattttgtagtattttggatttggggattaggaatgctcaacctatatttcatttttttccatggccaaatattccccgtttatccatgtgtccattgacggccatctatgttgcttcttcggctattataaatctgctgatac

SEQ ID NO: 15061 - protein, 241 aa, Homo sapiens
MLLRLLDTYRDKIPEEALSPSYLTVCLKLHEAICSSTKLLKFYELPALSAEIVCRMIRLLSLVDSAGQRDETGNNSVQTVFQGTLAATKRWLREVFTKNMLTSSGASFTYVKEIEVWRRLVEIQFPAEHGWKESLLGDMEWRLTKEEPLSQITAYCNSCWDTKGLEDSVAKTFEKCIIEAVSSACQVNNLSSWETDSGSQLCSAMTQLRAMKHPLGLSSSANSEIGKWAPSSLAKGNGAEI

SEQ ID NO: 15062 - DNA, 3230 bp, Homo sapiens
  CDS (223)..(1563)
agtgggcgggcgcggcgcattgctgctcggcggcgccggcgccggggtccgggcggccatggggcaacaggcggccagggcgccaagggccaggtagcgacggctggcggcggcgcggcggcggggcctgcgggctcggtccggcatgtagacgcccccgcaggcgcccgcggcagcgaacggcatcagtgtttttctgaccgaagttctcatttcctgacaatggaaatggaacaagaaaaaatgaccatgaataaggaattgagtccagacgcggctgcttactgctgctcggcctgccacggcgatgagacctggagttacaaccaccccatccggggccgggccaagtctcgcagcctgtctgcctcgcccgccctggggagcaccaaggagttcaggaggacacgctctcttcatgggccatgcccggtgaccacttttggaccaaaggcctgtgtgctgcagaacccccagaccatcatgcacattcaggaccccgcgagccagcggctgacgtggaacaagtccccaaagagcgtccttgtcatcaagaagatgagagatgccagcctactgcagccgttcaaggagctctgcacgcacctcatggaggagaacatgatcgtgtatgtggaaaagaaagtgctagaagaccctgccatcgccagcgatgaaagctttggggcagtgaagaagaaattctgtacctttcgagaagattatgatgacatttccaatcagatagacttcatcatctgcctggggggagacgggacgctgctgtacgcttcctcgcttttccagggcagcgtccctccggtcatggccttccacctgggctccctgggcttcctgaccccattcagctttgagaactttcagtcccaagttactcaggtgatagaggggaacgcagctgttgttctccggagtcggctgaaggtcagggtggtgaaggagctccgggggaagaagacggccgtgcacaatgggctgggtgagaacggctcgcaggctgcaggcctggacatggatgtcgggaagcaggccatgcagtaccaggtcctgaatgaggtggtgattgacagaggcccctcctcctacctgtccaatgtggatgtctacctggacggacacctcatcaccacggtgcagggcgacggagtgatcgtgtccaccccgacgggcagcacggcgtatgcggccgcggccggggcctccatgatccaccccaacgtgccggccatcatgatcacgcccatctgcccccactcgctgtccttccggcccatcgtggtccccgcaggggtcgagctgaagatcatgctgtcacctgaagcaaggaacacagcatgggtgtcctttgatggacggaagagacaagagatccgccatggagacagcatcagcatcactacctcatgctacccactcccctccatctgtgtgcgggaccccgtgagcgactggtttgagagcctcgcccagtgcctgcattggaacgtccggaagaagcaagcccacttcgaggaggaggaggaggaggaggaggaggagggctaggtcaagcccctatccaggcccgaatccttccgctgccctccaagcgccctctggggacagaccaatctgcgtgtgtctgtgaccgcctgtctcagtggcacggccacttcctttctgtagctgggttagagcctgggtctgccttttgtccagatcagctgtttttttaaaatctctgactttttttgcatttctaaagaagcgtgagaaatgggctgggagtgcttctgtcctgctgacaccccgcggtgggtccctggagcgcggcctccagctgccgcaatttccatgccaggatatttttccgcaaatcagtcggttgaaattcagaggagtcagaatgactcgacctgtccttcaatgttgataataaatgtctcagccaaaaaccttccttgagctgccatgcttttccccttgacctgcacctcttcccctaaaatttctgcagggaagcccctggcggaggcgccattgaaagcatggtcttgccagtggctggcaaggcggttttgttctgctcagtttctggagagggttggatgcgtcccctgccatccagccctccccgcttgaggccagcactgagtctgggacactcagcgggaagggggctggcatcgccagcgacccacacattcctcacgtagcttctgctcccaggaaggtagtttaaatcctgtatatacttttagagactcttttaaactttctgaagtgctgatgtacatactttctcgtacacacttttgtgaagatttcaaggggaagggagtcgtctgccattcaatgtttacatttatgttctgcaagacgctgtcctcagggaccattaggggaccattctgttcagtgcgatcctgatggtccgggagatgagggtttccggggctagtgatcgtgatcctttttatttgcaacagtaatgagaatttttcacactaacacagcgagggactcaacacgctgattctcctcctgcctctcccgtgagtctccagcctgcccagcaccagcagctgtggagcacgtggatgctgcctaccccggcgcccgcgtcttccacgggcacaggtgtgtggaggccgtggtcggaccctggtgtcctggttactgctgcccgggtgtcttttttttgagtaactgctctctgagttttgcacacgaagttgccctcatctgctggagatcgataaggaaggcacaagacgttctcctctgcccgtgaggagcttcccgcagccgcctggcccagcctgggcacgttctccgaggcatgtgtctccctgctcaccctcgtctgggcacctcagcatctgtggacttgagcgtccaaaaaccctgagtgtgattctgggcagccggcctggcttgaagtccgccatgaccctgggcacaggggaagcccagccgtgggcttaggagagagggaccagcgcccagcgttagggctggaagacggcagtgttcagaattccagccgctcatctgaacacagaaggtgtgaactgacctctaaagcagcgtgagatgggaatgatctagaaaactttggatttttgaagtaaattttaatgtttcatattaatttcttgaaaatgtattaaatgtcattgaaagccttattacgcttttcagatcctttcaataaacaagacttgtag

SEQ ID NO: 15063 - protein, 447 aa, Homo sapiens
MEMEQEKMTMNKELSPDAAAYCCSACHGDETWSYNHPIRGRAKSRSLSASPALGSTKEFRRTRSLHGPCPVTTFGPKACVLQNPQTIMHIQDPASQRLTWNKSPKSVLVIKKMRDASLLQPFKELCTHLMEENMIVYVEKKVLEDPAIASDESFGAVKKKFCTFREDYDDISNQIDFIICLGGDGTLLYASSLFQGSVPPVMAFHLGSLGFLTPFSFENFQSQVTQVIEGNAAVVLRSRLKVRVVKELRGKKTAVHNGLGENGSQAAGLDMDVGKQAMQYQVLNEVVIDRGPSSYLSNVDVYLDGHLITTVQGDGVIVSTPTGSTAYAAAAGASMIHPNVPAIMITPICPHSLSFRPIVVPAGVELKIMLSPEARNTAWVSFDGRKRQEIRHGDSISITTSCYPLPSICVRDPVSDWFESLAQCLHWNVRKKQAHFEEEEEEEEEEG

SEQ ID NO: 15064 - DNA, 2591 bp, Homo sapiens
  CDS (844)..(2121)
agagcggagcgaggaccgcgtccggcgcagtcttcaatgagcagcgcggaaactgcaccccagacccgagcctgctgcgcgccccctcccagagctcacctggtgccaggtaacaggcctggcctcgccctgtggatgatgatggccttgcccccgtgagctacaacctggccttcagcacccgcccacctccaaccagcaggatgcggctgtggaaggcggtggtggtgactttggccttcatgagtgtggacatctgcgtgaccacggccatctatgtcttcagccacctggaccgcagcctcctggaggacatccgccacttcaacatctttgactcggtgctggatctctgggcagcctgcctgtaccgcagctgcctgctgctgggagccaccattggtgtggccaagaacagtgcgctggggccccggcggctgcgggcctcgtggctggtcatcaccctcgtgtgcctcttcgtgggcatctatgccatggtgaagctgctgctcttctcagaggtgcgcaggcccatccgggacccctggttttgggccctgttcgtgtggacgtacatttcactcggcgcatccttcctgctctggtggctgctgtccaccgtgcggccaggcacccaggccctggagccaggggcggccaccgaggctgagggcttccctgggagcggccggccaccgcccgagcaggcgtctggggccacgctgcagaagctgctctcctacaccaagcccgacgtggccttcctcgtggccgcctccttcttcctcatcgtggcagctctgggagagaccttcctgccctactacacgggccgcgccattgatggcatcgtcatccagaaaagcatggatcagttcagcacggctgtcgtcatcgtgtgcctgctggccattggcaggtattcggggcggcatttttaccctcatatttgccagactgaacattcgccttcgaaactgtctcttccgctcactggtgtcccaggggacaagcttctttgatgagaaccgcacaggggacctcatctcccgcctgacctcggacaccaccatggtcagcgacctggtctcccagaacatcaatgtcttcctgcggaacacagtcaaggtcacgggcgtggtggtcttcatgttcagcctctcatggcagctctccttggtcaccttcatgggcttccccatcatcatgatggtgtccaacatctacggcaagtactacaagaggctctccaaagaggtccagaatgccctggccagagcgagcaacacggcggaggagaccatcagtgccatgaagactgtccggagcttcgccaatgaggaggaggaggcagaggtgtacctgcggaagctgcagcaggtgtacaagctgaacaggaaggaggcagctgcctacatgtactacgtctggggcagcgggctcacactgctggtggtccaggtcagcatcctctactacgggggccaccttgtcatctcaggccagatgaccagcggcaacctcatcgccttcatcatctacgagtttgtcctgggagattgtatggagaatgtctccttcagcctgtcccccggcaaggtgacggccctggtggggccctcgggcagtgggaagagctcctgtgtcaacatcctggagaacttctaccccctggaggggggccgggtgctgctggacggcaagcccatcagcgcctacgaccacaagtacttgcaccgtgtgatctccctggtgagccaggagcccgtgctgttcgcccgctccatcacggataacatctcctacggcctgcccactgtgcctttcgagatggtggtggaggccgcacagaaggccaatgcccacggcttcatcatggaactccaggacggctacagcacagagacaggggagaagggcgcccagctgtcaggtggccagaagcagcgggtggccatggcccgggctctggtgcggaaccccccagtcctcatcctggatgaagccaccagcgctttggatgccgagagcgagtatctggtgagtcacagggtggtgggcaatgcgggggcaggagcggctccaggtggccagagcccccatcgcccagcagatggatgctgagaagagacgggccccaggagctctcccagactatcagcctcctgggctggtgaattcctggtgttgagagtggggagccaggagccactctggacccagcctccaggctccaggcagagctgtatggtgtggggcaagagaaggcatcagaatggggagacctgggtcatgagtggtggcttacacctgtaatcccagcactttgggaggccgaagcaggtggatcacctgaggtcaggagttgcagaccagcctggccaacatggtgaaaccccatctctactagaaatacaaaaactagccaggtgtggtagcacatgcctataatcccagctacttgggaggctgaggcaggagaattgcttgaacctgggaagtggaggttgcagtcagccgagattgtgccactgcactccagcctgggcgacagagccagactccatctggctcaaacaaacagacaaaac

SEQ ID NO: 15065 - protein, 426 aa, Homo sapiens [sequence omitted]

SEQ ID NO: 15066 - DNA, 2051 bp, Homo sapiens
gagaacaacggaggcagaggagctgaagactccagtatgcaactgactacaaggaggtagtcgtttgaaaagctttctttccttctctgaactccttctttccctcctctcaggtcattgggtgaccccgggccgggcggagacaggtgaatcccaagagaggaggaagagggagggacagatgatggagggagaaccgcgtttaggcaatgaatgagcctgctgcatccgcaccacctgttccttccaagggtgccaccccgacctgccagcagggttcccacaccaaccgggccgcgactcctgccggtgtcgcccacttgcccgccaaaggccgggcctcttctcccccagatcggggagaatgagaaccggcagtctagaagccgggaggtcggggcctagtccggaaccagggcctcaagcgtggggatggaatgaagaagcctgtggtccctggcgcgcgggccatagtaggaaccacagagagggagcaaagcaatgcattcggcctgacgagagctatgaaggcggggtcccgggcgggagtggctcagtgcccgccgggccgaggttaggggtgacaggcccggttaccggctaaatcctccccaccgcttgcccggagcctcacacttaccaagatccgcttgaagagcgcattctccttgggcgggaggctcacggccggcatcgttccggctgctcccgctgctcccgccaccacccggctcggtcagtcagtttgtccgaccgccgccgctgccgttccgtagctgcttcagccttgaatatctcgatccgccgccaccaccaggcctcgggtgtcgccgcgttgccctacccggacacctcctttttcctcgttgtcttttttcctttctcacttaacgctgccgccgcctcccccactacgggtctccgtcggcggttcacgtggtaactgaacagaccgacagaggcagccaaaatggcggacgcggagggttttcccacccgggtcacgcttcctaacacgcaggcgcggtgacctcctttccccacctcctctgggtttcggagcttgccgggaaacctggaggctggcctgcctgtggaggccgggagggtcggggcaggccccgcccatcatttcagtgcgtggtgccctcgaagcgcccgcggagctacgggaggctaggcaagtacggttcagaccgcctcctcatcaaaaacagcctctctggcgccttcctgctagatcgacctttcattccttggaaagagtctcgcacactgtgtgatcatcgtttgagcccaaagtgctaaaatacaggtgtaggtgtttgagaagcgctgtagttgattatggacgaaatgcctaatttaaggagcagaggcggagtggaaaatgaaaaaagcttcaccgcagtggagacttgttaacagccctggggagaaaggggcttaacagagtctggaaatcgtgaaagagcttgaccgatgaaatgggcctggctgtcgtatcggtaatttggtgaatgttgcttaagatcagcctggaaaggtagttagtcagatccgaagtgacatatttgcactgccaaaggaggctctggaggttaaagtatgtgttttaatttcgttgttgaggccatataatgcagagttgacggaccgaccttatgagtcaccttggagcggagtagtggagacttaaagacagactaccctggagctggcttcaaactagttcttaatattgtgactcgaactccccatccccagaaattctcagatcttagaagccaaagactggcaaggatactagagggaactactcgagtaggcgaggtcagactacataccgaataggagtccttccaaaaatgtaagtcatttcattaacagctgaccgtaaaactttttcaaagtggcattcctttgatctaaaaattttcaagttatatgagccacttttaacctttggtttttgattacctctttccaaatcctgatttcactctgtagcattctttgcatcatgaattattaaacaatatgtgcgtgtt

SEQ ID NO: 15067 - DNA, 3079 bp, Homo sapiens
  CDS (68)..(802)
tcttaaacaaggagaagtgccagaaagcccggaagcaaggaaggaaagtgaccaagcatgtggcaaaatggatactgtggatattgcaaacaactctactttgggaaaacccaagaggaaaagaagaaaaaagaaggggcatggctggagcagaacgggaacgagaacgcagaaaaacaaccaacaaaatgataacagcaaagccgatggccagctggtctcgagtgaaaagaaggcgaacatgaatctgaaagacctttccaagattagggggagaaagagaggcaaacctggaacccactttactcagagtgacagagctccacagaaaagagtccgatcaagagcttcaagaaagcacaaagatgaaactgtggattttcaggctcctttacttccagtgacctgtggtggggtgaagggaattttacataaggagaaattggaacaaggaaccttggcaaagtgtatacagactgaggatggaaaatggttcacccccatggaatttgaaatcaaaggaggctacgcaagatcaaagaactggaggctgagtgtgcgctgtggcgggtggcccctacgacggctgatggaggaaggatctctacctaatcctccaagaatatattacaggaacaaaaagagaatactgaagtctcaaaacaatagctcagttgacccttgtatgagaaacttggatgagtgtgaggtgtgccgggacggaggggagctgttctgttgcgacacttgttcaagagtcttccatgaggactgccacatcccacctgtggaaagtgagaagtaagtgacatgcaggcacctctctttcatcctttaagggaccttccacctgccatgcgcactctccagcagaatgtctgcttgtgtctagatggggaaggagcaggttcatcgggtactgggacccagcagtgtgatccagagagcagtgggagacgctggcagcaggaggtaaatgctctctgtgctctcagggacacctcctctgatatgctgaggccagtgttggggacctttgcctacatactggtattgtcctttccttgaagttttgcagtagggtctcctgccccagggggttgaggaaaaaaaacaccagttgtttatattttgtgcttattcatacaagacaggaagcacggtcttaggcggatggaggcctgacgtccctggagttgaaagcccagtttctgacacacaggcctggcaggcaggactccttgtgctcccagcagctcagacagggaaaggatagtccccactcacggtgacaccaccttcctgaggcttccctcctgctgctaccactgatgcgagggaaaggccagtggctggagaccccatgtgcagttcttggatactctgggaggtgttcccctccctcccatgactgagcccatcagccattcctgaaggaagacagtggtagccacaggaacggtggccatttccaagctccctgccctctgctcacccatgtccaatctctcaggaccccgtggaattgcatcttctgcaggatgaaggagtctccgggaagccaacagtgttgtcaggaatctgaggtcctggagaggcagatgtgtcctgaggaacagttggtaaatcagatgcaaaccccaagccttctcctttcccctcacacgtgagaaccatgaacaagcgcaagggcaggggaatgtactgaaaggagcctgctctaccgcgccacacttcaatggcactgatagaacaccacaccttgtttgcacaaaaaataactcagccatgacatgtctgtttccaagagccacacatgttagagaaacttgaggaagaagggtgtgagtcgtgtgctgtgtctcatgcatgtgggctcattctctccaagctgcttttcatttacggcctctttcttttgcagaaatgtgagttcctcctcttgaaagtctattgctgttctgagagctccttttttgccaagattccatactattattatattagagaggcgtgtcaaggcctgaaggagcccatgtggttggataaaatcaagaaaaggctgaatgagcacggttacccccaagtggaggggtttgtacaagacatgcgcctcatcttccagaaccacagggcctcttacaagtataaggattttggccaaatgggacttagactggaggctgaatttgagaaggatttcaaggaagtgtttgctattcaggaaacaaatgggaacagttgactggtttagtggatgctgaaggccttcaggaaatatgctactggttgccactgacttcaaactgagagcacttgggaaatagcacatgcagggagaggcttttctctgagcctccctcatccgcccaaaaacaaatcctcaaaagaaatttgatcatcatgaatcccatccccaagaatctcatcaaccagggaagaggaactgagatcacagggaaggagattggaggtgataccagcacagacagactctcacctcttctcctgaggtctgctccagacaacatttattactcacaagacctttttcctccgttttttttttgagatggagtctcacacagtcacccgggattggaatgcaatggcgcgatctcagctcactgcaacctctgcctcccggattcaagtgattcccctgtctcagcctcccaagtagctgggattacagtgcctgccaccatgcccagctaattttttgcatttttagtagagacggggtttcactatgttggccaggctggtctcgaactcctgacctcatgagccgcccgccttggcctcccaaagtgctgggacgtgacaggagtgagccaccacacctggccactcgcaagaccttttatctgaaaaccagccaagctttattcacgacacacttcttcccttcactctcccacttctgtggtcaactccctgcagaactcccaaactgccgttcttttcgatagctcacgatggtgtatgagtgtcaatcatctgacccttcttggagtctcatatttcgtggaactcctgtgcaaacatatattattaaattttttttcctcctgtc

SEQ ID NO: 15068 - protein, 245 aa, Homo sapiens
MDTVDIANNSTLGKPKRKRRKKKGHGWSRTGTRTQKNNQQNDNSKADGQLVSSEKKANMNLKDLSKIRGRKRGKPGTHFTQSDRAPQKRVRSRASRKHKDETVDFQAPLLPVTCGGVKGILHKEKLEQGTLAKCIQTEDGKWFTPMEFEIKGGYARSKNWRLSVRCGGWPLRRLMEEGSLPNPPRIYYRNKKRILKSQNNSSVDPCMRNLDECEVCRDGGELFCCDTCSRVFHEDCHIPPVESEK

SEQ ID NO: 15069 - DNA, 2686 bp, Homo sapiens
  CDS (338)..(1366)
aaaaaaagtctgcgcggcgcggccaggcccggccgaccgcgtctcggtctccgcgtctgccagcctggctggcagtccgtctgtccatcccgccgcgccggggcagtctaggcggagcgggggctcaggcggcggcggcctcgacgcgagtgagtgtcgtggttggggtgctggacccagagtgcctaccctcgcctgcctgggcctcagtttccacatctgcacaatgggggtgaccatccctgccctgctggctgccaggagcggctgtgagtcttcaggcgtggatgcagcctgggggaagccatagggcgctttcacaggcctggccttcaccatggcgggagggagaccgcatctgaagaggagtttctccatcatcccctgctttgtcttcgtggagtcggtgctgctgggcattgtgatcctgcttgcttaccgcctggagttcacggacaccctccctgtgcacacccagggattcttctgctatgacagtacctacgccaagccctacccagggcctgaggctgccagccgagtgcctcctgctcttgtctacgcactggtcactgccgggcccaccctcacgatcctgctgggagagctggcgcgtgcctttttccctgcaccaccttcagccgtcccagtcatcggggagagcaccatcgtgtctggggcctgctgccgcttcagccccccagtgcggaggctggtccgcttcctgggggtctactccttcggcctcttcaccacgaccatcttcgccaacgcggggcaggtggtgaccggcaatcccacgccacacttcctgtccgtgtgccgccccaactacacggccctgggctgcctgccaccttctccggatcggccaggtcccgaccgctttgtcactgaccagggtgcctgcgctggcagtcccagcctcgtggccgccgcgcgccgcgccttcccctgcaaggatgcggccctctgcgcctacgcggtcacctacacagcgatgtacgtgactctcgtgttccgcgtgaagggctcccgcctggtcaaaccctcgctctgcctggccttgctgtgcccggccttcctggtgggcgtggtccgcgtggccgagtaccgaaaccactggtcggacgtgctggctggcttcctgacaggggcggccatcgccacctttttggtcacctgcgttgtgcataactttcagagccggccaccctctggccgaaggctctctccctgggaggacctgggccaagcccccaccatggatagccccctcgaaaagaacccgaggtctgcaggccgcattcgacaccggcacggctcaccccatccaagtcgcagaactgcgcccgccgtggccacctgatccccagctgtgtctcctccagggccccagccatgtgttcgtcgccccgtgtgccccgtcctcgattgaggtctgagccgacgcccttgcccctgcccctacccctgccagcgcccacccccagccagggcccctcgccttcctcccctggacctggggggccaggcgggggtggtggacgtggccggaagctgctgctgcccacgcccctgctgcgggacctgtacaccctgagtggactctatccctcccccttccaccgggacaacttcagcccttacctgtttgccagccgtgaccacccgctgtgaggcccgaccacccacccagaatctgcccagtccccacttcttccctgccacgcgtgtgtgtgcgtgtgccacgtgagtgccaaagtcccctgccccccaagccagccagacccagacattagaagatggctagaaggacatttaggagacatctgcctctctggccctctgagatatcccgatgggcacaaatggaaggtgcgcacttgcccctactattgcccttttaagggccaaagcttgaccccattggccattgcctggctaatgagaacccctggttctcagaattttaaccaaaaggagttggctccaaccaatgggagccttcccctcacttcttggaatcctcctgcaagagggcaactccagccagtgttcagcgactgaacagccaataggagcccttggtttccagaatttctagagtgggtgggcatgattccagtcaatgggggaccgcccgtgtctaagcatgtgcaaaggagaggagggagatgaggtcattgtttgtcattgagtcttctctcagaatcagcgagcccagctgtagggtggggggcaggctcccccatggcagggtccttggggtaccccttttcctctcagcccctccctgtgtgcggcctctccacctctcacccactctctcctaatcccctacttaagtagggcttgccccacttcagaggttttggggttcagggtgctgtgtctccccttgcctgtgcccaggtcatcccaaacccttctgttatttattagggctgtgggaagggtttttcttctttttcttggaacctgcccctgttcttcacactgccccccatgcctcagcctcatacagatgtgccatcatggggggcatgggtggagcagaggggctccctcaccccgggcaggcaaaggcagtgggtagaggaggcactgcccccctttcctgccccctcctcatctttaataaagacctggcttctcatctttaacaaagacctgtttgtaacag

SEQ ID NO: 15070 - protein, 343 aa, Homo sapiens
MAGGRPHLKRSFSIIPCFVFVESVLLGIVILLAYRLEFTDTLPVHTQGFFCYDSTYAKPYPGPEAASRVPPALVYALVTAGPTLTILLGELARAFFPAPPSAVPVIGESTIVSGACCRFSPPVRRLVRFLGVYSFGLFTTTIFANAGQVVTGNPTPHFLSVCRPNYTALGCLPPSPDRPGPDRFVTDQGACAGSPSLVAAARRAFPCKDAALCAYAVTYTAMYVTLVFRVKGSRLVKPSLCLALLCPAFLVGVVRVAEYRNHWSDVLAGFLTGAAIATFLVTCVVHNFQSRPPSGRRLSPWEDLGQAPTMDSPLEKNPRSAGRIRHRHGSPHPSRRTAPAVAT

SEQ ID NO: 15071 - DNA, 2368 bp, Homo sapiens
  CDS (194)..(1738)
agagcgcggcgcgaccggacgctgcgggcggggaagaggatggagactgtggcgtccgctgcaacggttggggctgcgcgtgagaaggtggcggtgtaggcacctgcgctcggggaaggctggcggcggcggccgagccatggcgggagacccccttctctgggctccctgaagtctcggggagccgtgacccatgggatcgttgagcagccgggtgctgcgccagccaagaccagcccttgcccagcaggcgcagggtgccagggcggggggctcggcccggaggccggacactggagacgatgcggcgggccacggattctgttactgtgcgggcagccacaagcgcaagcggagcagcgggtccttctgctactgtcaccctgactcggagacggacgaggatgaggaggagggggacgagcagcagcggctcctcaacacccctcgaaggaaaaaattaaagagtacatctaaatatatttatcaaacattatttttgaatggtgaaaacagtgacattaagatttgtgctctaggagaagaatggagcttacacaaaatatatttatgtcaatctggctacttttctagtatgttcagtggttcttggaaagaatccagcatgaatattattgaactggagattcctgaccagaacatggatgtagaagcactgcaggttgcatttggttcactgtatcgagatgatgtcttgataaagcccagtcgagttgttgccattttggcagcagcttgtttgctgcagttggacggtttaatacagcagtgtggtgagacaatgaaggaaacagttaatgtgaaaactgtatgtggctattacacatcagcagggacctatggattagattctgtaaagaaaaagtgccttgaatggcttctaaacaatttgatgactcaccagaatgttgaactttttaaagaactcagtataaatgtcatgaaacagctcattggttcatctaacttatttgtgatgcaagtggagatggatatatacactgctctaaaaaagtggatgttccttcaacttgtgccttcttggaatggatctttaaaacagcttttgacagaaacagatgtctggttttctaaacagaggaaagattttgaaggtatggcctttcttgaaactgaacaaggaaaaccatttgtgtcagtattcagacatttaaggttacaatatattatcagtgatctggcttctgcaagaattattgaacaagatgctgtagtaccttcagaatggctctcttctgtgtataaacagcagtggtttgctatgctgcgggcagaacaggacagtgaggtggggcctcaagaaatcaataaagaagaactagagggaaacagcatgaggtgtggtagaaagcttgccaaagatggtgaatactgctggcgttggacaggttttaacttcggcttcgacctacttgtaacttacaccaatcgatacatcattttcaaacgcaatacactgaatcagccatgtagcggatctgtcagtttacagcctcgaaggagcatagcatttagattacgtttggcttcttttgatagtagtggaaaactaatatgtagtagaacaactggctatcaaatacttacacttgaaaaggatcaggaacaagtggtgatgaacttggacagcaggcttctgatcttccctttatatatctgctgtaacttcttgtatatatcaccagaaaaaaagaattgaaaataatcgtcacccagaaaatccagaaaactgaagatttcatcagttggaaacagtagcactttgaaaactttttaggccagctttaatttaatggccctactgatattcacatcgaaggtgactaacaatgacaaaggccttatgaactgtacagacaatacagaagattattcttatcctcattgcatttctatgcatatgcgtaagaacattttaaagccaagaaaatatctgtcaaaccatttctgttagaacgatgtcaattcatgcttttaatttagcatcaatagaaaattgctgtaggtaaatctcacatttatctgcaacaaaatatagatttaatttttagcttaaactttgtttctaccttatgttagtggacctcagttatccatctgtaaatttctttttatttggctaaaataatctaaaagaataatttggttggccaattagaaatgcctttttcagttggtgtattgaaagctttcctttaacattttcacctgctcattgtgattcctccttttagtctaatatctttccaggtcatacttgtttttaatcattaaatattttcttcctggttttggagactaagctgataaactttttttaaaactt

SEQ ID NO: 15072 - protein, 515 aa, Homo sapiens [sequence omitted]

SEQ ID NO: 15073 - DNA, 2663 bp, Homo sapiens
  CDS (72)..(1991)
accccacccgcttccggccgcggctcggttctcccgcctccgcctccgccgcggctcgtggttgtcccgccatggcactgtcgcgggggctgccccgggagctggctgaggcggtggccgggggccgggtgctggtggtgggggcgggcggcatcggctgcgagctcctcaagaatctcgtgctcaccggtttctcccacatcgacctgattgatctggatactattgatgtaagcaacctcaacagacagtttttgtttcaaaagaaacatgttggaagatcaaaggcacaggttgccaaggaaagtgtactgcagttttacccgaaagctaatatcgttgcctaccatgacagcatcatcaaccctgactataatgtggaatttttccgacagtttatactggttatgaatgctttagataacagagctgcccgaaaccatgttaatagagtgtgcctggcagctgatgttcctcttattgaaagtggaacagctgggtatcttggacaagtaactactatcaaaaagggtgtgaccgagtgttatgagtgtcatcctaagccgacccagagaacctttcctggctgtacaattcgtaacacaccttcagaacctatacattgcatcgtttgggcaaagtacttgttcaaccagttgtttggggaagaagatgctgatcaagaagtatctcctgacagagctgaccctgaagctgcctgggaaccaacagaagccgaagccagagctagagcatctaatgaagatggtgacattaaacgtatttctactaaggaatgggctaaatcaactggatatgatccagttaaactttttaccaagctttttaaagatgacatcaggtatctgttgacaatggacaaactatggcggaaaaggaaacctccagttccgttggactgggctgaagtacaaagtcaaggagaagaaacgaatgcatcagatcaacagaatgaaccccagttaggcctgaaagaccagcaggttctagatgtaaagagctatgcacgtcttttttcaaagagcatcgagactttgagagttcatttagcagaaaagggggatggagctgagctcatatgggataaggatgacccatctgcaatggattttgtcacctctgctgcaaacctcaggatgcatattttcagtatgaatatgaagagtagatttgatatcaaatcaatggcagggaacattattcctgctattgctactactaatgcagtaattgctgggttgatagtattggaaggattgaagattttatcaggaaaaatagaccagtgcagaacaatttttttgaataaacaaccaaacccaagaaagaagcttcttgtgccttgtgcactggatcctcccaaccccaattgttatgtatgtgccagcaagccagaggtgactgtgcggctgaatgtccataaagtgactgttctcaccttacaagacaagatagtgaaagaaaaatttgctatggtagcaccagatgtccaaattgaagatgggaaaggaacaatcctaatatcttccgaagagggagagacggaagctaataatcacaagaagttgtcagaatttggaattagaaatggcagccggcttcaagcagatgacttcctccaggactatactttattgatcaacatccttcatagtgaagacctaggaaaggacgttgaatttgaagttgttggtgatgccccggaaaaagtggggcccaaacaagctgaagatgctgccaaaagcataaccaatggcagtgatgatggagctcagccctccacctccacagctcaagagcaagatgacgttctcatagttgattcggatgaagaagattcttcaaataatgccgacgtcagtgaagaagagagaagccgcaagaggaaattagatgagaaagagaatctcagtgcaaagaggtcacgtatagaacagaaggaagagcttgatgatgtcacagcattagattgaacagaaatgcctctaaacagaaccctcttactatttagtttatctgggcagaaccagattgttatgtcctttgttccaaagggaaaaaattgacagcagtgacttgaaaatgattctgctccctttgaaagcattcattttgctagaactgttagacacattgcagtatgctgtattgaaagtaggaatatagttttaaaaaccctttgaacaaagtgtgtgcataaccagtcatgagataaaacaacacaatgcatgttgcctttttaatgtaaatacccttaggtatcattaatagtttcaaaatattgtggtttagtaaagttgatacctggttataaatattatgcctttatttttggctagaagaagaattatttttagcctagatctaaccattttcatactcttaactgattgaaacagattcaaagaagtatcgagtgctatgcattgaaacttgtttttaaatgttagatggcactatgtatattaatgtaaaacaatgttaatttactcaagttttcagtttgtaccgcctggtatgtctgtgtaagaagccaatttttgtgtattgttacagtttcaggttatttatattcgatgttttgtaaaactcaaataacgactatacttatggaccaaataaatggcatctgcattcttgtt

SEQ ID NO: 15074 - protein, 640 aa, Homo sapiens [sequence omitted]

SEQ ID NO: 15075 - DNA, 2735 bp, Homo sapiens
  CDS (212)..(733)
attctttgaaatctagtcacattttagtgatctttgtgatcacaacagtgatgggagtttttttttttttttttttttttttgaaacggagtttcgctcttgttgcccaggctgcagtggcaatggtgcgatcttggctcactgcaaccttcgcctcctgggttcaagcgattctcctgtctcggcctcccgagtagctgggattacaggcatgtgccaccatgccgggctgatttttgtatttttagtagagacggggtttcaccatgttggtcaggctggtctccaactcctgactttaggtgatccgcccgcctctgcctctcaaagtgctgggattacaggcgtgagccaccgcgcccggccagttacgggaatttttaatggagttttaccctttttagctcttttccacatcactacaggtcatcacatatactttttaccttactttttagcgtctcaaaaaatagggagagctctccctgaacagtgcagagcccgtatccctgatttcctaggctatttgatttctacatccaggaacgtagggtcatatccactgttcttgctttttcttcctaagaaaggagagaattcctcgcacatatatatcgttggcttggccttccaaagcaaagcaaaactaaactctgttgattttgcctgggaatcctcggggcccctagtattggaaacttctttgaactgtgaggagctgctaatttgcaggtgacatgtgaaagaaatgtaaccgaggccagcagtagctaaaagtcggccaccacccaacgtgtgacgccgatttgtggccactgtgcttataatcgtgtacacacaggtttgtgagcagcagagaacaaaagcaagtaaacaaaaacaagctaaagatggcgtctgacggccttgaaaaagcctcacagtcttgtccctccctgaggaggcccctcccctacctgactttttgagtgactgttgtttgcagccaatagtgtccgtgaccctgctccccagccatcgtctaaccgccaatcaccgggagccagaaggcaaacggggcggtgtctccccgcgtgcgcgcggtagccgggtacacgggcaggcgccgcggatagttctgtctcccgcgcgcccgcctccgcctctgcctagctgagtcagcccgtgcggtagcgccaggcacacgcggtagaacatctgtagggctgcaaagctgcacctccgcgtcagttctcacggcgagcgccgccttcagcccaagttctcaaagctctcggggctacgtagtctaccctccccggtgacccggcgagatccctagccgctcctccggccgctctgctctccgcatccctcgcgggaatgaccccctttacccgggactcccagagcgcactgtatggtagggcacagtggcgagtcaccctgtcccctgaggcctcttgagcagtcgccgatctctgcttcccgcgtcgctgcgatcgcctttcccgtagctgaatcacactgacccatcggaaacggttctgccctccctggggtccaccttgtcatccttgactaatatttaatcaactaacatttaccaagttctcgctggcacgagttctaggagctactttttcatttttcagtttctccataaatgcagtgggtcctttaggcaaacctgaaatcggaaatattaatcttaccaatgtaatcttagcaaatgtaaataaaaaggactgtgctatactgagctaaaaattctcatcctgctatagaaatatacgtggaattttcagattacgtggaatcctttaaagaccgcattcggccttctgggtctacagctctctttttttacccctaaaaataaggtcttggattttttgcagaccattagtcgagtcactcttttaaaatgtgggaaaatagtattttgtggtatttacttagctgctcttgtgtgataaggagctcatttctgataaaaataggttttgagagaaccttttgacaggtgagccattttgcaccttgaagtggaggagtaggactgaccaacacagcaggagctttaagtggccgttttccttatttatttcttaaaatgaagattatgatatgaattgccatgctttcagtaatcacatttaaggaagtctattgctagcatgaccctgaatgagtcaagcacccattataaaaacatatatcatctgagtgataccatatcatacacatctattaaatagtgagaaaacttttatttttcatagtttggaggtgaactcagtcatgcagaaaattcaaactcagaatggggagaaagcaagcaagggaactgccaagagtatgatatatttagtcctaacaaaaatgtgacttgggaggaaagggatagttaaaattatggacagtcttaccctgaactgtctgtctaaaggagatgaattgtctttcttttttatctaaatatttatgaaaaataccaaaagtactggaaagtacatttttaaggctcgtttcacatttatttaaattagaccaatactgaaatgaaccccaaatgcttatattttttgcaaacctaagtgtgacatctactgtcatgttgtgttggcaacgcatcccaagattgaagatctttttctcttttttagacctagtcagttgttttcaggactttctacttaaacatgttgccatcatttgaaatttaaaatgttaaataaatacacttcttctct

SEQ ID NO: 15076 - protein, 174 aa, Homo sapiens [sequence omitted]

SEQ ID NO: 15077 - DNA, 3107 bp, Homo sapiens
atattttcagcatcacattttaagaataatatgtgaaatacaatatgttttattagtcacctttggaaaatacagtcttccacaatctggaaccacctctttggttcaaaatgtgccattcttctgtaatgtgtgtgataaacttaaaaaaaatctgtatcctttatcctaatcatcttacttggacatcatcctgaaacaaatgacaaaaacattcacagttttatatacaaagttattggtaacaatgttcttaatagaattcaattagaaaacatataaaggcaaaggtagagttatttgatgttatggtttgaaaggattcccacaccctcatgaatattctttattatgccagagggaacctaattcccctgcctttgagtgtgggatggcattgatgagttacttgtaccacatataataggcaggaagtgatggcacgtgacattggaaacaacttcgtaaaagtcaccgagactcattccttgctttctcctatgtctcccacctggcaggaagacatttgccatcatgtaaggagagttctgcttagtgaggcattgacatctccagccagcagtgccgtgagggaggtgggcagctcaagcctcagtcaaaccctgagatgaccatggtcccactcaacatctcagctgtgaccatgtgggagaatccaagcctgagccaatcagcctagctgctcccagagtcctgactctcagaaaccatgccagattatacatatctgcagctttaagcttctgagattttggaatgactgatgacagagcaataaataactaatacatttcaccacatatcacttagcagaatgccatggagctattaaacacaatattttatgaagattagtctatgatatggagatatactcacaatgttattagcaacacaactagaccaactgagtataggtagtataatctcaatttgttctaaaaatataaatctgtacaaagatagaaagaccagaagaaaaaaaccatttaatacttgatagataattacaatggtaaagaatttagccttgatcacttgatttgagacggaatctaacttgctagctgtatatccatagtgtggatgtgtaaccaatgatttgtaaactaattctcagtttactcgtctatataaaagagctagtaatattacctatttcatgcggcttgggagaaatgaatcaataatatatagaagggcttagttctcatattgtggcaagtacttcacaaatgataatttttactattacaatttttataaggctttctgtaattcacaaattttctaatatctattttatgacttttgaaataattcttacaatatcccttttagtaacctttattacaaaatctattgtaatctcttaaaataatattcctttttgtttttctccgagatagtctatctaatgatgttacaatagagttaccaacaaatgccatatttcattcctgagcgtctatattcttgagttcctagcaacaaagaacaaagtagcaaccatttcttaagaaaatgctgagatggacaccagagtttcaagcaattttcatccagaaggtcacatgttaggggtaaaagctatatggaatcttgaacaagcatagcatctaatagccttatttgattaaaaaaatgaatacacacaaaaattttttgaagactaactaccccttagaaatgttcgttaacttggtcagtcatataagcctacctcccatttattcaatagatcaggtaactcccctctttgttatgagcccagttttctagaggtggaccagattccatcatatgtacatcactctgctagttgagctctctaaatgaaaacttcagccgtagccactggatagaagaatacaagaaggaatgccaacttgaggagcaagttgtgttgagttcaggcattgctttggagaatctgcttcttcacctgctggcttacagggttggatgacctgaggcagcagcagaagtttagacaattacggttggatgattcttaactgtcctaatcccaagtcctcaatttataagtgaggaactggaaaatcattcacacagctagctgcaagcaatgacagccttggagagaaatcaacctgtgtacagctcagtcccatctgagttctttggagaacaaactccagcagctacttctagaaaatatagacagcatattcagccaatctcctgagctggtgggacatttttacatgaacaaggcctccctccacatgaattgcaaagattcagtggactttgcatgattattcttctaatcttacattaagctttattttggattttaaaaaaatctgccacgtgtaagggcaccaatgtccaccaatattgttatataaaataacattattaatccttcctgtttatcttttaatcagaactaagagggatggtggatgatgaatgcatgagtcatacttacttcatgattctataaatcctaattttcacttttttaaaataaaaattgcatgcaaaccaaaaagaagctgcctaaaacagacgtggagatactctacttaggtttcccagggaaagacaattttaaaaaacaattttagcaacaaaaatacatgggcagggaatacacgcatttattatcatttttcctcttaaagcagctatgatgagacacgtccaaaacacctgctcttgtgtactgcccagtttcacgtgagttctgtgggataacactgaatccactcttcaactacagtgaggaagtgatagaactgcttctggcacaccaaagaacagcacagaggtccaaatacatcttccttaggtgcccatgaatttaaatttatttctgctttatcctttaaaaaaaaatctaacgatttcaaatgccttgctgaaatcaacaccctctgcaacagccctctcaggatagttcatcctagtaggtctgtcaaaactgaaacaccaacatgtgagttcctcctctgggttttaaatgttagtactgtgactacttctttgtttgttttcacttttaattgacaaataataactgtatatgttatacagtaaatctgacgttttgatat

SEQ ID NO: 15078 - DNA, 2731 bp, Homo sapiens
  CDS (167)..(1522)
actttctaaatcacagtgcctgtggccggatgacatggagggagctccctgaccataggaggggttagagacacgacgcccctctaccctcactcacagcagaggtggaaagctggagactgacccagtcgcagagcgcaccccactggggacccccagctcagccatgctggcctgtctgcagaggacccagaacgccccgggccaacacctggcctgcccgagcaagagcctggagctgcgcaagtgcgaggcggtggccagcgccatgcattcctcccgctacccgagcccagcagaactggacgcctatgccgagaaggtggccaacagcccgctgtccatcaagatcttccccaccaacatccgtgtgccccagcacaagcacctcagccgcacagtcaatggctatgacaccggtggccagcgctacagcccctacccacagcacaccgctggctaccagggccttctggccattgtcaaggccgcggtttcctcctccagcacggccgcaccagctgggcccgccaaaagtgtgctcaagagcgccgagggcaagcggaccaagctgtcaccggccgccgtgcaggtgggcattgcgccctacccagtgcccagcactctgggtcccttggcctaccccaagccacctgaggcgcctgctccaccacccggcctgcccgcagccgccactgccgcctccgtcatccccctgccgggccggggcctgcccctgccaccttccaacctgccctccatccacagcctcctgtaccagctcaaccagcagtgccaggccccgggcgccgcaccccctgcctgccagggcatggctattccccatcccagccctgccaagcacggcccagtgcccagcttccccagcatggcctactcggctgcagccggtctgcccgactgccggaaaggcactgagctgggccagggagccacccaagccttgacgttggctggggccgccaagcctgcagggtacgcagacagcggcctggattacctgctgtggccgcagaaaccgcccccaccgccgccccagccactgcgtgcctacagtgggagcacggtggccagcaagtcccctgaggcttgcgggggccgggcatacgagcgggccagcgggtcacccctcaactgtggcgtggggctgcccaccagcttcaccgtaggccagtactttgcggccccgtggaacagtgtgctggtgacacccaccagcgactactacaacccagcggcggcggtggtggtcacggagctggggccgggggcagcccgggagctggctgggccccctgcagatgccctctcgggcctgcccagcaagagtgtgtgcaacacatcggtgctgagcagcagcctgcagtcactggagtatctcatcaacgacatccggccgccctgcatcaaggagcagatgctgggcaagggctatgagacggtggccgtgccccggctactcgaccaccagcatgcccacatccgcctacccgtctacagataaggcctgccctgcggacatacggacatgcggacagggcgcagagccgggaggcaggccgcagaacagggtgggcggctcgcaggggcgctcagccccaccctgtgcctgctgatgcccacaggggagccaggctggctgccgcctcgctgtggccggatggagggtggcagggcaacctcacataccaaggcccctccccaccatcggttgccccaggacacagtgagggcctgggggcagccactgacgcccatgccttcctttatctaagctggcagaggcagggagagagaaaccactcaaaaacaggaatggttctttctgggcctcctgggacaggggcccaggccaaggtggggtgcaggaggaaacaggcgcaccagagtcagggtgggggcagggcagcccccccaggggtcaggcagctgtgtctccccacactggctccccagtattctggaaaaggggtacaggaggccgataggaagtcactgggcccaaagtgtctccccaccagccaggtgaagaccactctgatagaggctccagggactataccagtccccctgttcctccttcccctacccccaccattccttcctaacacagagttgcacccccatccccattctccaaaccctggactaccatattcccccttccctccaatacatcttatagggctgctgggtacagttgttcaggctgtgcactgcacaagggcaccttgtccaaggagacaccactttcacccaaacttgtatatttattacaattttctgcatcttgaggaaggggcgtcattttcctgttcgcacaaaggcaccacaggggctaacagtgggcctgcaatcttagatcccatccttgccttcttcgagggatctcttgggaccctcctggttttaactgggaggcccagaccaactcctttcctgcaaaccaccctccaaggcctgtcccacacgatcaaggcagggaaagataggcaggagtcccctcacgaagtcctcaagtcctggcccctctggcgctctggaagcggtactgtatctctctccaaggcctggtcaagcactaagtgcatttacaaatctctgagaatgttttttttatactaaaattgaccattatattctactgtgagaagtgcagtctgcactatattgttttaaaaacgaagagaaagaagaaaaaggaaaacac

SEQ ID NO: 15079 - protein, 452 aa, Homo sapiens
MLACLQRTQNAPGQHLACPSKSLELRKCEAVASAMHSSRYPSPAELDAYAEKVANSPLSIKIFPTNIRVPQHKHLSRTVNGYDTGGQRYSPYPQHTAGYQGLLAIVKAAVSSSSTAAPAGPAKSVLKSAEGKRTKLSPAAVQVGIAPYPVPSTLGPLAYPKPPEAPAPPPGLPAAATAASVIPLPGRGLPLPPSNLPSIHSLLYQLNQQCQAPGAAPPACQGMAIPHPSPAKHGPVPSFPSMAYSAAAGLPDCRKGTELGQGATQALTLAGAAKPAGYADSGLDYLLWPQKPPPPPPQPLRAYSGSTVASKSPEACGGRAYERASGSPLNCGVGLPTSFTVGQYFAAPWNSVLVTPTSDYYNPAAAVVVTELGPGAARELAGPPADALSGLPSKSVCNTSVLSSSLQSLEYLINDIRPPCIKEQMLGKGYETVAVPRLLDHQHAHIRLPVYR

SEQ ID NO: 15080 - DNA, 3653 bp, Homo sapiens
  CDS (1363)..(2085)
gcggcgcgagcggtcggcggcggcggaggcagtgtctcccggtcgcgcgtggaggtcggtcgctcagagctgctgggcgcagtttctccgcctgctgcttcggcgcggctgtatcggcgagcgagcgagttcccgcgagttctcggtggcgctcccccttcctttcagtctccacggactggcccctcgtccttctacttgaccgctcccgtcttccgccgccttctggcgctttccgttgggccgattcccgcccgcttcctcctgcttcccatcgaagctctagaaatgaatgtttccatctcttcagagatgaaccagattatgatgcatcattatcacagaagaaattcgtgtctatagcttttaaggacttgattacatcattttcaagcctgatagttttggaatcaccattagagcttaagacacacctgccttcatttcaaccacctgtcttcataccctgacgaagtgcaccttttaacactcctttgtccttggattacttaagagttcccagaaatacatttgccaccaacagagtagccaaatttataaggaaaaatgattcccaatggatatttgatgtttgaggatgaaaattttattgagtcttctgttgccaaattaaatgccctgaggaaaagtggccagttctgtgatgttcgacttcaggtctgtggccatgaaatgttagcacacagagcagtgctagcttgctgcagtccctatttatttgaaatctttaatagtgatagtgatcctcatggaatttctcacgttaaatttgatgatctcaatccagaagctgttgaagtcttgttgaattatgcctacactgctcagttgaaagcagataaggaattggtaaaagatgtttattctgcagcaaaaaagctgaagatggatcgagtaaagcaggtttgtggtgattatttactgtctagaatggatgttaccagctgcatctcttaccgaaattttgcaagttgtatgggagactcccgtttgttgaataaggttgatgcttatattcaggagcatttgttacaaatttctgaagaggaggagtttcttaagcttccaaggctaaagttggaggtaatgcttgaagataatgtttgcttgcccagcaatggcaaattatatacaaaggtaatcaactgggtgcagcgtagcatctgggagaatggagacagtctggaagagctgatggaagaggtttattaacaaaactaggatacccaagactgaagaaacaagaagaaacctcaagtgtattgacacgtaaagaagcagcagtcctgccccagttctcctaagaaagatccgctgtgggcagagaacgatgatgatttaatggttcaaaccttgtactactcagctgatcacaagctgcttgatgggaacctactagatggacaggctgaggtgtttggcagtgatgatgaccacattcagtttgtgcagaaaaagccaccacgtgagaatggccataagcagataagtagcagttcaactggatgtctctcttctccaaatgctacagtacaaagccctaagcatgagtggaaaatcgttgcttcagaaaagacttcaaataacacttacttgtgcctggctgtgctggatggtatattctgtgtcatttttcttcatgggagaaacagcccacagagctcaccaacaagtactccaaaactaagtaagagtttaagctttgagatgcaacaagatgagctaatcgaaaagcccatgtctcctatgcagtacgcacgatctggtctgggaacagcagagatgaatggcaaactcatagctgcaggtggctataacagagaggaatgtcttcgaacagtcgaatgctataatccacatacagatcactggtcctttcttgctcccatgagaacaccaagagcccgatttcaaatggctgtactcatgggccagctctatgtggtaggtggatcaaatggccactcagatgacctgagttgtggagagatgtatgattcaaacatagatgactggattcctgttccagaattgagaactaaccgttgtaatgagtgtgtgctctgaatggaaagttatacatcgttggtggctctgatccatatggtcaaagaggactgaaaaattgtgatgtatttgatcctgtaacaaagttgtggacaagctgtgcccctcttaacattcggagacaccagtctgcagtctgtgagcttggtggttatttgtacataatcggaggtgcagaatcttggaattgtctgaacacagtagaacgatacaatcctgaaaataatacctggactttaattgcacccatgaatgtggctaggcgaggagctggagtggctgttcttaatggaaaactgtttgtatgtggtggctttgatggttctcatgccatcagttgtgtggaaatgtatggtccaactagaaatgaatggaagatgatgggaaatatgacttcaccaaggagcaatgctgggattgcaactgtagggaacaccatttatgcagtgggaggattcgatggcaatgaatttctgaatacggtggaagtctataaccttgagtcaaatgaatggagcccctatacaaagattttccagttttaacaaatttaagaccctctcaaactaacaggcttagtgatgtaattatggttagcagaggtacacttgtgaataaagagggtgggtgggtatagatgttgctaacagcaacacaaagcttttgcatattgcatactattaaacatgctgtacatactttttgggtttatttggaaaggaatgcaaagatgaaggtctgttttgtgtacttttaagactttggttattttactttttggaaaagaataaaccaagaattgattgggcacatcatttcaagaagtcccctctcctccacatttgttttgccaatttgcacattaaatgactcttccctcaaatgtgtactatggagtaaaaggggtagggtttaaagatgtagacagttgggttttttaagggccctttttcaataactggaacactctataacaaaggatacttatttaaatagatgacattgactatttttgtttttattaaaaggaagcttacatgcctaccaatatttaatcttttatgattgcctttttataactttttatattctcagcagagtgctttaccaattgaagtaaaatgtggcaggctggagttattgaagcagagtggcagtcttcagtttgcagagtaggggtctgtcttttaaactctgagtgcaaacttcagagttcttgccttggctgcagtttttttccttcaagaatgcagtactaacatttatttgagtggagttactgaacagtaacatagctgtgatttttggtatttgaaacactggttttaaatattttgacttgttgagggtatgttttatatagcaagacattatatagcagtaaaaaatggtgttttatcttctatataattcctgtttttattattaacaaaacagtcctaaatagcagccctcaattgtgaaaaaatttactttaaactacattaggttgtgaatgcaggttttatcagaactatgtttttgttcagtttatctgttcatatggataaatattggttgggatg

SEQ ID NO: 15081 - protein, 241 aa, Homo sapiens
MVQTLYYSADHKLLDGNLLDGQAEVFGSDDDHIQFVQKKPPRENGHKQISSSSTGCLSSPNATVQSPKHEWKIVASEKTSNNTYLCLAVLDGIFCVIFLHGRNSPQSSPTSTPKLSKSLSFEMQQDELIEKPMSPMQYARSGLGTAEMNGKLIAAGGYNREECLRTVECYNPHTDHWSFLAPMRTPRARFQMAVLMGQLYVVGGSNGHSDDLSCGEMYDSNIDDWIPVPELRTNRCNECVL

SEQ ID NO: 15082 - DNA, 3105 bp, Homo sapiens
  CDS (170)..(2113)
acatggcggcgggaagggagtgagccgccccgcgcccccgccgcgccctcagatggagaaattagcatacaaagaaactgacttgtcagaagtcagagcaaggtattggtggatccagggataaatcccaaacttcttaacccctagaccggtttttagtccattgactatgcagcctaatgtgatagactggagtgatgttagaaaacacaaatatggtcacctatcagagtctgcatcccaatatcaagaagctgctgacatcctggatctaggtcattttacctgggacaaatacctaaaagaaacatgttcagtcccagcgcctgtccattgcttcaagcagtcctacacacctccaagcaacgagttcaagatcagtatgaaattggaagcacaggaccccaggaacaccacatccacctgtattgccacagtagttggactgacaggtgcccgccttcgcctgcgccttgatgggagcgacaacaaaaatgacttctggcggctggttgactcagctgaaatccagcctattgggaactgtgaaaagaatgggggtatgctacagccacctcttggatttcggctgaatgcgtcttcttggcccatgttccttttgaagacgctaaatggagcagagatggctcccatcaggattttccacaaggagccaccatcgccttcccacaacttcttcaaaatgggaatgaagctagaagctgtggacaggaagaaccctcatttcatttgcccagccactattggggaggttcggggctcagaggtgcttgtcacttctgatgggtggcgaggggcctttgactactggtgccgcttcgactcccgagacatcttccctgtgggctggtgttccttgactggagacaacctgcagcctcctggcaccaaagttgtgattccaaagaatccctatcctgcctccgatgtgaatactgagaagcccagcatccacagcagcaccaaaactgtcttggaacatcaaccagggcagagggggcgtaaaccaggaaagaagcggggccggacacccaagaccctaatttcccatcccatctctgccccatccaagacagctgaacctttgaaattcccaaagaagagaggtcccaaacctggcagcaagaggaaacctcggactttgctgaaccccccacctgcctcaccaacaaccagcactcctgaaccggataccagcactgtaccccaggatgctgccaccatccccagctcagccatgcaggccccaacagtttgtatctacttgaacaagaatggcagcacaggcccccacttagataagaagaaggtccagcaactccctgaccattttggaccagcccgtgcctctgtggtgttgcagcaggctgtccaggcctgtatcgactgtgcttatcaccagaaaaccgtcttcagcttcctcaagcaaggccatggtggtgaggttatctcagccgtgtttgaccgggaacagcataccctcaacctcccagcagtcaacagcatcacctacgtcctccgcttcctggagaaactctgccacaaccttcgtagtgacaatctgtttggcaaccagccctttacacagactcacttgtcactcactgccatagagtacagccacagccacgacaggtacctaccaggtgaaacctttgtcctggggaatagtctggcccgctccttggaaccacactcagactcaatggactctgcctcaaatcccaccaaccttgtcagcacctcccaaaggcaccggcccttgctttcatcctgtggcctcccaccaagcactgcctcagctgtgcgcaggctatgctccagggggtcggaccgatacctggagagccgcgatgcctctcgactgagtggccgggacccctcctcatggacagtcgaggatgtgatgcagtttgtccgggaagctgatcctcagcttggaccccacgctgacctgtttcgcaaacacgagatcgatggcaaggccctgctgctgctgcgcagtgacatgatgatgaagtacatgggcctgaagctggggcctgcactcaagctctcctaccacattgaccggctgaagcagggcaagttctgaaccaggagaggcagcctagacaaccaagtggcaacaggtgggggcattcttctaggaatgaggggcatcagcccaccccaggcacctcagtggggttccgggccacctcaggactccaagaggctgtgtggagccaccactcctagccacagctgccatgataagtccttccatgaaggactgaggagggagagtgggggtccagggctggtgctgctcttccctcagctctgccggggctctaaggtccctctatttatttctcaaccctggctggcctctcaccaggagtttaggctgaatgccttccacgtgatggaggaaaaggccaactctgtcctggtcttgctgtggcaccccatcgccccacagctcgtaccttctcaccagattcccctgaatccaaactcgtggtgcaaacctctaccttttttacaaaaagatcttattgttaatttattgtttctggcacttgggcaaaccctgtagttaatactcctcccacactagacactgggtttcaggaggagggagactgccctgctttggtcccagagaggccctctgcagataggcgtggcccctcttcagaggacactaccctagggcactttctctttgaggtggagagacccataaagccttgaccacatcactccatatggggaggagaaggatccctgtcaccttctcctttcttcacggggcccttttgcagccctaggcctcatctgtgggaagggagtccctggcttatactgcccccaccacagctccttgccctggccagaactgctgtcgaagaaaatcaggccggaaggccaagaaggcgctaagggggatgggagggcaggttttccaggctggagtcggttccacccactcgcctgtccacaggcttctttgtaagcaagtcagcagcacagctactcacgctgccatctggacttattttatgtcaatctgtttataaataaaaaccaatatag

SEQ ID NO: 15083 - protein, 648 aa, Homo sapiens [sequence omitted]

SEQ ID NO: 15084 - DNA, 2761 bp, Homo sapiens
  CDS (73)..(1578)
acggaaggggcgtgccggaccgaagtgcgcagactcggaggcatacttcctttggtgaccattcttcagtgcatgaagacagacagcatccagaaccgaacggcccgtgccctggggaacttagccatggaacctgagagctgtggggacatccactgtgctggtgctgttcccctgcttgtggagagcctgacagcctgccaggactcgcagtgcctacagagcgtggtgcgtgccctccgtaacctggcagactcaccccagcaccgcctggccttggcacagcagggagcagtgcgtccgctggccgagctcctggccactgccccagatgctgcactgaccttagccctcgtccgtgccctcctggaactcagccgaggctgctcccgggcctgtgctgagcagctaagtctgggtgggggattgggcccactcgtcagcctggcttcccaccccaagcgggcagtacgcgagggaaccattctgatcctcgccaacctgtgtgcccagggcctgattcggcctgcactgggcaatgctggtggcgtggaggtgctggtagatgagctccggcagcgccgggatcctaatggagctagcccaacctcccagcagcccctggtgcgggctgtgtgcctcctatgtcgtgaggccatcaaccgggcccgactgcgggatgctggtggcttggatctactgatgggcctgctgcgggaccctcgtgcaagcgcatggcaccctcgtattgtggctgcccttgtggggtttctgtatgacactggggccctgggccggctgcaggctctgggacttgtgcctctcctggctgggcagctgtgtggtgaggctggtgaggaggaagaagagggaagagaagctgcttcctgggactttcctgaggagaggacccctgagcgggcacagggtggaagcttccggagcctcaggtcgtggctgatctccgagggctatgccacaggccctgatgacatctcccccgactggtctcctgagcagtgtccgccggagcccatggagccggccagccccgccccgaccccgacctcgctgcgggcaccacgcacccaacgcactccgggccgcagccccgccgccgccatcgaggagccttggggacgcgaagggccagccctgctgctgctgtcgcgcttttcccaggcccctgacccaagtggggcacttgtgaccggcccggcgctgtacggcctgctgacctatgtgaccggcgcaccgggcccgcccagcccacgtgcactgcgcattctgtcacgcctcacctgcaaccctgcctgcctcgaggccttcgtgcgcagctatggcgcggcgctgctgcgggcctggctggtgctgggggtggcgcctgacgattggccggcaccacgtgcccggcccactctccacagccggcaccgagagctgggggagaggctactgcagaacctgacggttcaggctgagtcgccctttggggttggggccctgacgcacctgctgctctctgggagccctgaggaccgagtggcctgcgcgctgaccctgcccttcatctgccggtgagtgggaagtgggtgccttgcggggttgggggaggagtgctgtgtttcccaggcccgttgcccaccttttgaaaggccctctcttccctgtaggaagccctctctgtggcgccggctgcttctggagcagggtggtctccggctcctccttgcggcgctgacccggccggccccacacccgctcttcctcttctttgccgcggactccctttcctgcctccaagacctggtgtctcccactgtgagcccagctgtcccacaggcagtccccatggacctagactcaccttccccttgcctctatgaacctctgctgggcccagcccctgtcccagctcccgacctgcacttcctgctggactcaggcctccagctccctgcccagcgagcggcctcagccaccgcctcccctttcttccgggccctgctgtcaggcagctttgcagaagcccagatggacctggtgcccctgcgaggtctgtcgcctggtgcagcctggcctgtcctgcatcatttgcatggttgtcgggggtgtggggctgccctggggcccgtgcccccaccaggccagcccctgctgggttcagaggccgaggaggcactggaggctgctggccgtttcctactgcctgggctggaggaggagctggaagaggccgtgggccgcatccacctgggaccccagggtggcccggagtcagtgggtgaggtgttccgcctgggccggccccggctggctgcccactgtgcccgctggacactggggtcagagcagtgcccgaggaagcggggtctggccctggtggggcttgtggaggcagcaggtgaagaggcagggcccctgacggaggctttgctggctgtggtgatggggattgagttgggggcaagggtccctgcctagactgttgacgtcccctgggaaggggacccaaggatgaattggctgtgaaggatcctccctgagactggcaagggaggaggctgagcagaaggagtcatcatggaggagcggtgagaacatggaaccggactccaagatgacgatctaaagacccgggagcgagaagccaaggccaggttctgggtgtagggcccggagaagcagaacagcccagagccccaggtgcctggcctggcctagacctctggaattgagattaaacaatttggagttggat

SEQ ID NO: 15085 - protein, 502 aa, Homo sapiens
MKTDSIQNRTARALGNLAMEPESCGDIHCAGAVPLLVESLTACQDSQCLQSVVRALRNLADSPQHRLALAQQGAVRPLAELLATAPDAALTLALVRALLELSRGCSRACAEQLSLGGGLGPLVSLASHPKRAVREGTILILANLCAQGLIRPALGNAGGVEVLVDELRQRRDPNGASPTSQQPLVRAVCLLCREAINRARLRDAGGLDLLMGLLRDPRASAWHPRIVAALVGFLYDTGALGRLQALGLVPLLAGQLCGEAGEEEEEGREAASWDFPEERTPERAQGGSFRSLRSWLISEGYATGPDDISPDWSPEQCPPEPMEPASPAPTPTSLRAPRTQRTPGRSPAAAIEEPWGREGPALLLLSRFSQAPDPSGALVTGPALYGLLTYVTGAPGPPSPRALRILSRLTCNPACLEAFVRSYGAALLRAWLVLGVAPDDWPAPRARPTLHSRHRELGERLLQNLTVQAESPFGVGALTHLLLSGSPEDRVACALTLPFICR

SEQ ID NO: 15086 - DNA, 2582 bp, Homo sapiens
  CDS (60)..(1748)
gctcgccgcccgcccgcccgacggagacgcagtcccagctatctgacttcatgtgaaagatggctaatgcagaagtgagtgtcccagtgggggatgtggttgtggtacctactgaaggaaatgaaggggagaatcctgaagacactaaaacccaagtgattttgcagttacagcctgtgcaacaagggatttatgaagctgggtcggagaacaacacggcagttgtagcagtagaaactcacacgatacacaaaattgaagaagggattgatacaggcactatagaagcaaatgaggatatggaaattgcttaccccataacttgtggggagagcaaagccatcctcctctggaagaagtttgtatgtccaggaataaacgtgaagtgtgtcaagttcaatgatcagttgatcagccccaagcactttgttcatctggctggcaagtccactctgaaggactggaagagagctattcgtctgggtgggatcatgctcaggaaaatgatggactccggacagattgatttttaccaacatgacaaagtttgctccaatacctgcagaagcaccaaatttgatcttctgatcagcagtgcaagagctccagtgccaggacagcagacaagtgtggtgcagacacccacttcggctgatggtagcatcacgcagattgccatctcagaagagagcatggaagaggcagggctggaatggaactcagctctcaccgctgctgtcaccatggccacggaggagggtgtaaagaaagactcagaggaaatttcagaggacactttgatgttctggaaaggaatagctgatgtagggctgatggaagaggttgtctgcaatatacagaaggaaatagaggagctactcaggggagttcagcagcggctcatccaggctcccttccaagtcacagatgctgctgttctcaacaatgtagcacacacatttggcctaatggacacagtcaagaaggttttagacaacagaaggaaccaagtagagcagggagaagaacagtttctctatactctgacagacttggaacgccagttgggggagcagaagaagcaaggccaggatcacaggctgaaatctcagacagttcaaaatgtggtactgatgcctgtgagcactcctaagcctccaaaaaggccccggctccagcggccagcctccaccactgtcttgagcccttctcctcctgtccagcagcctcagttcacagtcatctcacccatcaccatcaccccagtgggtcagtcattttccatgggcaatattccagtggccaccctcagccagggctccagtcctgtgactgtccacacactgccttctggccctcagctcttccgctatgccacagtggtctcctctgccaagagcagctcaccagacacagtgaccatccacccttcatctagcttggcgctgctgagctctactgccatgcaggatgggagtacactgggcaacatgaccaccatggttagccctgtggaattggtggccatggagtccggcctaacctcggcaattcaggctgttgaaagcacctcagaggatgggcagaccatcattgagattgatccagccccggacccagaagctgaagatactgagggcaaagcagtcatcttggagacagagctgaggactgaggagaaagttgtggctgagatggaagaacaccagcatcaagttcacaatgtggagattgtggtcttagaggattaactggggatctcagggccaggagttatgttttgatttggaattttaattatttgtttatttttatcattgtcccactcatttccacataggacccttttttaaaaaaaaaaaaaacaaaatcttattgttgtaactgaaaatgttgggttcttcccactccctcattgaaaaatggacaaaacaagctgcccttccagaagttgagagtaggtcattcaatgtcctaatcatcttacaccaagaaagtaatttcttttaggggaagtgtcaagataacaagtaaccctgtccagaaagccatttccaggctcgtctgtgtgtgtaggcatgtggttttattcttgtaaagatgcattgaccaaactctggaacacagatctgacactggaaggcaacccactcgcatgtggatgctgaagggcactttattttgtatcctgaaaagggcctacagaggccagtacaaaactctcaaacaaaaggaagttgactctgctttgaggggaaggtggcatgccagcactagcttaaaaagggaagtgctagccgggcgtggtggctcacgcctgcaatcccagcactttgggaggccgaggcgggtggatcacgaggtcaggagtttgagaccagcctggccaacatggtgaaaccccgtatctactaaaaatacgaaaaaaaaattagccgggtgtggtggcgggagcctgtaatcccagctattcaggaggccaaggcaggagaatcgcttgaacctgggaaggcagaggttgcagtgagccaagatcgcaccactgcactccagcctgggcaacaagagcgagactccatctc

SEQ ID NO: 15087 - protein, 563 aa, Homo sapiens
MANAEVSVPVGDVVVVPTEGNEGENPEDTKTQVILQLQPVQQGIYEAGSENNTAVVAVETHTIHKIEEGIDTGTIEANEDMEIAYPITCGESKAILLWKKFVCPGINVKCVKFNDQLISPKHFVHLAGKSTLKDWKRAIRLGGIMLRKMMDSGQIDFYQHDKVCSNTCRSTKFDLLISSARAPVPGQQTSVVQTPTSADGSITQIAISEESMEEAGLEWNSALTAAVTMATEEGVKKDSEEISEDTLMFWKGIADVGLMEEVVCNIQKEIEELLRGVQQRLIQAPFQVTDAAVLNNVAHTFGLMDTVKKVLDNRRNQVEQGEEQFLYTLTDLERQLGEQKKQGQDHRLKSQTVQNVVLMPVSTPKPPKRPRLQRPASTTVLSPSPPVQQPQFTVISPITITPVGQSFSMGNIPVATLSQGSSPVTVHTLPSGPQLFRYATVVSSAKSSSPDTVTIHPSSSLALLSSTAMQDGSTLGNMTTMVSPVELVAMESGLTSAIQAVESTSEDGQTIIEIDPAPDPEAEDTEGKAVILETELRTEEKVVAEMEEHQHQVHNVEIVVLED

SEQ ID NO: 15088 - DNA, 2108 bp, Homo sapiens
  CDS (164)..(1477)
attatacagatacagacctgaagaagtagatattgatgccaagttaagccgattatgtgaacaagataaagtggtgcatgctctggaagagaaacttcagcaactccacaaggagaaatacacgcttgagcaagctttgctatcagccagccaagagatagaaatgcatgcagataacccagcagccattcagacagtggtgttacaaagggatgatttacaaaatggactgcttagtacgtgtcgagaactttctcgagccactgccgaattggaacgagcatggagagaatatgataagttagaatacgatgtaactgttaccaggaaccagacgcaagagcagctggatcaccttggtgaagttcagacggaatcagcaggaattcagcgtgcacagattcagaaagaactttggcgaattcaggatgtcatggaagggctgagcaaacataagcagcaaagaggtactacagaaataggtatgataggatcaaagcctttctcaacagttaagtacaaaaatgagggtccagattatagactctacaagagtgaaccagagttaacaacagtggcagaagttgatgaatctaatggagaagaaaaatcagaacctgtttcagagatagaaacttcagttgttaaaggttcccactttcctgttggagtagtccctccaagagcaaaatcaccaacacccgaatcttcgacaatagcttcctatgtaaccttgaggaaaactaagaagatgatggatctaagaacggaaagaccaagaagtgcagtggaacagctctgtttggctgaaagtactcgaccaaggatgactgtggaagagcaaatggaaagaataagaagacatcaacaagcgtgcctgagggagaagaaaaaagggttaaatgttatcggtgcttcagaccagtcacccttacaaagcccttcaaatttaagggataatccatttaggactactcagactcgaaggagggatgataaggaactggacactgccattagagaaaatgatgtaaagccagaccatgaaactcctgcaacagaaattgttcaactaaaagaaaccgaaccccaaaatgtggacttcagcaaagagttaaaaaaaactgaaaacatttcatatgaaatgctttttgaacctgagccaaatggagtaaattctgtggaaatgatggataaagaaagaaacaaagacaaaatgcctgaggatgttacattcagccctcaagatgaaacacagaccgcaaatcataaaccagaagagcatcctgaagaaaatacaaagaacagtgttgacgaacaggaagaaactgttatttcttacgaatcaactcctgaggtttctagaggaaatcaaacaatggcagtgaaaagtctgtccccatctcctgagtcctcggcatcgccagttccatccactcagccgcagctcacagaaggatcacatttcatgtgtgtgtagtcttagaagaactatactgacttctgttgaaaccattcaaagctaaagacatggaccttcagcagtgtaagaagatattgtacagtatattttaaatctatgaaattcatagttctgatgcttttggtcacagagcatcattttatcacttctggaaaatgtttattccaaaacagctttaatggcccatatgtacacttcgtaatctcaaggttattattctgacaccagcttgctgctatgatttcagagcacataagtaaaggtgctttttaatgtgcagtctatttccagagcttacttagttgctgatttccagatttcgatgtttcttaagtctaggtgaatttatatatatatttttttgcttttcattttctaaagttagttattatttccattgaagcttgttttctttttttcttcccattttagctactgcagtgcttttgtttcacacttgatttgtaaaaattttatatatatgtatttaaaatgtgccattttattgctaagtgaagtatgtcctgttttctgctataattctttctcggtcagattgcaatgtcagcagttactgccacactcctgtcagcttaaacacaaatgttactgcttatcttttctt

SEQ ID NO: 15089 - protein, 438 aa, Homo sapiens [sequence omitted]

SEQ ID NO: 15090 - DNA, 1989 bp, Homo sapiens
aaaaaatgtttgttgctggctgaatggcaatagatgtctaaggtggattcagtgtctggcacactgagacacctccaagaaggagattgatgcatcaggttcagtttaacctggaatatctgactacccctgaatccacccagaaagggggcccaacacccttgtccatttatgggtattttttttcgaagttattaagcatattccttttccacgaacctcttctgtactttgattgtaataggttggctcttacacccattccaaatgcagtttatttttagacccgattgcaaatagtgatgtagttttaaccagtatggattagttcagggatgaactgctccctccagccttactggctctgatccacagggttttgttttgttttgttttgttttttgtttaagtcgagatataaaaactgaacacgataacacttactcttaaatcaagcatcaacactttttccctgttagaattctttgcatttttgtgtttgtaacagaaacgccttaagacactatgtttgggaatataggaaactatgtgtgtcccaaggaaatccctgtaaatttaactcacctacaaaaggctttttccccgcctttggttgttaacggcattcctgaaagccacatgtgtttattcattgggcttgttcttatcagcaaataggttttctggttttatgactttttgtcttattttatttttcctacatttctttttttttttttttcctttagaatgccctggaaatatatttaagtggtaatgaaaaatagtaatcatagtaaaacgcaacaagaagaaaaccaacccaaaccagtgaagttttttagaacctttagaagggtggtctttattcaggttttactgtaatggtaaggattgactcaagagacagtattagtaaatttattgtgtatggatcaaaagtgaataatgtatgaatgagagctgtaagaaggatttttattttgttataatttagttaccattttcagtgttatttcaaaggttctttgaagaattttggggcagggcatcagattagagttttaaaatttgagtattttggatatcagtgttcctcatgaagatatacatggatattcaattttgatggcttccagatttgtaagattgtatgttgtatataccattctattaagaaacatgtccactgtgctttcaaacatagataaagcatgataaagattattatttaagatatacttgtatttatacctcagatattcttttgggttttgtacctcaaggcttttttcttcttattgtaaatacactttacgtgaatacagtctaagtgaagaaaataaataaaaggaagaggtttataacttgctctatatctgtacagattataatcaataagtgcactattattaaatgtttaaagtaagggaaaagtctgggctgccttccttaatattgcatctcactcccacccttaaaaccacagattgcaaagcatagcattttagcatcaactacaatcaaaagagcgatttgctgaaggaaaaatcggactgcaaatcattccaaggccaaactgcaactgagccacccactcccaaacaggaaaccctggtgaaggttcaggaagcacggagattctctccaacaaaggtccagttaggaaacgacgctgagaggatgacgacaacgtgcaacagcagaaagatgcttgcaagcagagtcagggtcaccagtgaatgccacaaaagttctctttcccactgtttaatttgacaagagaagaatttgaaggatatgaacattttcaagaactctgctgaggtcacttagagcgccatcacaacttatttgtgtgactaattgcctagattgtaagctctttgagggcagggcttgtctcttacacatctttataatcccctgcagcggctttcagtattttgtacttgtaggcacctaataaatttattatttgctatactg

SEQ ID NO: 15091 - DNA, 2312 bp, Homo sapiens
  CDS (575)..(1018)
ctctttaaggtgcccgaggctcgcgggcgctgcgctgaggggacggcgggaggcgcggcctggcctcgcactcaaagccgccgcagcgcgccccgggctcggccgacccggcggggatctaggggtgggcgacttcgcgggaccgtggcgcatgtttcctgggagttactgatcatcttctttgaagaaacatgaagttacactatgttgctgtgcttactctagccatcctgatgttcctgacatggcttccagaatcactgagctgtaacaaagcactctgtgctagtgatgtgagcaaatgcctcattcaggagctctgccagtgccggccgggagaaggcaattgctcctgctgtaaggagtgcatgctgtgtcttggggccctttgggacgagtgctgtgactgtgttgattgaccctcctttcatttctgtcatgccacttgacaatgaaggaactgtatcagttgacctatagaatagcccacattccggatttgactgcttcctgtggaagtcctaccatactgactgttctgtcataaacaattttcataggattatgttaaggtatgtgtaatcctcgaaattatagtgacacacctccaacttcaaagagcacagtggaggagctgcatgaaccgatcccttctctcttccgggcactcacagaaggagatactcagttgaattggaacatcgtttctttccctgttgcagaagaactttcacatcatgagaatctggtttcatttttagaaactgtgaaccagccacaccaccagaatgtgtctgtccccagcaataatgttcacgcgccttattccagtgacaaagaacacatgtgtactgtggtttattttgatgactgcatgtccatacatcagtgtaaaatatcctgtgagtccatgggagcatccaaatatcgctggtttcataatgcctgctgcgagtgcattggtccagaatgtattgactatggtagtaaaactgtcaaatgtatgaactgcatgttttaaagaagacaaatgcaaaccaaagcaacttagtaaaataataggtataaaaagttattctgtaagtctgttggttgtatcttgtatcagaatcccagtaagttaagttgtaaagactttggaataagtttcttttaaaaatatgacatagccagtgatgtgtttaattatataactgttcttactgattttattgccccctagcaataagccctttcctttgaatacatgtacaactttggtcatatgagaagcaggtgcgcagagaattccttgaaagatctgaggtttttaacataaagtctgatgtggttttcctctagcattccaaaaggtttttgctttgaaagtgttagcagaagcatgttgatgtgaattatgatttcttcatgtgctactgttagcacactgagtttttatagttgcacatcattcctcattgtgccttgttttatccattttataaatagagtaggtatttgatataccactctgataactcatataaaaatatcatcataaaaagcttaatttcatcccttttatgttggttttaaaaggtaaatgcttaccatattttataattgagaactcttacatagtagaatccattctataatacatgtgttgacaaagctttagagaaagtttcctattctcttccatttcccctgcccaaagtgctgacataggcagtgatgaagaatctttaccaagattttcagggtgtacctatgaaattgctttaaatgcactgctggtgtaaataattagcaagcaaaagcgtttctgtgacttcaggtaccagcttaaagagcactagggatggggaacgaatgccaaatcagactccacctagagcaccaggaaacagcttgtaccctggtagggaaatggtgtcgctgaaaggggaggctgagccagtgcgagactgaacttgtgcagccttagccaagacaaagcagtgtttttcagcagacggctgatgggacaggaattgaagaagagaattgactcgtatgaacaggacagggtgaaaatgctgggaattataatgggaaacaaaactatctatgttcatattttgtaatatttcatttgttaagtttatatctggatataatgttctttttaaacaagtataatcatatcgtcggaggttaagattatgaaattttaaaatctctattcaagatgatgttcactccaaatacactacagaatttagtcaacattttatataatgtttcaataaatgtttctttcaataaagatactatgtgcccttcatagt

SEQ ID NO: 15092 - protein, 148 aa, Homo sapiens
MCNPRNYSDTPPTSKSTVEELHEPIPSLFRALTEGDTQLNWNIVSFPVAEELSHHENLVSFLETVNQPHHQNVSVPSNNVHAPYSSDKEHMCTVVYFDDCMSIHQCKISCESMGASKYRWFHNACCECIGPECIDYGSKTVKCMNCMF

SEQ ID NO: 15093 - DNA, 2308 bp, Homo sapiens
  CDS (13)..(615)
agcaggtttcgaatgctctttacttcctttgtggagcaaaagaaaaaagcaggagtatttgaacaaatcactaagactcatggaacaattattggcattacttcagggattgtcttggtccttctcattatttctattttagtacaagtgaaacagcctcgaaaaaaggtcatggcttgcaaaaccgcttttaataaaaccgggttccaagaagtgtttgatcctcctcattatgaactgttttcactaagggacaaagagatttctgcagacctggcagacttgtcggaagaattggacaactaccagaggatgcggcgctcctccaccgcctcccgctgcatccacgaccaccactgtgggtcgcaggcctccagcgtcaaacaaagcaggaccaacctcagttccatggagcttcctctccgaaatgactttgcacaaccacagccaatgaaaacatttaatagcaccttcaagaaaagtagttacactttcaaacagggacatgagtgccctgagcaggccctggaagaccgagtaatggaggagattccctgtgaaatttatgtcagggggcgagaagattctgcacaagcatccatatccattgacttctaatcttctgctaatggtgatgtgaattcttagggtgtgtacgtacgcagcctccagggcaccatactgtttccagcagccaacccttttctcccatcacaactacgaagaccttgatttaccgttaacctattgtatggtgatgtttttattctctcaggcagtctatatatgttaaaccaatcaaggaacttactctattcagtggaaacaataatcatctctattgcttggtgtcatttataggaagcactgccagttaaagagcattagaagaggtggttggatggagccaggctcaggctgcctcttcgttttagcaacaagaagactgctcttgactgataacagctctgtcaatattttgatgccacaataaacttgatttttctttacattccttttatttttcctttctctaaatttaatttgttttataagcctatcgttttaccatttcattttcttacataagtacaagtggttaatgtaccacatacttcagtataggcatttgttcttgagtgtgtcaaaatacagctagttactgtgccaattaagacccagttgtatttcacccatctgtttcttcttggctaatctctgtacttctgccttttaattactgggcccttattccttattttctgtgagaaataatagatgatatgatttattacctttcaattatatttttctcagttatactagaaaatttcataatcctgggatatatgtaccattgtcagctatgactaaaaatttgaaaaagataaaaatttctagcaagcctttgaagtttaccaagtatagtcacattcagtgacagcccattcattccagtaaagaatcatttcattcactttgggagaggcctataattacatttatttgcaatgtttctcttcgctagattgttacatagctcccattctgttggttttgcttacagcatatggtaaccaaggttagatgccagttaaaattccttagaaattggatgagccttgagattgcttcttaactgggacatgacatttttctagctcttatcaagaataacaacttccacttttttttaaactgcacttttgactttttttatggtataaaaacaataatttataaacataaaagctcattgtgttttttagacttttgatattatttgatactgtacaaactttattaaatcaagatgaaagacctacaggacagattcctttcagtgttcacatcagtggctttgtatgcaaatatgctgtgttggacctggacgctataacttattgtaaagaccttggaaatgtggacataagctctttctttccttttgttactgtatttagtttgtgataaatttttcactgtgtgatatttatgctctaaatcactacacaaatcccatattaaaatatacattgtacctgaccctttaatcatgttatttatgccaccaaggttgtggatcttaaggtatgtatggaaaggaactcatttatcaaattgtaagtaatacagacatgccatttaaaagaggtaaattcttgttttctatattttgttagtaaattctcaatgaaataagttgaagtttcactggatttcattaacttttaaatattacatatatgtgttttctcagattagtgaaaattgtgaccttaaatttaatacacatatactgcctcag

SEQ ID NO: 15094 - protein, 201 aa, Homo sapiens
MLFTSFVEQKKKAGVFEQITKTHGTIIGITSGIVLVLLIISILVQVKQPRKKVMACKTAFNKTGFQEVFDPPHYELFSLRDKEISADLADLSEELDNYQRMRRSSTASRCIHDHHCGSQASSVKQSRTNLSSMELPLRNDFAQPQPMKTFNSTFKKSSYTFKQGHECPEQALEDRVMEEIPCEIYVRGREDSAQASISIDF

SEQ ID NO: 15095 - DNA, 3584 bp, Homo sapiens
aggagttcgagaccagcctgaccaacatggtgaaaccccgtctctactaaaaatacaaaaattagctgggcgtggtggcgcatgcctgtaatcccagctactcaggagactgaggcaggagaattgcttaaacctgggaagcagaggttgcagtgagactagatcatgccactgcactccactgccactgcctgggcaacagagcaagactccatctcaaaaacaaacaaaaaaaatcacagactcattttaaaggagcagcaacctaaccaaatacaaacttcatttgattttaggtttagaaattctagttttattttggagaatcactcagtttttaatatcaattaaaatagtcctcaaaggaatgaagaggaagtctaaataaatgaataaaactcatttttcattttatggtagtatagaaagcattgatgtgtgtagagaaattaaaagacaagagtggtttactgtctatgcacaaatgagtgcctatatttaaggctgcctataccattacagtggcgtaattggtgatttcatagcatacagagaaacaatgaaatcaaagattaaatcattaggttatgatggtcatttgtaagattggaaagtagtcaaaaacccatgtgcaactttttttcagcactctaccattaggctccttaggcaagctgcttaacttccgtcagaagcaaaggtgtgggagaacaccattcacctcagtagtaacttataaaaaccgtttaaagaaggaaaatgggccccagcccctaggatccctgacttcctgatattctaaacatgagagttctgtgactttaactgagctctttaccagaagtaacgtgttgatgtatattatctttccaccatgctttgaccaaagtacattcacagtaactagagaaagcagatcatccatttctggataggtgaactacggcaaggtaagaacagaaaaaagtaaagtagtattgagtcatgcaggtatcagattaacagacattcattgaagataagtgaaataactttggagatagcagagaagagcaagaagatgttggacgttggcagtaagccgcagcaaggcagttaggaaagtacgtgagcctgatgacgcgaaggtgatgcctccatctgtccgcttagtggttattaaattgctgggaaagacctgcctttattttcctatcatcttttccccattactttgcattattcaggaaataattatttattcccaaatgcagttttctaagcagtgaccacaaaaatttcttattctaaggaaaataattaagaaaataaccctatctgtggcattgttttaaaatgtgggatacaaatctggtaagcagatttcaggtcattattgttttcttttaatggtttacatgaaattttcctctcaaaaaacaagtacctcttactgtataacatttgagtttttaaaattgagatagcaggccgggcgcggtggctcacgcctgtaatcccagcactttgggaggccgaggcgggcggatcacgaggtcaggagatcgagaccatcccggctaaaacggtgaaaccccgtctctactaaaaatacaaaaaattagccgggcgtagtggcgggcgcctgtagtcccagctacttgggaggctgaggcaggagaatggcgtgaacccgggaggcagagcttgcagtgagccgagatcccgccactgcactccagcctgggcgacagagcgagactccgtctcaaaaaaaaataaaataaaataaaataaaattgagatagcttctgagagaaaaaaagaaagttgaatttgtagctctctcaactacaaaatcaccacacttttctcaaatctaataggaattcagtgtcattacagatacggtctctagtgaccaggtgaagacaattgaagctttggtagaacttctgcaaaagttaggtaaagaagaataaatccaatttatcagctttgttcatattctttttctgagtgatctaaatttttcttgcttgtgatcattagctaagacaaggagtgttaaaggttttctaaatgcaaacacatacgtttctgcatttcagaagtcagtcttgatagtaaatcctacaaactctcaactttctgcattgtattttaagtctatacaatgttagagcacatggtaatgtgggacagagttgattatatgatagcatgagaaatttgcactggttggtgttacaaaccaatgatctaaccagcatactctccaaatatgaaaaagtaaaaacatctcattaggtttggaagagcctaaggtagtccatacaggaagtttgcctgagaacagagaggagcctgttgattggcatggctcatgatgcctttcttgtatgaattatcaaaactgatactgagttgcccctagaaaacagccttccagaatatgtttgcttatttatggtggaagaggaagtgagaacaagatgagagtttcccttaaagtgaggagaatcattatacaactttgcaactgaagtatgtttccttgtagcaaacctttggtttattttatcgtcaaatcaaagccaccctcagttttttgtatggtgccatcaacctaaggaggacaatcaaataacctattgtttgccttggattcagtatatctactaagtacacagtctcgtataccttcaaaccagtcacttgactaaacttccaccatattaccttagttcttcctatgccctttcctctgtgccaccacaaatcagagggaaagactgcagtacttctagaaagttgtggacttctaagaaagagccaggcttccatctcactatcccttgatcattatctctgaagtccctacctgcacttccctgattgccctgtagcaacaccagcatggtgggaattggagggaaagattgtggaaaatccctaaagggtcattgttcatgacgttactttgaattgtaaaattgtgagccactcacatttcaattacaaaaagaacagaactcttaatcacgttgtgaagattaatttcttgccattttctggattagcacagaagcttgtatcaatgaagagtatttaggaggggaatagggggaaaattgtatttttctgttcaaactctctccttctatttgtgtttccttcacccctctccctccaccacactgtgttggtcaaatgatactattctatgaaaccctgagctatagttgtcaaaagtaactatggattgtgattagtcctctgtgggtgcttccttccctcttttttctccctcactctctttctcagtctccactctggtaaatggaaaaggtgatgtcgaagaattgatgcttgcttggactcatgttgtatctgtgactatgctattagctgtctcctttttccttcctatatgggtagaattcttatgacttatgaagttcccttcttgataagtaggttaaatgcacaatgtggtactgttttatagtttctagatggttgtataaagcaaaaagttaatgtggttatgtgtttttaaagaaaataagtgattggtcactaaactctgtccttttttcatt

SEQ ID NO: 15096 - DNA, 2545 bp, Homo sapiens
  CDS (117)..(1844)
actgagcgctcggggccttttcaaatcgggatccgttaccgcttccccggcagccgccattgtcgcgctcggagcccctcagctcaggcggccgaggcggaggcagcggcggcgggatggcggacgccaacaaggccgaggtgcccggggccactggtggcgacagcccgcacctgcagcccgcagagccgccgggcgagccgcggcgagagccgcaccccgcggaggcggagaagcagcagccgcagcacagcagcagctccaatggcgttaaaatggagaatgatgaatcagcaaaagaagagaaatctgacttaaaggaaaaatctacaggaagtaagaaggccaatagatttcatccttattcaaaagacaagaattcgggcactggagaaaagaagggtccaaatcgtaacagagttttcattagcaacatcccatatgacatgaaatggcaagctattaaagatctaatgagagagaaagttggtgaggttacatacgtggagctctttaaggatgcggaaggaaaatcaaggggttgtggtgtggttgaattcaaagatgaagaatttgtaaagaaagccctagaaactatgaacaaatatgatcttagtggaagaccccttaatattaaagaggatcctgatggagaaaatgctcgtagggcatcgcagcgaacaggaggatcatttccaggaggacacgtccctgatatgggatcagggttgatgaatttaccaccttccatactcaataatccaaacattcctcctgaagtcatcagtaatttgcaggccggtagacttggttccacaatttttgttgccaatcttgacttcaaagttggttggaagaagctaaaggaagtgttcagcatagctggaactgtgaagcgggcagatattaaagaagacaaagatggcaagagcagaggaatgggcactgtcacttttgagcaagcaattgaagcagttcaagcaatttctatgttcaatgggcagtttttatttgatagacctatgcatgtgaaaatggatgacaagtctgttcctcatgaagagtaccgttcacatgatggtaaaacaccacaattaccacgtggtcttggaggcattgggatgggacttggtccgggtggacagcctattagtgccagccagttgaacataggtggagtaatgggaaatttaggtccaggtggtatgggaatggatggtccaggttttggaggaatgaatagaattggaggaggaatagggtttggtggtctggaagcaatgaatagcatgggaggatttggaggagttggccgaatgggagagctgtaccgtggtgcgatgactagtagcatggagcgagattttggacgtggtgatattggaataaatcgaggctttggagattcctttggtagacttggtggtggaatgggtggcatgaacagtgtgactggaggaatggggatgggactggaccggatgagttccagctttgatagaatgggaccaggtataggagctatactggaaaggagcatcgatatggatcgaggatttttatcgggtccaatgggaagcggaatgagagagagaataggctccaaaggcaaccagatatttgtcagaaatctaccttttgacttgacttggcagaaactaaaagagaaattcagtcagtgtggtcatgtaatgtttgcagaaataaaaatggagaatggaaagtcaaaaggctgtggaacagtcagatttgactccccagaatcagctgaaaaagcctgcagaataatgaatggcataaaaatcagtggcagagaaattgatgttcgcttggatcgtaatgcataatttcaagccatggttggaacattcctacatctgttttgctgaatctcctagtaaaagtcatttttttaaagtaatattgtatgcttacaaaagctgtaaaaatgaacttttaaaactcccaccagcttttaacagtataatgttaaaaatatactgtaatttttgttaatctcaagtttgggtttttaaagacagcaagtctggtcattcagtttaaatgaatggttatactgtttttaatgaaataagccattttcttgttgttttcagtactacatagttggatttgtttgttctagtttctccagtttttgtcaacttattgtatggtaaaacatagattttttccccccaaacttctgttttataatatgtaatttttcatgaaaagaaagggctcagaaaaattaggatgtgattttggttggttttaaattactgtaagttttagattctaaggttcaagatttttaaaatttgatttaaatgaagaaatggatttttctctctgcccctccctgccattcatattttctgcataacactattaataatatcaacctccacagccccttattttattatttccaataattccaagttcatatagaactgataatgtagcaagccccaagtatgataatagtcagactattcccaactttctgtctagtttccagccattgaagtgaactgct

SEQ ID NO: 15097 - protein, 576 aa, Homo sapiens [sequence omitted]

SEQ ID NO: 15098 - DNA, 3173 bp, Homo sapiens
aaaaattacgcgaagatgctaagataccagcttgtgaagaaagcctaagccagaccccgccgagggtgacagggaccagtcctgctcaagaccaggatcatccatccgaggaacagggggggcagggttcctgtagagagccaggtgttaacccctgcctctcccgtctaggacgcctccagcagaagatgctgcttgcctgcagagcccccagcctgaggacacgggtgcagaaggaggggctgagtccaagacgagctcagaaaaccagaagcctgaaactttatctggaaacactgaaggtgccttcattagcagaactgcacagccgcctctgaaaaggtacgtccactcggcatggaggagtcggcgtcccttacccagttaataagatcaatgaatgcgcaggtctttcttcttctagcttccacccacaaataaaatggttccaaaaagaagatgtcgtcatcttaaagataagaataaggaatgtaaaggactacaagtgtcagtatttaagggatagagtcgttttcagtgcttgggtgggagacaaattttacctggctgatctggagctgcggggcaacataaggaaagatgactgccaatgtgtgattagaaacgatgaacctgtaatcactctggccaaagagagaagggaggcatggtgtcacctactcagacagaggaaccccaacgtggcttttgattttgatcactgggaagactgtgaagaggacagccacttccccaaggtagtgaattctaaaaacctgccgtacacagtgacagaggtggttgaagacagtagcagcacttcagaggatgacggcagtgagagtgaaagagaaggtgaatgacgtcctcaagagcggctggaagatgttgaacaaaaatggatattgccatgtgaccgacagttaagaaaacagtcagtcataaccaaatctttttcttttcttttctttttttttttttttttttttttttgagacagagtcttgctctgtcggccaggctggagtgcagtggcatgatcttggctcactgcaacctctgcctcacaggctcaagcaattctcctgcctcagcctcccgagtagctgggattacaggcatgtgccaccatgcctgaccaatttttgtatttttagtagagacagggtttcaccatgttggacaggctggtctcgaactcctgacctcaggtaatcctcccacctcagcctcccaaagtgctgggattacaggtgtgagccaccacacccggccaaccaaatctttctttacctcaaggataaatgattactgtcaccttgtggtgctggacttgataacggtgagaaattcttcattgacttaaaaataggctgatgataagaccatcaaaggagggtggacacagagaaacagcaggtgtggtctgattccgccggcttgtctgtcctgtctggcgcctctcgccactcaccctggcagagcagacatgcatctgggtgatgaaatgcactgtctggagtcagtccattcattttttttcacctagacctttgctacattgctacaaacctgatcttacacatataaattgaggtttctaatgtacacacttagactcagcaactgttgaaccagccctttcaaccatgagatagtgggatttaacataaccatctatgtgaattgatagtgttagcattcttggatagtgatagctcctcagagtaagttgacttctgatgaagagatagtccagggatagaaattggattgctcagtaagacccaggcctttccggggtgaagctgctggttctaaacaatcccttggacctgcagagtcctgagcaaatggcacaaaggttgctttttagtggaaattcacaagggcctgtggggtgcctggaggtgatctttgaatgcctacatgtcgtgagccctgcagacattcgccaccccatctgcattgtggctgcagcactggggggggtcaccaggtttaggggaggagtgtatgtagtcatggccacacccagaggctggcttttgtgctttgggtttctttgttgactgaaaaagcgagaaaggtgagctattgggaaattaaaagtcctgtgcactctgtgtcttgtttatcagctttgcctcggaatggaaaagaatttggatagaacatgagtgttgtgtgacggccccaagatctttattatttttttgtatcagaaagcgccaatgcccaggcttatgtatgtcccagcagaagccaccgcttgaactagaggtgaactttgtcatcaagctgtcctgtgagcaggtctggatcacactctggctcagttttctcatctgtaaaatgagacatcccctcattgtgtggcctggccttgtctcagggagcgcccgccgagtgctgctgggttgggcagtttttctgcccagtggctctgatgggggctcagagccctggcctcccctgggaggacacgctgtgcagccaggacagctgccgggagtgtgcccaggtcactgctatggccttcgcagggtgactggcaggtatcaaatcagcccatgaaggaagatggtgattttccttttttgtagctaaattgggcaggctcttgggaagtagaaagttctggtgtttttgctggtgaaggttttgactgtggagctcttctaacacccatatcagtgtctgtttctctgcatgtggctgctgccctgttggtggagctctgggggcagagaccaggccgccgtccagtggcgccccgtgcgcaccagctgcctgctgtttacacccaggtgcgccgagtctctttcatacagcacagcaaatgataatagctagtgacaatgtgtttcctgtgcactcgtgaaaatgcagggaggacaactgcatgcttagatctgtttcttttttcagacattcaaatgttctaatatctgaagctaacattttgtaggatataggatgctgattatgtgaacaattagtcattggttttctgtactgctatgaatatgtctgatttcaagttttggtcaaatatctaaaatgcaaggtgaaagtgcctttgtctctatgcttctaaaatcgctcatgcttagttgtggtatggatgtcttccgcagtgtatcatcaataaaatttcactgttttcacag

SEQ ID NO: 15099 - DNA, 2740 bp, Homo sapiens
  CDS (6)..(893)
aactgatgcaattgacaaacgtgtccagggctaaagcagaagatgcactgtctgaaatgaagtctcagtattcaaaagtgttgaatgagttgacccagctcaaacaactggtggatgcacaaaaagagaactctgtctctatcacagaacatttgcaagtgataaccacgctgcggactgcagcaaaagagatggaagaaaaaataagcaatcttaaggaacaccttgcaagcaaggaagtggaagtagcaaagctggagaaacaactcttagaagagaaagctgctatgactgatgcaatggtacctcggtcttcctatgaaaaactccagtcatccttagagagtgaagtgagtgtgttggcatcgaaattaaaggaatctgtgaaagagaaagagaaggtccattcagaggttgtccagattagaagtgaggtctcacaggtgaaaagagaaaaggaaaatattcagactctcttgaaatccaaagagcaagaagtaaatgaacttctgcaaaaattccagcaagctcaggaagaacttgcagaaatgaaaagatacgctgagagctcttcaaaactggaggaagataaagataaaaagataaatgagatgtcgaaggaagtcaccaaattgaaggaggccttgaacagcctctcccagctctcctactcaacaagctcatccaaaaggcagagtcagcagctggaggcgctgcagcagcaagtcaaacagctccagaaccagctggcggaatgcaagaaacaacaccaggaggtcatatcagtttacagaatgcatcttctgtatgctgtgcagggccagatggatgaagatgtccagaaagtactgaagcaaatccttaccatgtgtaaaaaccagtctcaaaagaagtaaagtggattccttggcaggacactgccccttgtcatctgtctttgtgttagatccagagttgtcggcagcctgccattgttctcattcgtggtatgcactgtggcctagcgtagcttcttccctttccaaaggtttctgaggacttctcccaggagaagactgcccgcctcagaactgcttagagacttcaaaccagcagaggtgaaagtccctgtcatcccttcagattccagagctgggatcagccatgcccagaggtctggtcctgatgctggcaggggggccccctcctccatccctgactggctgagtggctttatcaccaccgagtgatgtgctgaggcctcctgcagtgaatgctccttccattcctgtactcgggcagtgccattcagcacaggagagctctttttgcctttggctttcaattccaaaacatgatttaatttctaactaaattagtatggcactagttatgaagtatctgcttaaaacccttcatcatgatatcctgtggatttaaaaactctaattccatgttttcttcccatctgccttatatatctcatcaccctgcttatcaatattcagtttgatgagcactattaactaaaatatgaaacttaaaaacaaaagcaagttgtccttaaaagttctttttttaagtaaattgttgacatactgcaaattttctatgcaaacttgcctcctgctgttatctgtgaagctcaggaaatccaaacatttgtgtttcaacaagggacagtaaactgtgtgtttacagccaaaagaaatgcctcatagttcttaacctcaacttttgtagaaatatttttttctctgtaatatttttattggctcataaagatgttttcatatctgaactcctaaataagtgaaattacagtagattatattaacaaaatactttttaggtagccatgcttgagactttttaaaaatataactttttccttaaagttttcagctatagcaaaaggtagttatgtatgccagacctaatatgagctgccaccaacacccctagaactttcagccatggtgtcttcagaattgtagcgcatttctgaatctagcaaatcctccttttacccgttgaatgttttgaatgccctgactctaccagcgcccataaatgatctctagaaggactgttagtaccaatctgtttttcaactttgaagctaaaaaccctgatatggtaatattatggtgcatagcagaggtctcggaaaaaaaatatttctgttcactttactttcaggttaaaaatgtttctaacacgcttgcaacttcccttatggcattaatcttgttgagggagagagacagaatcctggactctccaaagtatttaactgaaagtagggcctgctctgacagggcccatgtcccacaaggctgcttggcctcagtgggtgcttggctgtgctggatgatatgttgatctgtattggataaggaccaatgacagcaaagcaaaaatggctttaaagcttggtgttacttttcttaagttgtttaattatagttaagcaatttcaaaaatgctccaaagaaatgtgaaaggaccttttgtcacagcacttcagaaaatacacaacagccccttctgcccccgcacagaaatgctgcagagtatataaaacttgagacatttttgtaggatgcctgacgaggtgtagccttttatcttgtttccggatgcatatttattacgagtactctggttaaatattgaaaagttatatgctgtagtttttagtattttgtctttgtaatttacagaagttattggagaaaataaacttgtttcattttgc

SEQ ID NO: 15100 - protein, 296 aa, Homo sapiens [sequence omitted]

SEQ ID NO: 15101 - DNA, 3175 bp, Homo sapiens
  CDS (29)..(946)
acatgcctccccagcccccgctctgacgatgatggccacgcagaatgtcccgcccccaccctaccaggacagcccacagatgacggcaaccgcccagccaccctccaaggcccaggctgtccacatctctgccccctcagctgctgccagcacacctgtgcccagtgcccccatcgacccccaggcccagctggaggctgacaagcgagctgtatacaggcaccctcttttcccgctcctgacgctgctgtttgagaaatgtgaacaggccacccagggctctgagtgcatcacctccgccagctttgatgtggacatcgagaactttgtccaccagcaggaacaggagcacaaacccttcttcagcgatgacccagaactggacaatctgatggtgaaggcaatccaggtcctgagaatccacctgctggagctggagaaagtcaatgaactctgcaaggacttttgtaaccgttacatcacctgcttcaaaaccaagatgcacagcgacaacctgctcaggaatgatctaggggggccctactcccccaaccagccctccatcaaccttcactcacaggacctcctgcagaattcccccaattccatgtccggagtctccaataacccccaggggattgtggtcccagcctcagcgctccagcagggcaacatcgccatgacaaccgtcaactcacaagttgtgtcaggtggagccttataccaaccggttaccatggtaacctcccagggtcaggtggtcacccaagcaatcccccagggagccatccagatccagaacacacaggttaaccttgacctcacctccctcctggacaatgaggataagaagtccaagaacaaacgaggagtcttgcccaagcatgccaccaatataatgcgttcttggctcttccagcatcatgcacccctaccccacggaggatgagaagaggcagatcgcagcccagaccaacctcaccctcctgcaagtaaacaactggttcatcaatgcccggaggcgcatcctgcagcccatgcttgatgccagcaacccagatcctgcccccaaagccaagaagatcaagtctcagcaccggcccacccaaagattctggcccaactccatcgctgcgggggtgctgcagcagcagggcggtgccccagggacaaaccccgatggttccatcaacttggacaacctgcagtccctgtcctcagacagtgccaccatggccatgcagcaggctatgatggctgcacacgatgactcattggatgggacagaagaagaggatgaggatgagatggaagaggaggaggaggaggagctggaggaggaggtcgacgagctgcagacgacaaatgtcagcgacctgggcttggaacacagtgactccctggagtagtcgggcagcccagatggcactgatcactgagcaggagaggagtgtcgccgggaggccttcagggtgggggggaaggggacatgggcaggaagcaccgagggagttgggccctagcttccccaaatcagtagcttgaagaaaggcaaaggagacacctgttccttcccaaccaccgagcttcaatgaggaccccagccccacttccctggaactgccgaggactctgtttggcggggccagtcgagcagcctgtgtggaaagacaggagtgagatctggactcaccaaatccctgaggacagatggcacccatggcccccacccacggaaggacttgagttgtttacaagccctgcactgaggcagattggtgctgttcgcagagtaggcctttgcccgggggcagacttagaaggaaggggagagacaaagggggactgagtttcatccccagaagtttctcagctcctttgacagacattcaagggcaggagggagccccaaagcataaccagtgtccagaggagtgggagggcctgaggcatcacatcttgcagatcagaatgggatggaatccaccaggctccagctcatccctccaaggccctgtctctgcgcacagcaaccatggacatgggagaaagggatgggagccacagtgcccttcactctctcctggaaaccaactgtatgctggtgggctcaacctgtgggaggttaagaggagtcccttctgggttgactccaagagccaaggagatggcagaccctgggctaggaaccatatggaggtgactttgaggccacagctgtccctaggtgatcacagaacttagctcctttaacaacaggacaatggttttttaccctagatgttcccaccttcagtgctccacgccctccatagaccttcagagaaggtgaaaccaggttatctgggaatctttccagcccgcaggtcgccacggccatccctttgctcccagcctggctccatcagcctccagcttcctttcttcattctgtccttcagggaaggcagaagaaacattggaaagcatctagtccagtgggaagccaggggttggagaaggtgctacatccctcttcccatcaatatcctaaatgtgggggagggcccagagaatggcacccaagagcctgcggggatgcccatcccacacaccccacccagctgttctaaccctgctatccacagccctggaggaactggggctcctggaaggaggaagaggctctccactgtccaccctaacacataccctcccacccaccttccagacccccttggttggcaccctctcctccggttccctctcaccccatggctgtgaatgacaggacaggtcacacgtgtgttttccattgggtttaatttaatggacgtgcagtttcatttgtaaattgtgcattagccacctccttcagtggcaggatgtgagtggctacctggctcaactggaggggaccccttgggccctctggggcttcccctcccccacctggttggggtagagcaaaaggatggtcactcttccgaggtctccctgaaatgaatgtatttctcccccaaaagagctgatatttaatgttttaataaggatttttgagaaacaaataaccttatttataatctgggtgatccaatcattttttactcccttttgatgccatacatagaggaaagtctagcttttttggcgtgagacttttgcaatgtgcagtgggataaaatgcatttccttt

SEQ ID NO: 15102 - protein, 306 aa, Homo sapiens
MMATQNVPPPPYQDSPQMTATAQPPSKAQAVHISAPSAAASTPVPSAPIDPQAQLEADKRAVYRHPLFPLLTLLFEKCEQATQGSECITSASFDVDIENFVHQQEQEHKPFFSDDPELDNLMVKAIQVLRIHLLELEKVNELCKDFCNRYITCFKTKMHSDNLLRNDLGGPYSPNQPSINLHSQDLLQNSPNSMSGVSNNPQGIVVPASALQQGNIAMTTVNSQVVSGGALYQPVTMVTSQGQVVTQAIPQGAIQIQNTQVNLDLTSLLDNEDKKSKNKRGVLPKHATNIMRSWLFQHHAPLPHGG

SEQ ID NO: 15103 - DNA, 2891 bp, Homo sapiens
  CDS (765)..(2453)
ttttcagagactcgcctggcagaggcctggagcgtcctgctgcgtggactgtgggcaccgagccaccaggaggttgttgatctcattcttgctcactggtccctgccagactggtggtgcctctctactgtcgggcagccccacctctgtgctgccccatccacctacagccctcatgcctgggcccagctggaggttctgacaggggccccctggggtggcatgcggacccttcagggtgccccaggcgcagcacaggtctccagagacacaggcaccagggcgttcagagctagtcccctcgctgctgttgactgtccttgagcagccccagggccggtttctcaacctcatttgctcacctgagcaatgaagtgaggtgggctcctggaactgcagcagccaccccccggggccatcgtgaggctaagaatccagtgcagggtgagcaaccagcgaccgctacaaggacagtgaagagctagcaccaggaccttgggtagcccacccgctggagggagcgtgtgctgcaaaaagcaagagtgggctttggaggccaacggatggagcggattcagtctgaggctgttccagcccttgcttaggatccacctacctaggtctggaaatcgtatttccacttcagatgccttctcagaggataaaataacccccggtgggggagagtactggaagagggctaattcccctggttttctccccatgagcattagtgtcagtgtaattttagagtgaccccagctatgtcacgtgtggcaggcacaagaacagatgtcaatgagctattgcagaggtggacacccagatgtgtgcgctggcacactggaggggcccgtagggtggctctagaccgccccctcgtgacggcttgcctaccacctgcaggcgacgttgtggacgtttaccagcgggagttcctggcgctgcgcgatcggttgcacgcagctgagcaggagagcctcaagcgctccaaggagctcaacctggtgctggacgagatcaagagggccgtgtcagaaaggcaggcgctgcgagacggagacggcaatcgcacctggggccgcctaacagaggacccccgattgaagccgtggaacggctcacaccggcacgtgctgcacctgcccaccgtcttccatcacctgccacacctgctggccaaggagagcagtctgcagcccgcggtgcgcgtgggccagggccgcaccggagtgtcggtggtgatgggcatcccgagcgtgcggcgcgaggtgcactcgtacctgactgacactctgcactcgctcatctccgagctgagcccgcaggagaaggaggactcggtcatcgtggtgctgatcgccgagactgactcacagtacacttcggcagtgacagagaacatcaaggccttgttccccacggagatccattctgggctcctggaggtcatctcaccctccccccacttctaccctgacttctcccgcctccgagagtcctttggggaccccaaggagagagtcaggtggaggaccaaacagaacctcgattactgcttcctcatgatgtacgcgcagtccaaaggcatctactacgtgcagctggaggatgacatcgtggccaagcccaactacctgagcaccatgaagaactttgcactgcagcagccttcagaggactggatgatcctggagttctcccagctgggcttcattggtaagatgttcaagtcgctggacctgagcctgattgtagagttcattctcatgttctaccgggacaagcccatcgactggctcctggaccatattctgtgggtgaaagtctgcaaccccgagaaggatgcgaagcactgtgaccggcagaaagccaacctgcggatccgcttcaaaccgtccctcttccagcacgtgggcactcactcctcgctggctggcaagatccagaaactgaaggacaaagactttggaaagcaggcgctgcggaaggagcatgtgaacccgccagcagaggtgagcacgagcctgaagacataccagcacttcaccctggagaaagcctacctgcgcgaggacttcttctgggccttcacccctgccgcgggggacttcatccgcttccgcttcttccaacctctaagactggagcggttcttcttccgcagtgggaacatcgagcacccggaggacaagctcttcaacacgtctgtggaggtgctgcccttcgacaaccctcagtcagacaaggaggccctgcaggagggccgcaccgccaccctccggtaccctcggagccccgacggctacctccagatcggctccttctacaagggagtggcagagggagaggtggacccagccttcggccctctggaagcactgcgcctctcgatccagacggactcccctgtgtgggtgattctgagcgagatcttcctgaaaaaggccgactaagctgcgggcttctgagggtaccctgtggccagccctgaagcccacatttctgggggtgtcgtcactgccgtccccggagggccagatacggccccgcccaaagggttctgcctggcgtcgggcttgggccggcctggggtccgccgctggcccggaggccctaggagctggtgctgcccccgcccgccgggccgcggaggaggcaggcggcccccacactgtgcctgaggcccggaaccgttcgcacccggcctgccccagtcaggccgttttagaagagcttttacttgggcgcccgccgtctctggcgcgaacactggaatgcatatactactttatgtgctgtgttttttattcttggatacatttgattttttcacgtaagtccacatatacttctataagagcgtgacttgtaataaagggttaatgaag

SEQ ID NO: 15104 - protein, 563 aa, Homo sapiens
MSRVAGTRTDVNELLQRWTPRCVRWHTGGARRVALDRPLVTACLPPAGDVVDVYQREFLALRDRLHAAEQESLKRSKELNLVLDEIKRAVSERQALRDGDGNRTWGRLTEDPRLKPWNGSHRHVLHLPTVFHHLPHLLAKESSLQPAVRVGQGRTGVSVVMGIPSVRREVHSYLTDTLHSLISELSPQEKEDSVIVVLIAETDSQYTSAVTENIKALFPTEIHSGLLEVISPSPHFYPDFSRLRESFGDPKERVRWRTKQNLDYCFLMMYAQSKGIYYVQLEDDIVAKPNYLSTMKNFALQQPSEDWMILEFSQLGFIGKMFKSLDLSLIVEFILMFYRDKPIDWLLDHILWVKVCNPEKDAKHCDRQKANLRIRFKPSLFQHVGTHSSLAGKIQKLKDKDFGKQALRKEHVNPPAEVSTSLKTYQHFTLEKAYLREDFFWAFTPAAGDFIRFRFFQPLRLERFFFRSGNIEHPEDKLFNTSVEVLPFDNPQSDKEALQEGRTATLRYPRSPDGYLQIGSFYKGVAEGEVDPAFGPLEALRLSIQTDSPVWVILSEIFLKKAD

SEQ ID NO: 15105 - DNA, 2874 bp, Homo sapiens
  CDS (7)..(2835)
ggaaatatgtatcgtctccctgccacccaggaggtggtgacgcagctgcagagccagatcttggagctgcagggggagctgaaggagtttaaaacttgtaataagcaacttcaccaaaagttaattctggctgaagcagtgatggaggggaggccaacgcccgacaaaacgttgctgaatgctcagccccctgtgggagcagcctaccaggacagcccaggagagcagaaaggaattaaaaccacatcttctgtctggagagacaaggaaatggacagtgatcagcaaagaagctacgagattgactctgagatttgcccacctgatgaccttgccagcttgccatcatgcaaagaaaatcctgaagatgttctgagcccaacttcagtagctacttacctgagttccaagagtcagccttctgctaaagtcagtgtgatggggactgatcagtcagagagcattaatacctcaaatgagacagaatacttaaaacagaaaatccatgacttggaaactgagctggaaggctaccagaatttcatatttcagcttcaaaagcactcccagtgcagtgaggccataattacagttttgtgtgggacagaaggggcccaggatggcttgagcaagcccaagaatggttctgatggggaagaaatgaccttttcaagtttgcaccaagtgcgatacgtgaaacacgtgaaaatcctcggtccgctggccccagagatgattgacagcagggtgctggagaacctcaaacagcagctggaggaacaggaatacaagctgcagaaggagcagaatttgaacatgcaacttttcagtgagatccataatctgcagaataagttcagagatctctcacctcccagatacgattcattagttcagtcccaagccagggagctctcccttcaacggcagcagattaaggatggccatggcatctgtgtcatctcccgtcaacacatgaacaccatgattaaggcatttgaggagttgctgcaggccagtgatgtggattactgtgtggccgagggtttccaggaacagctgaatcaatgtgctgagctgctggagaaattggaaaagctatttctcaacggaaaatcagttggagtggaaatgaacacccagaatgaactgatggagaggattgaggaagacaacttaacctaccaacatcttctgcctgaatctcctgagccttcagcctctcatgcgctctctgattatgaaacatctgaaaagtccttcttctcacgagaccagaagcaagataatgagacagagaagacttcagttatggtgaacagtttttctcaagacttactaatggaacacatacaggaaattcgaactttgagaaagcgtttagaagaatctattaaaacaaatgagaagctacggaaacagttggaacggcaaggatctgaatttgttcaaggttctacaagcatttttgcttctggttcagagcttcatagttctctaacatcagaaattcatttcttgaggaagcagaaccaggccctcaatgcaatgctcattaaaggatccagagataaacagaaggagaatgacaaattacgagagtccctctccaggaagaccgtgagcctggagcaccttcagcgggagtatgccagcgtgaaggaagaaaatgaaaggctgcagaaagaaggcagcgagaaggagagacacaaccagcagctgatccaggaggtccgctgcagcggccaggagctgagcagggtgcaggaggagctgaagttgaggcagcagctgctctcacaggatgacaagctattgcagtctctccgagtggagctgaaggcgtatgagaagctggatgaagagcacaggagactgagagaggcgtcgggagaaggctggaaggggcaggatcctttcagggacctgcacagcctcctgatggagatccaggctctgcgcttgcaactagaaaggagcatcgaaaccagcagcactctgcagagcaggctcaaggaacagctggcaaggggggcagagaaggcacaggaaggagccctcactctggctgtccaagccgtgtccatccctgaggtgccccttcagcctgacaaacacgatggtgacaaatatcccatggaaagtgataattcatttgatctgtttgattcctcccaggcagtgacaccaaaatcagtttcagagactcctccactctctgggaatgacacggactccctctcctgcgacagtggcagttcggcaactagcactccgtgtgtgtcccgcctggtcactggccaccacctgtgggccagcaagaatggccgccatgtcctgggcctgattgaggactatgaggccctgctcaaacagatcagccagggacagaggctccttgctgaaatggacattcaaacccaagaggctcccagctccacaagtcaagagctgggaacaaagggtccacacccagcaccactgagcaagtttgtgagcagtgtgagcacggccaagctgaccctggaagaggcctacaggcggctgaagcttctctggagagtctcactccccgaggatggccagtgcccccttcactgtgagcagattggagaaatgaaggcagaggtcaccaaactacataaaaaattgtttgaacaagaaaagaagttgcaaaacaccatgaagcttttgcagctgagcaagcgccaggaaaaagtcatctttgatcaattggtcgtaacccacaaaatccttcggaaggccagaggaaacctggagcttaggcctgggggagcccatccaggaacatgcagtcccagcagaccaggctcctgagaagaactttcagccaataaagcttgtgcttccccc

SEQ ID NO: 15106 - protein, 943 aa, Homo sapiens
MYRLPATQEVVTQLQSQILELQGELKEFKTCNKQLHQKLILAEAVMEGRPTPDKTLLNAQPPVGAAYQDSPGEQKGIKTTSSVWRDKEMDSDQQRSYEIDSEICPPDDLASLPSCKENPEDVLSPTSVATYLSSKSQPSAKVSVMGTDQSESINTSNETEYLKQKIHDLETELEGYQNFIFQLQKHSQCSEAIITVLCGTEGAQDGLSKPKNGSDGEEMTFSSLHQVRYVKHVKILGPLAPEMIDSRVLENLKQQLEEQEYKLQKEQNLNMQLFSEIHNLQNKFRDLSPPRYDSLVQSQARELSLQRQQIKDGHGICVISRQHMNTMIKAFEELLQASDVDYCVAEGFQEQLNQCAELLEKLEKLFLNGKSVGVEMNTQNELMERIEEDNLTYQHLLPESPEPSASHALSDYETSEKSFFSRDQKQDNETEKTSVMVNSFSQDLLMEHIQEIRTLRKRLEESIKTNEKLRKQLERQGSEFVQGSTSIFASGSELHSSLTSEIHFLRKQNQALNAMLIKGSRDKQKENDKLRESLSRKTVSLEHLQREYASVKEENERLQKEGSEKERHNQQLIQEVRCSGQELSRVQEELKLRQQLLSQDDKLLQSLRVELKAYEKLDEEHRRLREASGEGWKGQDPFRDLHSLLMEIQALRLQLERSIETSSTLQSRLKEQLARGAEKAQEGALTLAVQAVSIPEVPLQPDKHDGDKYPMESDNSFDLFDSSQAVTPKSVSETPPLSGNDTDSLSCDSGSSATSTPCVSRLVTGHHLWASKNGRHVLGLIEDYEALLKQISQGQRLLAEMDIQTQEAPSSTSQELGTKGPHPAPLSKFVSSVSTAKLTLEEAYRRLKLLWRVSLPEDGQCPLHCEQIGEMKAEVTKLHKKLFEQEKKLQNTMKLLQLSKRQEKVIFDQLVVTHKILRKARGNLELRPGGAHPGTCSPSRPGS

SEQ ID NO: 15107 - DNA, 2283 bp, Homo sapiens
  CDS (99)..(1562)
gttccctgactcggagtcttagtgtgtcgttatttggacaagaggcacattgacccaatttggagacgtattttggaaggaggtgtgaaaaagacagcatgaactttaccccaacacacacccctgtctgcagaaagcgaacagttgtctccaaacgtggtgttgccgtcagtggtcccaccaagaggaggggaatggcagattcactggagtcaacccccttgccttcccccgaagatcgtctggccaaactccatccttctaaggagctcctggaatattatcaaaagaagatggctgagtgtgaggcagaaaatgaggacttgctgaagaaactggaactctacaaagaagcttgtgaaggacagcataaacttgaatgtgatttgcagcagagggaggaagagattgctgaattgcagaaagctctaagtgatatgcaggtctgcctcttccaggaacgggaacatgttttacgcctctactcagaaaatgaccgactgagaatcagggagctagaagacaagaaaaagattcagaatctcttggctcttgtgggaacagatgctggagaagtgacctatttttgtaaggagcctcctcacaaagtcaccattctccaaaagactatccaggctgtaggtgaatgtgagcagagtgaatcttcagctttcaaagcagatcctaaaataagcaaaagaagaccatcgagagagagaaaagaaagttctgagcattaccaaagagacatacagacactcatcctacaggtggaagcactgcaggctcagctgggagagcagaccaaactttctcgagaacaaattgaagggctcatcgaggacagacggattcaccttgaggaaatacaagttcagcaccagagaaatcagaacaaaatcaaagagctaaccaaaaatcttcaccacacccaggaactgctctatgagagcaccaaagattttctgcaactcagatctgaaaaccaaaataaagagaagtcatggatgcttgaaaaagataatttgatgtcaaagattaagcaatatagggtgcagtgtaagaagaaagaagataaaattggaaaagtgttgcccgttatgcatgagagtcaccatgctcaaagtgaatatattaagtccctaaaagataagttagtacaagagaaaaagctgtccaatatgtaccaagagcagtgcatttccttagaagaagaacttgcccgaattcgtgaggaagagggaatgaggagagagatcttcaaggatcgcactaacaagatggggaagcgtttacagataatgacaaaacgctatgaggcattggagcgtcgacgtatcctggaagtagaaggctttaagacagatattaaagttctccgacagaaactgaaagacttggagcaaatgttgtataaggcaacagttaatgcccgggcaaaccaggatcttgcccttctgtgtgaggtccgtgacagcaatagacgggcacataagatacaaggagaactgaagaatcttaagtcgaaagtgtttggtctggagaatgaacttagactctgttaatgtctacttttggaaatggcccccatttagaagaggtgtgcttcttgaaacctgaggacaaggtcatctgctgccagaaaatgtaaacctgagttgactagagtggtggtattcattattgtaaagacagcttgaagaatcggggaccactaggaaagcttttcttgcatactcagcttgctttatcatttttgctgtccttttaacatttgcgaggagtaggggcctggtcctgaatgacttggaggctttcattatttatcctgtctgtattgaccggtttttgttttttcagaaggcagtgatgctgaaaacttaggaagaaggtattttgcaataagcttggctgagtgtccatgggaagaatactttccctaaagagagagaagcactcacagaggctgcctttctcctgagctcggggagaaggcagcacatcacaacctgtcacattgaaataggcgctcattctgctatttcaccttccgtcctgagcagagcctgaattacgtttttgggcaatttcatggtgtttcaccagagggcgctagagactcaaacgaaatgtccatctggaaagattcgggagacactttgccgaggggatgaagctgagatgatgcttgtatggaaagtttgatatttttatcagtcacatggcttttgaaaaatgatgtatatattttaaattaactattttcaataaaatatttcactc

SEQ ID NO: 15108 - protein, 488 aa, Homo sapiens
MNFTPTHTPVCRKRTVVSKRGVAVSGPTKRRGMADSLESTPLPSPEDRLAKLHPSKELLEYYQKKMAECEAENEDLLKKLELYKEACEGQHKLECDLQQREEEIAELQKALSDMQVCLFQEREHVLRLYSENDRLRIRELEDKKKIQNLLALVGTDAGEVTYFCKEPPHKVTILQKTIQAVGECEQSESSAFKADPKISKRRPSRERKESSEHYQRDIQTLILQVEALQAQLGEQTKLSREQIEGLIEDRRIHLEEIQVQHQRNQNKIKELTKNLHHTQELLYESTKDFLQLRSENQNKEKSWMLEKDNLMSKIKQYRVQCKKKEDKIGKVLPVMHESHHAQSEYIKSLKDKLVQEKKLSNMYQEQCISLEEELARIREEEGMRREIFKDRTNKMGKRLQIMTKRYEALERRRILEVEGFKTDIKVLRQKLKDLEQMLYKATVNARANQDLALLCEVRDSNRRAHKIQGELKNLKSKVFGLENELRLC

SEQ ID NO: 15109 - DNA, 2246 bp, Homo sapiens
  CDS (357)..(761)
tgtatagatgttaagtgtttcatgtggtttttgtgtcattgctatttatcaatagcaataattttgcactgaaaactttttatagttcaaaaattaagcatggactccccagtatactttaactttctttctttctttttttttttttggagacagagtctcactgtcacccaggctggagtgcagtggcatgatctcagtttatgcaacttctgcctccccaggttcaagcgattcttttgcctcagccacctgactagctgggattgcagcctgcaccaccacacctggctaaatttttgttgttgtcgttgagatacagtttcactctgtcacccaggctggagtgcagtggcatgatctcagctcactgcaacctctgccttctggattcaagtgattcttgtgccttagcctcccaagtagctgggattacaggcgtgcaccaccacgcccagttgatttttgtatttttgatagagacggagtttcaccatgttggccaggctggtctcgaactctgggttcaagaaatcctcccaccttgcctcccaaagtgctgggattacaggtgtgagccaccacgcatggccctgaaccttctctttttaggaataccaaagttttcaactttttcagctttagaatttgtaaatatttttgtagaatatcatatgactgtaattccagagtgttccaacttgtttatgatatatttgggtaaatttacaactgttcttttatttgccataatctggttataacactgtttgtggtaggaaaggaaaacatgcaaaacatacacacacacacacacacacacacacacacgcagagttgtgattctcagtaccaagctataggaccatgttatagatcagcgtttagtcacctccaggttatatgcatcgagaacctgaataaatcatgccactatattaatttatattacatgtttcatatttaaatcatgttttcctaaaatgtagcaactacatgtgataaaagcaaattagaacattctgtaggactgtcttgcataccttctgtctggtttccactgattccttcttagccatggagagcatttgtgattaattaatttatatatgaaataatggtttccattttatgcgagtatttgtaactgcatataccagtgcgtgtgcgtctacctctgtcagcatgaaagtattccagtctttaatttcaaaaacttcaaattagcctcatgaagagaatttttccctgtgaaaagtaagaccaagaaaaaacaaactaaagacatgtgacttattcaatgaaagtgaaaaagaagctctaaaacagtgtcattgattaaaaagaatatctggaatgtagccccactctttgagtgggattcatttcttactgcttatgaactttcaatttagtagtcagaaaccatggatttattttactgcacaatgtgaagtttacattttattaacacttgagtagtctgatttagagactagttacttctattttttaaaataatggagtaacaaattacagaatagctaaataattttttaaaaatattttacagttgtaaaaaatatccatcagaaaaatgacacacaaaacaaaatatctggacctttacagaagacgtttgctgacccccactttaaaggattggaacagtcttctagaattgaggaatatttattaaaatacctgtaaagaaaatagtgaatcactgtagcaatggctttgattcagaccttaaaatcacataagaagaattacaacatgttatggatttttaagtggcaggtattgtaactgttttttgtgtgcaaaatactgagtaaccactgggaaaatatttcagatgaaagggatgacaaaagcatgttgcgctttgcatcagcaaggcattgacttctgaaaaaatgatctgaaaaaagtttcaccgtttgtcttcttacctcattttaagaagcatgtgaaaatgggatactatagactactgagaatttcagaaattgagaacaatttcataataaaacggctatatttgaagagagaatacattttatataaacaggaaaatacatttgacactttatggaattttatgagactttttgtgggaacagaaggtcttcaaattgtaaaatgtaaagattgctctttttattaagtctttaacagggatgtatttcattgtatgttttgggtatggctttggaataaatcattttatattttatttg

SEQ ID NO: 15110 - protein, 135 aa, Homo sapiens
MISAHCNLCLLDSSDSCALASQVAGITGVHHHAQLIFVFLIETEFHHVGQAGLELWVQEILPPCLPKCWDYRCEPPRMALNLLFLGIPKFSTFSALEFVNIFVEYHMTVIPECSNLFMIYLGKFTTVLLFAIIWL

SEQ ID NO: 15111 - DNA, 2475 bp, Homo sapiens
  CDS (606)..(1082)
gaagatggcggactcggtggctagccgatgaggaggccgcggggggaacccggcccccgggccccgagaccgactgagggagcgacctgcgcagggcccggggagtcatgtaggggtggcgcctgcggggagggctgcgggagggcagcgggagctggtgttagcggcagcggccacggtctcctggcgtccctgggccggggtgggtgttggggcccccgacttcgccgactccgcgccatcgcaaagcggtgcactcgggctccacgcgcgccctgcaaggtgggcgctgcgttttcatttcacgggtgaggagacttagagagacgaagccacttgtccaaggtcacgccgctggtgagtgggagcgcccagcatggaacccagcaccgtccagccgcggagcccgcgttccaccctctgtgccgccgccgcctcctgtgggagagggaggtggtcgggagagtgcacgccggtgccgcctgggctccagactgggcgcgaccactaacccggttaatgacctcgggcttaacttaaccccttcgctgctctgggcctgcgtttctccaccggtgaaatgagggtctccatcacccaactccatgcttcgagtcctgctctctgctcagacctcccctgctcggctgtctggcctgctgctgatccctccagtacagccctgctgtttggggcccagcaaatggggggaccggcctgttggaggaggccccagtgcaggtcctgcgcaaggactgcagcggcttctggaacaggcgaagagccctggggagctgctgcgctggctgggccagaaccccagcaaggtgcgcgcccaccactactcggtggcgcttcgtcgtctgggccagctcttggggtctcggccacggccccctcctgtggagcaggtcacactgcaggacttgagtcagctcatcatccgaaactgcccctcctttgacattcacaccatccacgtgtgtctgcaccttgcagtcttacttggtggtacagaagttggtcctgccctttgggcgactgaactacctgcccctggaacagcagtttatgccctgccttgagaggatcctggctcgggaagcaggggtggcacccctggctacagtcaacatcttgatgtcactgtgccaactgcggtgcctgcccttcagagccctgcactttgttttttcccctggcttcatcaactacatcagtggtacgcagccaggatggctggctgggcccctgagggctggagaggcaggggagcagggtggcctgcagcccagagccccagtccccgcctccccacaggcactcctcatgctctgattgtgcgtcgctacctctccctgctggacacggccgtggagctggagctcccaggataccggggtccccgccttccccgaaggcagcaagtgcccatctttccccagcctctcatcaccgaccgtgcccgctgcaagtacaggtggatggggcagcctggggcaaggggaggggccagcctgggaccagcagagtggaaaagccagagggaccatgaagcgccaaagctaaggagctctcggccaccataaaactgggccctgaagcagcagagggctttgcccagggtggtggcactagactgggacagattaggatgaggtgccgggcccttcctgctactggtgtcctttctcctcagtcacaaggacatagtagctgaggggttgcgccagctgctgggggaggagaaataccgccaggacctgactgtgcctccaggctactgcacaggtgagcaaggggcaggcggcaggcccggggagacggagccctggctaaggccgccggccctgctcccctccagacttcctgctgtgcgccagcagctctggtgctgtgcttcccgtgaggacccaggaccccttcctgccatacccaccaaggtcctgcccacagggccaggctgcctctagcgccactactcgagaccctgcccagaggtaaaggaggcagggtgggggagccctggccaccttgcccgccatgccctgagccacgtccctccccctgcagggtggtgctggtgttgcgggaacgctggcatttctgccgggacggccgggtgctgctgggctcgagggccctgagggagcggcacctaggcctgatgggctaccagctcctgccggtgagtggccctggcctggcccgtggcgcatcctcactcccagcctgcgggtaacctgccgccctctcctctccccacagctacccttcgaggaactggagtcccagagaggcctgccccagctcaagagctacctgaggcagaagctccaggccctgggcctgcgctgggggcctgaagggggctgaggggttgatgtggggttcaggatggcccccccatggggggtggatgatttgcactttggttccctgtgttttgatttctcattaaagttcctttccttc

SEQ ID NO: 15112 - protein, 159 aa, Homo sapiens
MLRVLLSAQTSPARLSGLLLIPPVQPCCLGPSKWGDRPVGGGPSAGPAQGLQRLLEQAKSPGELLRWLGQNPSKVRAHHYSVALRRLGQLLGSRPRPPPVEQVTLQDLSQLIIRNCPSFDIHTIHVCLHLAVLLGGTEVGPALWATELPAPGTAVYALP

SEQ ID NO: 15113 - DNA, 2496 bp, Homo sapiens
  CDS (331)..(2352)
gtcagtccccgcgcttttcggaggctgccagcgtcccacaccagccgcaggtgaaaaccggcagaaagacattaagagattttcctgcagtcactgctggcagatgatagagccaggatttgaaagcaggcagcctggctccagaccctgtgctcttaactcccgttttgcatcaagaacagaatcctatgaaaggcttgtacagtgcttggatagcagcatcaaggagcattgtgtacatgcagaagtgcacagtacctggagtgaaactgcttgtgttcgatttctgataccattcataactggctgtgtgatctcaaaacctctaaaatgcagacctccagctctagatctgtgcacctgagtgaatggcagaagaattacttcgcaattacatctggcatatgtaccggaccgaaggcagatgcataccgtgcacagatattacgcattcagtatgcatgggcaaactctgagatttcccaggtctgtgctaccaaactgttcaaaaaatatgcagagaaatattctgcaattattgattctgacaatgttgaatctgggttgaataattatgcagaaaacattttaactttggcaggatctcaacaaacagatagtgacaagtggcagtctggattgtcaataaataatgttttcaaaatgagtagtgtacagaagatgatgcaagctggcaaaaaattcaaagactctctgttggaacctgctcttgcatcagtggtaatccataaggaggccactgtctttgatcttcctaaatttagtgtttgtggtagttctcaagagagtgactcattacctaactcagctcatgatcgagaccggacccaagacttcccggagagcaatcgtttgaaactccttcagaatgcccagccacctatggtgactaacactgctaggacttgtcctacattctcagcacctgtaggtgagtcagctactgcaaaattccatgtcacaccattgtttggaaatgtcaaaaaggaaaatcacagctctgcaaaagaaaacataggacttaatgtgttcttatctaaccagtcttgttttcctgctgcctgtgaaaatccacagaggaagtctttttatggttctggcaccattgatgcactttccaatccaatactgaataaggcttgtagtaaaacagaagataatggcccaaaggaggatagcagcctgcctacatttaaaactgcaaaagaacaattatgggtagatcagcaaaaaaagtaccaccaacctcagcgtgcatcagggtcttcatatggtggtgtaaaaaagtctctaggagctagtagatcccgagggatacttggaaagtttgttcctcctatacccaagcaagatgggggagagcagaatggaggaatgcaatgtaagccttatggggcaggacctacagaaccagcacatccagttgatgagcgtctgaagaacttggagccaaagatgattgaacttattatgaatgagattatggatcatggacctccagtaaattgggaagatattgcaggagtagaatttgctaaagccaccataaaggaaatagttgtgtggcccatgttgaggccagacatctttactggtttaaggggaccccctaaaggaattttgctctttggtcctcctgggactggtaaaactctaattggcaagtgcattgctagtcagtctggggcaacattctttagcatctctgcttcatccttaacttctaaatgggtaggtgagggggagaaaatggtccgtgcattgtttgctgttgcaaggtgtcagcaaccagctgtgatatttattgacgaaattgattccttgttatctcaacggggagatggtgagcatgaatcttctagaaggataaaaacagaatttttagttcaattagatggagcaacaacatcttctgaagatcgtatcctagtggtgggagcaacaaatcggccacaagaaattgatgaggctgcccggagaagattggtgaaaaggctttatattcccctcccagaagcttcagccaggaaacagatagtaattaatctaatgtccaaagagcagtgttgcctcagtgaagaagaaattgaacagattgtacagcagtctgatgcgttttcaggagcagacatgacacagctttgcaggggggcttctcttggtcctattcgcagtttacaaactgctgacattgctaccataacaccggatcaagttcgacccatagcttacattgattttgaaaatgcttttagaactgtgcgacctagtgtttctccaaaagatttagagctttatgaaaactggaacaaaacttttggttgtggaaagtaagtgggatacttggaatcaaggcatctctgtattacagtcttctttattttttagcatagaaagttggggatgtgttaattgtatttttaagaatatattctaaattctgtacttcaaataatagcacagattttacatctg

SEQ ID NO: 15114 - protein, 674 aa, Homo sapiens
MQTSSSRSVHLSEWQKNYFAITSGICTGPKADAYRAQILRIQYAWANSEISQVCATKLFKKYAEKYSAIIDSDNVESGLNNYAENILTLAGSQQTDSDKWQSGLSINNVFKMSSVQKMMQAGKKFKDSLLEPALASVVIHKEATVFDLPKFSVCGSSQESDSLPNSAHDRDRTQDFPESNRLKLLQNAQPPMVTNTARTCPTFSAPVGESATAKFHVTPLFGNVKKENHSSAKENIGLNVFLSNQSCFPAACENPQRKSFYGSGTIDALSNPILNKACSKTEDNGPKEDSSLPTFKTAKEQLWVDQQKKYHQPQRASGSSYGGVKKSLGASRSRGILGKFVPPIPKQDGGEQNGGMQCKPYGAGPTEPAHPVDERLKNLEPKMIELIMNEIMDHGPPVNWEDIAGVEFAKATIKEIVVWPMLRPDIFTGLRGPPKGILLFGPPGTGKTLIGKCIASQSGATFFSISASSLTSKWVGEGEKMVRALFAVARCQQPAVIFIDEIDSLLSQRGDGEHESSRRIKTEFLVQLDGATTSSEDRILVVGATNRPQEIDEAARRRLVKRLYIPLPEASARKQIVINLMSKEQCCLSEEEIEQIVQQSDAFSGADMTQLCRGASLGPIRSLQTADIATITPDQVRPIAYIDFENAFRTVRPSVSPKDLELYENWNKTFGCGK

SEQ ID NO: 15115 - DNA, 2527 bp, Homo sapiens
  CDS (100)..(861)
gcgccccggccgggccactgggccacaggccacgcggccacgcagtccgagcgggagccgagccgggcggggcgagggcagctccgcctggctcccaccatgagtgctgagcttaacgtgcctatcgacccctctgctcctgcctgccctgagcccggccataagggcatggattaccgggactgggtccgccgcagctacctggaactggtcacctctaaccaccactcggtacaggccctgtcgtggcggaagctctacctgagcagggccaagctgaaggcctccagcaggacctccgccctcctctccggctttgccatggtggccatggtggaggtgcagctggagacgcagtaccagtacccgcggccgctgctgattgccttcagcgcctgcaccacggtgctggtggccgtgcacctgttcgccctcctcatcagcacctgcatcctgcccaatgtggaggccgtgagcaacatccacaacctgaactccatcagcgagtccccgcatgagcgcatgcacccctacatcgagctggcctggggcttctccaccgtgcttggcatcctactcttcctggccgaggtggtgctgctctgctggatcaagttcctccccgtggatgcccggcgccagcctggccccccacctggccctgggagtcacacgggctggcaggccgccctggtgtccaccatcatcatggtgcccgtgggcctcatcttcgtggtcttcaccatccacttctaccgctccctggtgcgccacaaaacggagcgccacaaccgcgagatcgaggagctccacaagctcaaggtccagctggacgggcatgagcgcagcctgcaggtcttgtgaggggccgagggccggggctgggagcggccctgtgcccgggagtccgcagaggcggggatttgtcagatgcagacattttgcaaggctgccgggtagttcaagaccaaagttttcctcttgtcttaataccataaggactggatgacttctcctgagatagaaccgtttggttcaatgagggactgtgttgctaagagcgttgggggcaaagccaggctggttccttggcctcggggtttcctgggtcggggacacggtgaagaggctccagcgggacctgcccatcagtcctgggccaggaggggctccaagcagcacccagcggtccgggggagtctcagacccggcatgcgtggctggcagacctgggagagccagggcagggttttgcgttcagagaaggattgccccagagacccgtggtggacttcatgggtgctgagtggcccgtgtgacagtgatgacacgaaggcttcggcgtttgagtgggtgcaggtgcacgccagggcttggtgcttccctgcctggccctggagggagctgggtggcctggcttcaggggaagacaggagccaggactcacgtcagcccagcaggtgtggggggtgctgcagccctcggcagtggggtcaggccctgggggatgtttccaatggtgggcagcctggccaggccggagaagacatgttcacgggcatctatcagatgcccccttgaggaggctgagttatttgagggctgctgcaaagtacgctaggctcaaattctcttttcccagccagagccctggccacacggactcagaggggccaccggggtggggaaaggacccctccccgacccccgcagccactggcctccagctctcggccacagaatggcctctaaggctgactcagccgctcccttgggctgtggcagcaggaggcgggggctctggctcaggccccggagcctgtgcagcttgcccatggccctaggcagcgaggggacagcctgggggacttcctgcctaggcaaggtcattggccgggcctggcctgtggatagtggggccaggggccggcccaggccaaatgagtgccctccttgttatgacaccaagtgactacaagggaggcaagacccctccaggcctcccagccgacactgggtcccaccacacacagtgactgtgccgtgcagtgcaggttctggccttttccttgaaggcatctggtaaacccgaagccacgctctcgggccgcacatgcacgccgcagcaccagctgccctgagctgcttgtacaaccaaacacctttcccctcttctccagctgtaacctggagagtcagccatgccttgtcttttgttctcatgaatagtcactggggccgggcgcagtgactcacgcctgtaatcccagcactttgggaggcctaggtgggcggatcacttgaggtcaggagttcgagaccagcctggccaacatggtgaaaccctgtctctactaaaaaaatacagaaaattagctgggcgtggtggcgggcgcctgtagccccagctacttgggaggctgaggcgggagaatggcaatggcgtgaacccgggaggcagagcttgcagtgagctgagatggcgccactgcactccagcctgggcgacagagccagactcaatctc

SEQ ID NO: 15116 - protein, 254 aa, Homo sapiens
MSAELNVPIDPSAPACPEPGHKGMDYRDWVRRSYLELVTSNHHSVQALSWRKLYLSRAKLKASSRTSALLSGFAMVAMVEVQLETQYQYPRPLLIAFSACTTVLVAVHLFALLISTCILPNVEAVSNIHNLNSISESPHERMHPYIELAWGFSTVLGILLFLAEVVLLCWIKFLPVDARRQPGPPPGPGSHTGWQAALVSTIIMVPVGLIFVVFTIHFYRSLVRHKTERHNREIEELHKLKVQLDGHERSLQVL

SEQ ID NO: 15117 - DNA, 3384 bp, Homo sapiens
  CDS (751)..(1767)
gagcatgtgcacgctggccagctctgagttctcccatgaggctgtcaagacgcacatcgagacggtcatcaacgccctgaagactgagcgggacgtgagcgtgcggcagcgggccgtggacctcctctacgccatgtgcgaccgcagcaacgccccacagatcgtggccgagatgctgagctatctggagacagctgactactccatccgagaagagattgtgctgaaggtcgccatcctggctgagaagtacgcggtggactacacctggtatgtggataccatcttgaacttgatccgaattgctggtgattacgtgagtgaagaggtgtggtaccgagtcattcagatcgtcatcaaccgggacgacgtgcagggctacgcggccaagactgtgttcgaggctcttcaggctcccgcgtgccacgagaacctggtcaaagtgggcggctacatcctgggggagtttggaaacttgatagctggagacccgagatccagcccgctgatccagttccacctgctgcactccaagttccacctgtgcagcgtccccacccgcgcgctgctcctgtcacctacatcaagttcgtgaacctcttcccggaggtgaagcccaccatccaggacgtgctgcgcagcgacagccagctcaggaacgcagacgtggagctgcagcagcgtgctgtggagtacctgcggctcagcaccgtggccagcaccgacatcctggcgaccgtgctggaggagatgcccccattcccggagcgggagtcctccatcttggcaaagctcaagaagaagaagggccccagcacggtgacagacctggaggacaccaagcgggacaggagtgtggacgtgaacgggggtcctgagcctgccccagccagtaccagcgccgtgtctacgccttctccgtcggcagacctgctgggtctcggggctgccccccctgcccccgcgggccccccaccctcctccggcggcagcgggctgctcgtggacgtgttctcagactcggcctctgtggtcgcgcctctcgctcctggctccgaagacaactttgccaggtttgtttgtaaaaacaatggtgtgttgtttgaaaaccagctgcttcaaattggacttaagtctgaatttcggcagaatttaggtcggatgtttatcttttatggtaataagacctccacgcagttcctaaactttaccccaacactaatctgttcagacgaccttcagcctaacctgaacctgcagaccaagcccgtggacccgaccgtggaggggggcgcgcaggtgcagcaggtggtcaacatagagtgcgtgtccgacttcacggaggcgccagtcctcaacattcagttcaggtatgggggcaccttccagaacgtgtctgtgcagctgcccatcactctcaacaaattcttccagccgacagaaatggcttctcaggatttctttcaacgttggaagcagttgagcaatccacagcaggaagtgcagaacatcttcaaagcaaagcacccaatggacacagaagtcaccaaagccaagatcattggatttggttctgcacttcttgaagaagttgatcctaatcctgcgaatttcgtgggagctggaatcatccacacgaaaaccacccagattggatgcctgctgcgcttggagccgaacctgcaagcccagatgtaccggctcacgctgcgcacaagtaaggaagccgtttctcagagattatgtgaattgctctcagcgcagttttagtcctgaggatggaagaccaggctcgtgtgtcttgtgttgtcttcgtctgtgccgtttgtcttcgtggctatcctgcagatgagcaccgtgtccagtgccacagcacaaggcgcctccccgccccaccgccccacacctctcccctttgggctggacgggaacacacgtgtgtggctcaggaggaaaagctcagcctggactgtggcagccacggcagaaggtggatcttgggatcaatttttataaaaatcgagacagttctgtggttaaatctacaaattaaagggaaattagaagttggcgtgaacgtggcgtttgtgggagtgtcactgagatggcccgtgctgccgcccaccccgcctcggagcctctgggagcagcagtgccactgtgcatggcgtgggctgagccttggtgtgtggccgtcctggtggctgcacacctggcgtcgtcctgggcccttgggaggagcacagctgaccctggttttgctgcagtcccagctggactattttcccaggcaggattttaatctagaatttagaaacatttgtatttgtaatgacttctggcaaaagcacgtgtcctggccggatgtaactgttctcctttcccagctcctgtttgtgaagggcgtctgttatgctcctgcagtcgccgaggccttggatgtgcagccaggggaggagcgtcctgccggccccgcagggcccccaggactccagggtaaagtgtgggccggtggcgcaagactcagaggtgtgctcgtctctttcctgtcagagtgggcgtccccaggccacggtgcaggcctgagtccttccaccggccccgtccagtcgtccctggaggggctgtggaggaaggacgcctctgtgtggtcaggaagtgaaggggccattggccgcatgccatgtgccacctgcggcttgtgtctcacctgtcatctggactcagcacccaggctgcacatctgacacctgagaggcgagagagtggggccggcctaggagccaaggctggggccttgcgctctgtccccaggatggtggccttgtttgtcctaaacacacccagcacaggttctggcttcctgacatgctgtggaggcagggagggtgggtggccacatgtgcttgagggttttcaccctggccctcagttgcctgctgtgcgggtccctggggcagctgcaggggctcacggacccatcagggtctccacagctcccctgcagtgtgtgcaccccacaatgtctgcggctcttcttccggcgtgtcgggctttgatcacagcatagccacgtcagtggcgtgcgcctctcgcacaggccattctgggtctggtggtgccaggtgccgtgacacgccgtgctgggcttgtgctgcagctgggtggtgtggccctcattctcatgttccagctgctgggcagtgctctgcctgtgtgctgcgcctgcaggctgcgtgtgctgccgtggatctcctgcatcccttgacccctcccgccatcagaggaaaggctgctccccgaggcaccgcttccctgtgcggcgctgcagaggggccctcagtgtggcactcctcgtcaaagaaaaataaaggctagaactgc

SEQ ID NO: 15118 - protein, 339 aa, Homo sapiens
MPPFPERESSILAKLKKKKGPSTVTDLEDTKRDRSVDVNGGPEPAPASTSAVSTPSPSADLLGLGAAPPAPAGPPPSSGGSGLLVDVFSDSASVVAPLAPGSEDNFARFVCKNNGVLFENQLLQIGLKSEFRQNLGRMFIFYGNKTSTQFLNFTPTLICSDDLQPNLNLQTKPVDPTVEGGAQVQQVVNIECVSDFTEAPVLNIQFRYGGTFQNVSVQLPITLNKFFQPTEMASQDFFQRWKQLSNPQQEVQNIFKAKHPMDTEVTKAKIIGFGSALLEEVDPNPANFVGAGIIHTKTTQIGCLLRLEPNLQAQMYRLTLRTSKEAVSQRLCELLSAQF

SEQ ID NO: 15119 - DNA, 3081 bp, Homo sapiens
  CDS (80)..(1456)
ttgcaatacagaagagtgtctaaaaactggatcacctggcaaaaaggaagagaaggccaagaacaaagaatcactttgcatggaaaacagtagcaacagctcttcagatgaagatgaagaagaaacaaaagcaaagatgacaccaactaagaaatacaatggtttggaggaaaaaagaaaatctctacggacaactggtttctattcaggattttcagaagtggcagaaaaaaggattaaacttttaaataactctgatgaaagacttcaaaacagcagggccaaagatcgaaaagatgtctggtcaagtattcagggacagtggcctaaaaaaacgctgaaagagcttttttcagactctgatactgaggctgcagcttccccaccgcatcctgccccagaggagggggtggcagaggagtcactgcagactgtggctgaagaggagagttgttcacccagtgtagaactagaaaaaccacctccagtcaatgtcgatagtaaacccattgaagaaaaaacagtagaggtcaatgacagaaaagcagaatttccaagtagtggcagtaattcagtgctaaatacccctcctactacacctgaatcgccttcatcagtcactgtaacagaaggcagccggcagcagtcttctgtaacagtatcagaaccactggctccaaaccaagaagaggttcgaagtatcaagagtgaaactgatagcacaattgaggtggatagtgttgctggggagctccaagacctccagtctgaagggaatagctcgccagcaggttttgatgccagtgtgagctcaagcagtagtaatcagccagaaccagaacatcctgaaaaagcctgtacaggtcagaaaagagtgaaagatgctcagggaggaggaagttcatcaaaaaagcagaaaagaagccataaagcaacagtggtaaacaacaaaaagaagggaaaaggcacaaatagtagtgatagtgaagaactttcagctggtgaaagtataactaagagtcagccagtcaaatcagtttccactggaatgaagtctcatagtaccaaatctcccgcaaggacgcagtctccaggaaaatgtggaaagaatggtgataaggatcctgatctcaaggaacccagtaatcgattacccaaagtttacaaatggagttttcagatgtcggacctggaaaatatgacaagtgccgaacgcatcacaattcttcaagaaaaacttcaagaaatcagaaaacattatctgtcattaaaatctgaagtagcttccattgatcggaggagaaagcgtttaaagaagaaagagagagaaagtgctgctacatcctcatcctcctcttcaccttcatccagttccataacagctgctgttatgttaactttagctgaaccgtcaatgtccagcgcatcacaaaatggaatgtcagttgagtgcaggtgacagcaggacttgctaaagcactttgcacttaatggctgttgagggccactttttttttatactgcacagtggcacaaaaaaatatcagacaagcactattttatatttaaaaattgtttcttgacaagctgacttggcacttaagtgcacttttttatgaagaaaaagtacaatgaactgcttttcctcaagcaataattgtttccaacttgtctgggaattgtgtgtctggtaactggaaggccttccactgtggcaaatggaggcttttcactgcctgtagagacaatacagtaagcatagttaaggggtgggtcagaacatgttaagataacttactgtatatgtattcccttgtattttgttaaagctggaacatttgatatttttccatttatttatgaaaaaatatgaacctattttcatttgtacaaggtaattgttttttaaagcaagtcaccttagggtggctttaattgtataagtcaagcacatgtaataaattcaaaacctgcagttaacaggatattagacatcaatcctggtaaccaaatattaaagattctctttaaaaaagactgaacatgtttacaggtttgaattaggctaaaaggtcttgcagtggcttttcatggcccttcaaattggaatggaactactgtactttgccatttttctataaatcagtattttttttttaattttgatatacattgtgtgaaaaaagaaaatggctaataaactgtattaaatcttaaacaatgtataaagattgtacttagccagttcaaagtgtatatttattcataatgaattataacagttatatttttgtgttttcttgtaaatgtttcttttcccttaaatacagataattcatttgtattgcttattttattatgagctacaacaaaaggacttcaggaacaagtaatgtattagtatggttcaagattgttgataggaactgtctcaaaaggatggtggttattttaaatataaatagctaatgggggtggtaggcctataaaattaaatgccttgtataaaatccaaaatgaatgcaaaattgttttcacttgtattgactttatgttgtatgattccaatctctgttctgtttggcacttgtatttaattcttcacctttgtaagacatttgtatattgtggatgtgttcattcaagctatttaatatctggcactgttaatacacagtactttattgtacagactgttttactgttttaattgtagttctgtgtactttttttggatggggctggcatgttttctttgtttcctggcaatacgacgtgggaatttcaatgcgttttgttgtagatgctaacgtgtcagaatcctttacattcaacttttctaagaaaagcattttcagtcttgtagtgtgtgcttacagtaactaattttgttgaaaatggtttcaagttattcaaatttgtacaggactgtaaagatttgttgacagcaaaatgttgaagaaaaaagcttatagaataaaagctataaagtatatattaggatctgcaaacaatgaagaattatgtaatatattgtacaaatgtaagcaaaggctctgaaataaaatgccatagtttgtg

SEQ ID NO: 15120 - protein, 459 aa, Homo sapiens
MENSSNSSSDEDEEETKAKMTPTKKYNGLEEKRKSLRTTGFYSGFSEVAEKRIKLLNNSDERLQNSRAKDRKDVWSSIQGQWPKKTLKELFSDSDTEAAASPPHPAPEEGVAEESLQTVAEEESCSPSVELEKPPPVNVDSKPIEEKTVEVNDRKAEFPSSGSNSVLNTPPTTPESPSSVTVTEGSRQQSSVTVSEPLAPNQEEVRSIKSETDSTIEVDSVAGELQDLQSEGNSSPAGFDASVSSSSSNQPEPEHPEKACTGQKRVKDAQGGGSSSKKQKRSHKATVVNNKKKGKGTNSSDSEELSAGESITKSQPVKSVSTGMKSHSTKSPARTQSPGKCGKNGDKDPDLKEPSNRLPKVYKWSFQMSDLENMTSAERITILQEKLQEIRKHYLSLKSEVASIDRRRKRLKKKERESAATSSSSSSPSSSSITAAVMLTLAEPSMSSASQNGMSVECR

SEQ ID NO: 15121 - DNA, 3764 bp, Homo sapiens
  CDS (253)..(1095)
gagcagaatgcaaaccacccacaccggattgaaatacagaacatttttgaggaagcccagtccctcgtgagagagaaaattgtgccattttataatggaggcaactgcgtaactgatgagtttgaagaaggcatccaagatatcattctgaggctgacacatgttaaaactggaggaaaaatctccttgcggaaagcaaggtatcacactttaaccaaaatctgtgcggtgcaagagataatcgaagactgcatgaaaaagcagccttccctgccgctttccgaggatgcacatccttccgttgccaaaatcaacttcgtgatgtgtgaggtgaacaaggcccgaggggtcctgattgcacttctgatgggtgtgaacaacaatgagacctgcaggcacttatcctgtgtgctctcggggctgatcgctgacctggatgctctagatgtgtgcggccggacagaaatcaggaattatcggagggaggtagtagaagatatcaacaaattattgaaatatctggatttggaagaggaagcagacacaactaaagcatttgacctgagacagaatcattccattttaaaaatagaaaaggtcctcaagagaatgagagaaataaaaaatgaacttctccaagcacaaaacccttctgaattgtacctgagctccaaaacagaattgcagggtttaattggacagttggatgaggtaagtcttgaaaaaaacccctgcatccgggaagccaggagaagagcagtgatcgaggtgcaaactctgatcacatatattgacttgaaggaggcccttgagaaaagaaagctgtttgcttgtgaggagcacccatcccataaagccgtctggaacgtccttggaaacttgtctgagatccagggagaagttctttcatttgatggaaatcgaaccgataagaactacatccggctggaagagctgctcaccaagcagctgctagccctggatgctgttgatccgcagggagaagagaagtgtaaggctgccaggaaacaagctgtgaggcttgcgcagaatattctcagctatctcgacctgaaatctgatgaatgggagtactgaaataccagagatctcacttttgatactgttttgcacttcatatgtgcttctatgtatagagagctttcagttcattgatttatacgtgcatatttcagtctcagtttttatgattgaagcaaattctattcagtatctgctgcttttgatgttgcaagacaaatatcattacagcacgttaacttttccattcggatcattatctgtatgatgtggtgtggtttgtttggtttgtccttttttttgcgtttttaatcagaaaacgaaatagaggcagcttttgtagattttaaatgggttgtgcaagcattaaaatgcaggtctttcagaatctagaactaggcataaccttacataatactaggaaaattatgagaaaggggaaatttttggttaaataagagtaaggttcaaacacaagcagtacatgttctgtttcattatgctcgatagaaggcttttttttcacttataaggcctgattggtcctacccagcttaacggggtggggtttttttgtttgttcagacagtctgttcttttgtaaacatttttagttggaaaaacagcatctgcattttccccatcctctacgttttagagaggaatcttgtttttgtgtgcaacataagaaaattatgaaaactaatagccaaaaaacctttgagattgcattaaagagaagggataaaggaccagcaataataccttgtaagttgcttttgtttgtaaaatctgagcttatagttttcctcagtgagtaaattcataaggatgggaacatttaaattaagttaatgggcctttaaaaaaaaaaaaggaaacactcatacctgtagttggaggatgaatactggagacgggttaccaatgtcaggttatactaaaactaaatcagaaagtctgaatgtagcacataatggttctcttctgttgtccaaggctgtaaaatggacagccttgtcacacctccccggtgctgttttacaacgtgagggtagacgctgtcagtaacccagagggaccaggccttcctaggttttctaggcagtcagctgttaaccactcacttagtaaatgtcataactacacctgctccaggaccaatcagtgaaacctgctcggaattaaaggcttcctctgggtgcctgctgaacaactgagctcatgtcatgggcatgtggtggtttctctgttgcctgaaagagccattaaagtcagtcgtgcgtgaagcatctctcttctaaaggatgtgtatttccataaatgctttctgaggatccggtacaaaatgatttcccaaagttctgaagtgccttgagaacatgtgggtccgagtgttataacagactcctcccccgggtcaccttttgcctggtcatcctgttagagtacatctttggaaatccagggtaatattctctttcagagatgctcattgtgtaactctgtgtagggagatagtcactttaaacagctcaaagtagctagctaaaggagtagccttaaatacctaaaagatgacagaagcatagcccttaacaaatcttcagcttgtctctcagtatttcccaatcatgaaaatcccttgctatgtctttcctactagaaatgttctagaatcgctggacggtggggtcagagggcagtcggtatttaggccgtgagcttcccatactactgcaggtccaactcctggcaaccgcgggctcaaggcaggtcattggaatccacgttttggccacagtagttgtaggattgcttttctgtatcataattttagaatgctcttaaaatcttgaggaagagtttttattttttatttatttttgagatggagtctctgttgcccaggctgcagtgcagtggtgccatctcagctcactgcaacctccacctcccaggttcaagcgattctcctgcctcagccacctgagtagctgggagtacaggcatgtggcaccatgcctggctaatttttgtatttttaatagagttgagatttcaccatgatggtcaggctggtctcgaactcctgacctcgtgatccgcccgcctcggccccccaaagtgctgggattaacgggtgtgagccacggcgcccagcccaggaagagtttttaaattagagctctgtttaattataccactgggaaatcatggttacgcttcaggcatattcttccccagagtactacttacattttaaatttcattttgtaaagttaaatgtcagcattccctttaaaagtgtccattgttctttgaaagtagacgtttcagtcattcttttcaaacaagtgtttgtgtaccttttgccaagctgtgggcatcgtgtgtgagtacagggtgctcagctcttccaccgtcattttgaattgttcacatgggtaattggtcatggaaatgatcagattgaccttgattgactgtcaggcatggctttgtttctggtttcaatctgttctcgttccttgtaccggattattctactcctgcaatgaaccctgttgacaccggatttagctcttgtcggccttcgtggggagctgtttgtgttaatatgagctactgcacgtaattcttaaactgggcttgtcacattgtattgtatttttgtgatctgtaatgaaaagaatctgtactgcaagtaaaacctactcccc

SEQ ID NO: 15122 - protein, 281 aa, Homo sapiens
MKKQPSLPLSEDAHPSVAKINFVMCEVNKARGVLIALLMGVNNNETCRHLSCVLSGLIADLDALDVCGRTEIRNYRREVVEDINKLLKYLDLEEEADTTKAFDLRQNHSILKIEKVLKRMREIKNELLQAQNPSELYLSSKTELQGLIGQLDEVSLEKNPCIREARRRAVIEVQTLITYIDLKEALEKRKLFACEEHPSHKAVWNVLGNLSEIQGEVLSFDGNRTDKNYIRLEELLTKQLLALDAVDPQGEEKCKAARKQAVRLAQNILSYLDLKSDEWEY

SEQ ID NO: 15123 - DNA, 2980 bp, Homo sapiens
  CDS (12)..(2891)
gtaaatatgttatggtggtctataaacgtgaaccagctgtggagagggtaatagaatttgcagcaaagtttgttacctcatttcaccaatcagatatggaagatgatgaggaagaggaagatggtggccttttaaattatttgtttacttttctcttaaagtctcatgaagcaaacagcaatgcagtgagatttagagtgtgcctgctcataaacaagcttttgggaagtatgccagaaaatgctcagattgatgatgatgtgtttgataaaattaataaagccatgcttattagattgaaagataagattccaaatgtgagaatacaggcagttctggcgctttcacgacttcaggatcccaaggatgatgaatgcccagtggttaatgcatatgctactttgattgaaaatgattcaaatccagaagttagacgggcagtgttatcatgtattgcaccatcagcaaagactttgccaaaaattgtagggcgcaccaaggatgtgaaagaggctgtcagaaagctggcttatcaggttttagctgaaaaggttcatatgagagctatgtccattgctcagagagtaatgctccttcaacaaggtcttaatgacagatcagacgctgtgaaacaagctatgcagaagcatcttcttcaaggctggttacggttctctgaaggaaatatcttagagttgctccatcggttggatgtagaaaattcttctgaagtggcagtctctgttctcaatgccttgttttcaataactcctctcagtgaactggtgggactctgtaaaaacaatgatggcaggaaattgattccagtggaaacattaactcctgaaattgctttgtattggtgtgccctttgtgaatatttgaaatcaaaaggagatgaaggtgaagaatttttagagcagattttgccagagcctgtagtatatgcagactatttattgagttacatccagagcattccagttgttaatgaagaacacagaggtgatttttcctatattggaaatttgatgacaaaagaattcataggtcaacaattgattctaattattaagtctttggataccagtgaagaaggaggaagaaaaaaactgctggctgttttacaggagattcttattttacccacaatcccaatatccctggtttcttttcttgttgaaagactactccacatcattatagatgataataagagaacacaaattgttacagaaattatctcagagattcgggcgcccattgttactgttggtgttaataacgatccagctgatgtgagaaagaaagaactcaagatggctgaaataaaagttaagcttatcgaagccaaagaagctttggaaaattgcattaccttacaggattttaatcgggcatcagaattaaaagaagaaataaaagcattagaagatgccagaataaaccttttgaaagagacagagcaacttgaaattaaagaagtccacatagagaagaatgatgctgaaacattgcagaaatgtcttattttatgctatgaactgttgaagcagatgtccatttcaacaggcttaagtgcaaccatgaatggaatcatcgaatctttgattcttcctggaataataagtattcatcctgttgtaagaaacctggctgttttatgcttgggatgctgtggactacagaatcaggattttgcaaggaaacacttcgtattactattgcaggttttgcaaattgatgatgtcacaataaaaataagtgctttaaaggcaatctttgaccaactgatgacgttcgggattgaaccatttaaaactaaaaaaatcaaaacacttcattgtgaaggtacagaaataaacagtgatgatgagcaagaatcaaaagaagttgaagagactgctacagctaagaatgttctgaaactcctttctgatttcttagatagtgaggtatctgaacttaggactggagctgcagaaggactagccaagctgatgttctctgggcttttggtcagcagcaggattctttctcgtcttattttgttatggtacaatcctgtgactgaagaggatgttcaacttcgacattgcctaggcgtgttcttccccgtgtttgcttatgcaagcaggactaatcaggaatgctttgaagaagcttttcttccaaccctgcaaacactggccaatgcccctgcatcttctcctttagctgaaattgatatcacaaatgttgctgagttacttgtagatttgacaagaccaagtggattaaatcctcaggccaagacttcccaagattatcaggccttaacagtacatgacaatttggctatgaaaatttgcaatgagatcttaacaagtccgtgctcgccagaaattcgagtctatacaaaagccttgagttctttagaactcagtagccatcttgcaaaagatcttctggttctattgaatgagattctggagcaagtaaaagataggacatgtctgagagctttggagaaaatcaagattcagttagaaaaaggaaataaagaatttggtgaccaagctgaagcagcacaggatgccaccttgactacaactactttccaaaatgaagatgaaaagaataaagaagtatatatgactccactcaggggtgtaaaagcaacccaagcatcaaagtctactcagctaaagactaacagaggacagagaaaagtgacagtttcagctaggacgaacaggaggtgtcagactgctgaagccgactctgaaagtgatcatgaagttccagaaccagaatcagaaatgaagatgagactaccaagacgagccaaaaccgcagcactagaaaaaagtaaacttaaccttgcccaatttctcaatgaagatctaagttaggaaagacgatggaggtggaatcctttaagattatgtccagttatttgctttaataaagaagaagttacccttgtcaaaatcagaac

SEQ ID NO: 15124 - protein, 960 aa, Homo sapiens
MVVYKREPAVERVIEFAAKFVTSFHQSDMEDDEEEEDGGLLNYLFTFLLKSHEANSNAVRFRVCLLINKLLGSMPENAQIDDDVFDKINKAMLIRLKDKIPNVRIQAVLALSRLQDPKDDECPVVNAYATLIENDSNPEVRRAVLSCIAPSAKTLPKIVGRTKDVKEAVRKLAYQVLAEKVHMRAMSIAQRVMLLQQGLNDRSDAVKQAMQKHLLQGWLRFSEGNILELLHRLDVENSSEVAVSVLNALFSITPLSELVGLCKNNDGRKLIPVETLTPEIALYWCALCEYLKSKGDEGEEFLEQILPEPVVYADYLLSYIQSIPVVNEEHRGDFSYIGNLMTKEFIGQQLILIIKSLDTSEEGGRKKLLAVLQEILILPTIPISLVSFLVERLLHIIIDDNKRTQIVTEIISEIRAPIVTVGVNNDPADVRKKELKMAEIKVKLIEAKEALENCITLQDFNRASELKEEIKALEDARINLLKETEQLEIKEVHIEKNDAETLQKCLILCYELLKQMSISTGLSATMNGIIESLILPGIISIHPVVRNLAVLCLGCCGLQNQDFARKHFVLLLQVLQIDDVTIKISALKAIFDQLMTFGIEPFKTKKIKTLHCEGTEINSDDEQESKEVEETATAKNVLKLLSDFLDSEVSELRTGAAEGLAKLMFSGLLVSSRILSRLILLWYNPVTEEDVQLRHCLGVFFPVFAYASRTNQECFEEAFLPTLQTLANAPASSPLAEIDITNVAELLVDLTRPSGLNPQAKTSQDYQALTVHDNLAMKICNEILTSPCSPEIRVYTKALSSLELSSHLAKDLLVLLNEILEQVKDRTCLRALEKIKIQLEKGNKEFGDQAEAAQDATLTTTTFQNEDEKNKEVYMTPLRGVKATQASKSTQLKTNRGQRKVTVSARTNRRCQTAEADSESDHEVPEPESEMKMRLPRRAKTAALEKSKLNLAQFLNEDLS

SEQ ID NO: 15125 - DNA, 2415 bp, Homo sapiens
  CDS (53)..(880)
gttactcacattttgtgtggaacatcacacatatcacataaaaaactatattatgaacaaggacttgctaagaagagtcttggtcttgatgaattcaaagcacacttttctggccttgtgtgcccttcgctttatgaggcggataattggacttaaagatgaattttataatcgttacatcaccaagggaaatctttttgagccagttataaatgcacttctggataatggaactcggtataatctgttgaattcagctgttattgagttgtttgaatttataagagtggaagatatcaagtctcttactgcccatatagttgaaaacttttataaagcacttgaatcgattgaatatgttcagacattcaaaggattgaagactaaatatgagcaagaaaaagacagacaaaatcagaaactgaacagtaacagatttcgcagagatgcaaaagccttggaagaggatgaagaaatgtggtttaatgaagatgaagaagaggaaggaaaagcagttgtggcaccagtggaaaaacctaagccagaagatgattttccagataattatgaaaagtttatggagactaaaaaagcaaaagaaagtgaagacaaggaaaaccttcccaaaaggacatctcctggtggcttcaaatttactttctcccactctgccagtgctgctaatggaacaaacagtaaatctgtagtggctcagataccaccagcaacttctaatggatcctcttccgaaaccacaaacttgcctacgtcagtaacagccaccaagggaagtttggttggcttagtggattatccagatgatgaagaggaagatgaagaagaagaatcgtcccccaggaaaagacctcgtcttggctcataaaatatttattaggggaccctcaacatgtggtcttacaatgctgcaactgttcagtgagctgaaaatctgaatcagaaagctttctcaattgaacttataaaatatacaaggagtagcaaaagacagtatatcagctaagagagtttagttctaataaaaatcaggcttcccaggaacttgattgcttgctagtaattaaggggtttgccttttaggctgtcaaaacaaacattagtaaccagaacctgggagatagcttctcagcaaggaaaagtcacaggtttggggacggtttaggggaggggaaaaggttgatataataatgcagggttgctcctcggggtgtcgatctagaaacaattttacagaacttcagttgtaaactcaataacattacttgtataatggtgctggccatgttgttgttttaatcagttgcctctttttaaaagaaatttttatggaaaacacattcaactatcattaaaaaaatgaagttaagctgttgggaccatttctttaagatttaacaaaagttcagccttttaggtagttgaagggaagtacaccccgtattcagcacatgttgagttttctacaccaggaattttcaatatgtatattgatgaaaacaagctcaattcaaactggacagttttaagataatgttaaaatcagcacttttagagacaacgaaggccaagaatcagtacagtagtattccaaaatgattttctctagaaatttgaaagtagatcgaacggaatgttgtcaaccgcctaccagtacaatcttttgtggaagatactttgaaatcactttctactttgttagtaaagttctgtctttccagagctgcaagttttaaagtgttacttatacagaccaaccaagaatagtgctgaattaagtggcatttagtatctagaagccattttgatccaagaagctacttaagtgtcaaagtcagcatgcagcacatgtagcttttctgtaaacaagggtgtgatatgaaagctgcttttttaagaagagtaaaagcacattccatatacgtaagtgaattttaaaaataaattgaggcaaacagttaagttttatttttagagcaacaagttaactgtaaatattttaatgttagtttgctcatctatgatctgagatcatgccgaagtgagaaaaatctccccaaaatacaatttaatgcattgggaaaaaaaaactttaacagtaattccagccacaatctttagatcacccttgtaatgtgttacgggtccatttttcctggaatcgtttaatctaaagcagtttcccctgttctggagattttgtagttaattttaattttggctattgtttggaaaagatgagctgtctgtgtagatatgaagtatagttttttccataaaacagatgtttattttgtattaaaaaataccactgtacttgttttacaccatttgtatacatgtggtgatattaatgctaaactgtaaaattcaggaattaaaatgtgaccctgtaattcc

SEQ ID NO: 15126 - protein, 276 aa, Homo sapiens [sequence omitted]

SEQ ID NO: 15127 - DNA, 2744 bp, Homo sapiens
  CDS (64)..(2619)
aaactttatgaggcagctgtgaagaaagttcccaatagtgaggagtatcactctcacctcttcatggcctatgccagagtgggtgaatacaagaaaatgcaacaggctggcatggctctatataagattgtccccaaaaatccctactacttttggtctgtgatgagcttaattatgcaatctatatcggcacaggatgaaaacctctcaaaaacaatgtttctgccccttgctgagagaatggtcgaaaaaatggtgaaagaggacaagatagaagctgaggctgaagttgaactttattatatgaccctggaacgtttgggaaagtaccaggaggccttggatgtcatcagagggaaattaggagagaagttgacaagtgagattcagagtcgggaaaataaatgcatggctatgtacaagaagctgagcaggtggccagagtgcaatgccctttcccggcgcctcttactaaaaaactcagatgactggcagttctatctgacttatttcgattctgtctttcgactgattgaagaggcctggagtcctcctgctgaaggtgaacactctttagaaggagaagtacattattctgcagaaaaagctgtgaagtttatagaagatcggataacggaagaatctaaaagttctcgccatctccgaggaccacatctagctaaattggagctgattaggcgtttacgaagtcaaggttgtaacgatgagtacaaactgggtgatccagaagaattaatgttccagtattttaaaaagtttggcgataaaccttgttgttttacagaccttaaggtgtttgttgacctcttacctgctacacagtgtacaaaatttattaatcagttacttggagttgttcctttgtcgacaccaacagaggataagctggcactgcctgctgacatcagagctctgcagcaacatttgtgtgtggtgcagctgacgaggttacttggcttgtaccacaccatggataaaaatcagaaattgagtgtggtcagagaattgatgttaaggtaccagcatggactggaatttgggaaaacctgtttgaaaacagaattgcaattttctgactcttactgtctccttgctgtccatgcgcttattgatgtatggagggaaacaggtgatgagaccactgtgtggcaggccctgactttgctggaagagggattaacccatagcccttccaatgctcagttcaaattgctgcttgttcgaatctactgtatgctgggtgcatttgaaccagtggtggatctttactccagcctcgatgctaagcatatccagcatgataccattggttatcttttgacccgatatgctgaatctctaggtcagtatgctgctgcgtcccaatcctgtaacttcgcactcaggttttttcactccaaccagaaagatacctcagaatatattattcaagcttacaaatatggtgcatttgagaagatcccagagtttatcgcttttaggaacaggctgaataattctcttcattttgcacaagtccgtactgaacggatgctgttagaccttctacttgaagcaaatatatcaaccagtttagcagaaagtataaagtcaatgaaccttaggccagaagaagatgacattccatgggaagatttgcgagacaacagagacttaaatgtttttttcagctgggatccaaaagacagggacgttactgaagaacataagaaactttccttagaggaggagaccttgtggttaagaatccgatccttaacattgaggctgataagtggacttccaagtctcaaccaccctgtggagccaaagaactcggagaagactgccgagaatggggtatcctcccggattgatattcttcgtttgctccttcaacagctggaggcaaccctggagacaggaaagcgatttattgagaaggatattcagtatcctttccttggtcctgtacctaccagaatgggtggattctttaattctggctgttctcagtgccagataagctctttttatcttgtcaatgatatttatgagctggataccagtggtttagaggatacaatggagattcaggaacgaatagaaaatagttttaagtctttactagaccagctaaaagatgtcttcagtaaatgtaaaggtgacctcttagaagttaaagatggtaacttgaaaacacatcctactcttttagaaaatctagttttctttgttgagactatttctgttatcctttgggtatccagttactgtgagagtgtcctacgaccatacaaactaaatttacagaaaaagaaaaagaagaaaaaagaaaccagcatcatcatgccacctgtctttaccagtttccaagactatgttactgggcttcagactttaatttccaatgttgtggatcatattaaagggcttgaaacacatctaattgcacttaaacttgaagaacttattttagaagacacttctctctcaccggaagagagaaaattttcaaagactgtgcaagggaaggtgcagagcagttatctgcactcacttctggaaatgggggagctgctgaaaaaaagacttgagaccacaaagaaactaaaaatttaaggaagtatctatcatgggcactgatgactctgcaacagaatatgacaccatcttcccaggcaaaagcaacatctggttgaccatgattttaatccagaacttcctcataaaatgcatgaagg

SEQ ID NO: 15128 - protein, 852 aa, Homo sapiens
MAYARVGEYKKMQQAGMALYKIVPKNPYYFWSVMSLIMQSISAQDENLSKTMFLPLAERMVEKMVKEDKIEAEAEVELYYMTLERLGKYQEALDVIRGKLGEKLTSEIQSRENKCMAMYKKLSRWPECNALSRRLLLKNSDDWQFYLTYFDSVFRLIEEAWSPPAEGEHSLEGEVHYSAEKAVKFIEDRITEESKSSRHLRGPHLAKLELIRRLRSQGCNDEYKLGDPEELMFQYFKKFGDKPCCFTDLKVFVDLLPATQCTKFINQLLGVVPLSTPTEDKLALPADIRALQQHLCVVQLTRLLGLYHTMDKNQKLSVVRELMLRYQHGLEFGKTCLKTELQFSDSYCLLAVHALIDVWRETGDETTVWQALTLLEEGLTHSPSNAQFKLLLVRIYCMLGAFEPVVDLYSSLDAKHIQHDTIGYLLTRYAESLGQYAAASQSCNFALRFFHSNQKDTSEYIIQAYKYGAFEKIPEFIAFRNRLNNSLHFAQVRTERMLLDLLLEANISTSLAESIKSMNLRPEEDDIPWEDLRDNRDLNVFFSWDPKDRDVTEEHKKLSLEEETLWLRIRSLTLRLISGLPSLNHPVEPKNSEKTAENGVSSRIDILRLLLQQLEATLETGKRFIEKDIQYPFLGPVPTRMGGFFNSGCSQCQISSFYLVNDIYELDTSGLEDTMEIQERIENSFKSLLDQLKDVFSKCKGDLLEVKDGNLKTHPTLLENLVFFVETISVILWVSSYCESVLRPYKLNLQKKKKKKKETSIIMPPVFTSFQDYVTGLQTLISNVVDHIKGLETHLIALKLEELILEDTSLSPEERKFSKTVQGKVQSSYLHSLLEMGELLKKRLETTKKLKI

SEQ ID NO: 15129 - DNA, 2182 bp, Homo sapiens
atgtaaatggctctagagttagagtgactgtttgctcttctgctttctggaatgcagatgacagtatggaaagaaagaataatgattctatctaataggaaaggatttcttctttcttttttaaagagtgggtggattttctcccttttgttttgcttttattttcatgctactaacatatcttcagaaggaaatggcaactagtagatcagtaaaattacgaaaacgatgcctgcaaaatttgaaggaatgcaattctgatttgccatttatcagggaaaactgaaagcatttttcttataactttttttctttttctttttttttggaggggggaggcagggtcttgctctgtccctcaggctggagcttagctcagtgcagcctccaactcctgggctcaagcaatcctcccactttagcctcctgagtagctgggactacaggcgtgtgccagcgcgcctggctaattttaaaatttttttgtagagacagagtctccctctgttgcccaggctggtctggaactcctagcttcaaatgatcctctcacctcggcctcccaaaatcctgggattccaggcgtcagccactgctctcggccctcttacaccattttgtttgattgtctagtccctgtttctttttctttctaatccttattcatttaagcaaaaccatacattatcttttccagtcctttcttgtattcttactgtttttttaaaataactttttgccttaatagctcattgtcactaataacttctgtgttctcccaggcagtgttataacagaagggcaatgaaaacattggacatgaccatgagtgcttcctttccttaactctaggtttgtagtctgttttaaattaggattagttcctgcattctgaaatacattggcctagaacattttatcccaggcatttttgaatagaaaacagttgcgtgcttttattgaagattgttaaaataatcaccatagtaacttgatatgttagtatttttctttttccttttagtatgtttcaagtgcagtaatcgtacttgtctatccagtttctatgtatgatacgagttgcttacacgatgcatggctaacttgttaatttagttttctccttagagactttgagacccttaagagacaagattgagaaagagccatgtggcttggctctagaaacgtcattatcattaggaccatcagattttagattaagctgctattgaattaataaaatcccaatgaagcagagttatagggatagatttatagctggcagagtggtatcaaaggagaaaaacagtgaaaaagccaatttcactggttcgttcaatccagcttgttgctaatattagttacccttgttttaatgacagagagtggctggaatctgtagctaggggaggggcaacactgttagatgtgaggaaaggaagtgccaaaaatgcctggacagatggcttgtcccaaggccaggacacacactttaaaatccaacattcacctaagcaagtaattcttaaagatcttacagaaacgcagagtcaatcaggtttataaaggaaggctgaggggagagaggaggcctgggggcctggacgaagaggcctaggacctgaagagactccagcgagtctcgggaagcccaggggacctgtcaccatctgggcacttcccaggctcaatgctcagccagagtttgctggtggacctcaggattcgaagtgtgcaacagacggagtgcgcttgctgttcagggcggccccgtgcaggagcaccagctcaccctcaggcatctcggactggagggccagcagaaggtcagcaacttactcttaaaacgattgtttcggatcatattgatctctttcctttttccttttgtcctttcactgtatgacttgaatcagttttgattctatttgtaagtgtttcttgtcgtgaggcacctgccatgtctgttgcgttttcctcggcagcgtgtagggcttcagcttcctgggttttcacccttcctgcaggcactgtggggtcctgagggccagtgggtccatttcacctcttgctgcatgatggtcagtagctgatctgttatggcattcacttccagattaattttccgtgtttgaagtatgtgcatatgtgctttacagaataaaacatctgaatttat

SEQ ID NO: 15130 - DNA, 2927 bp, Homo sapiens
  CDS (14)..(1135)
cttcgcgcacctcatggaatcccttctgcagcacctggatcgcttttccgagcttctggcggtctcaagcactacctacgtcagcacctgggaccccgccaccgtgcgccgggccttgcagtgggcgcgctacctgcgccacatccatcggcgctttggtcggcatggccccattcgcacggctctggagcggcggctgcacaaccagtggaggcaagagggcggctttgggcggggtccagttccgggattagcgaacttccaggccctcggtcactgtgacgtcctgctctctctgcgcctgctggagaaccgggccctcggggatgcagctcgttaccacctggtgcagcaactctttcccggcccgggcgtccgggacgccgatgaggagacactccaagagagcctggcccgccttgcccgccggcggtctgcggtgcacatgctgcgcttcaatggctatagagagaacccaaatctccaggaggactctctgatgaagacccaggcggagctgctgctggagcgtctgcaggaggtggggaaggccgaagcggagcgtcccgccaggtttctcagcagcctgtgggagcgcttgcctcagaacaacttcctgaaggtgatagcggtggcgctgttgcagccgcctttgtctcgtcggccccaagaagagttggaacccggcatccacaaatcacctggagaggggagccaagtgctagtccactggcttctggggaattcggaagtctttgctgccttttgtcgcgccctcccagccgggcttttgactttagtgactagccgccacccagcgctgtctcctgtctatctgggtctgctaacagactggggtcaacgtttgcactatgaccttcagaaaggcatttgggttggaactgagtcccaagatgtgccctgggaggagttgcacaataggtttcaaagcctctgtcaggcccctccacctctgaaagataaagttctaactgccctggagacctgtaaagcgcaggatggagattttgaagtacctggtcttagcatctggacagacctcttattagctcttcgtagtggtgcatttaggaaaagacaagttttgggtctcagcgcaggcctcagttctgtataggcaatgctgtgttattacttgaatatagaatatatagtttacaaaatgaaaattacaatgttctcaccaaatatatgccttcgtgtgtccaaagtataattattttagatgctaattttgaatagtttattaaacagttataaatatgcaaagtagctggcatgtagtgtcacggattttctggatagaggaagtgattggaagtattccacttaaagccatggaattagcaatagtttgctttttaatagaaggcccatttgtaagaatgttgaaaatatgtgtaccgtttaaagaaaaagcagctttaaagtgacaaacaaaataccctttttcttttagtatggtttatttttctaggttttctgtccctccctcagtagtgaagagttttctttattcctggcagtgtcaggaatattggtttgaaaagctgttggcctatctggagtttggccttgttaacctagtattctaaccagttaaccagccttagtatgcattaaaattgtattgttcagaaagtttgtttctcattttctgcaaattcttactttgaaaatgaatcaccacatagtatgtccctttaaagcattgacgcacagacaaatgtttaaagcacagtaaatacaaatatatgcctttggatactaaattaatgcttgatgataaaagaatcaaacttttttttttttgagatggagtctcgctctgtcacccagtctggagtgcagtggtgtgatcactgctcagtgcaacctctgcctcccaggatcaagcaattctgactcagcctcccaagtagctgggattacaggtgcaggccaccatgcccggctaattttttgtatttttagtagagacggggtttcaccatgctggccaggctggtctcaaacacctgaccttgtgatccgtccgccttggcctcccaaagtgctgggattacaggcgtgagccaccgcgcctggccaaaacaacattttaagtagaagatccaggttttagtgcagcttctgccgttaactaggttaataaatcacaaccttggggccacagttgccttatatgtaaatgaagtgtttagaataaaatagttaaatttccttatttttcccttggtggctgccctgtggaaacagtttagaatatttgttttgtgtgtaggaacctagttgtgttagtttacctgggtgttccacagctgatagtgattgccttgaataaattcaagggcaatttattcatttttactagggagatagacctttacagcaatcaagatatttttgtccatatccaggttagctggtaagaggatttttttggagaaaaaaaatgatatttagaaagttaatttctaattccggaatggaataaaaacaatatgagtagtgtaatcttgtagaaaaagagttgtataatcttgtagaatttctcattctgtggtacaacccaggggtaaactattattccagtagtcagtacacttttctagataaatcttgagtgaaaaccagcaatttctttttccttgtggtctgattcctttttctaatccatgaaggccatcttgtagattacatttatcattaatgcaagaataaagacaattcctcctgtcagttgcgtgaattttttttaagaaacaacccagtgaagagttctaccatagcaaggcctaatgttagctttagctttagaaaataacagtttgtgaacttacttccctatatttgcagctgtatctcacactatgatttacaataaaattgtaaagattgacaat

SEQ ID NO: 15131 - protein, 374 aa, Homo sapiens
MESLLQHLDRFSELLAVSSTTYVSTWDPATVRRALQWARYLRHIHRRFGRHGPIRTALERRLHNQWRQEGGFGRGPVPGLANFQALGHCDVLLSLRLLENRALGDAARYHLVQQLFPGPGVRDADEETLQESLARLARRRSAVHMLRFNGYRENPNLQEDSLMKTQAELLLERLQEVGKAEAERPARFLSSLWERLPQNNFLKVIAVALLQPPLSRRPQEELEPGIHKSPGEGSQVLVHWLLGNSEVFAAFCRALPAGLLTLVTSRHPALSPVYLGLLTDWGQRLHYDLQKGIWVGTESQDVPWEELHNRFQSLCQAPPPLKDKVLTALETCKAQDGDFEVPGLSIWTDLLLALRSGAFRKRQVLGLSAGLSSV

SEQ ID NO: 15132 - DNA, 2492 bp, Homo sapiens
  CDS (496)..(2007)
cgcatctgctgctgccgccgcagttgcgaatgcagcatcggcgcttagctgcctccgcggtgcagctaaggttcgtgtcgctaccccttggcccttcgctcttgttgccttaaccccgccggtggagcccgctcttctggcctgttgagcccgctccctcactgccacacagcaagttccgagaccatggattcgggcagcagcagcagcgactcggcgcccgattgctgggaccaggtggacatggaatccccggggtcggccccgagcggggatggagtctcctctgcggtggccgaggcccagcgcgagcccctcagctcggctttcagccgtaagctcaacgtcaacgccaagcccttcgtgcctaacgtacacgccgcggagttcgtgccgtccttcctgcggggcccgactcagccgcccaccctcccggccggctccggcagcaacgatgaaacctgcaccggcgcgggatacccttaaggtaaaaggatgggacggggggcacctgtggaaccttcccgagaggaaccgttagtgtcgcttgaaggttccaattcagccgttaccatggaactttcagaacctgttgtagaaaatggagaggtggaaatggccctagaagaatcatgggagcacagtaaagaagtaagtgaagccgagcctgggggtggttcctcgggagattcagggcccccagaagaaagtggccaggaaatgatggaggaaaaagaggaaataagaaaatccaaatctgtgatcgtaccctcaggtgcacctaagaaagaacacgtaaatgtagtattcattggccatgtagacgctggcaagtcaaccatcggaggacagataatgtttttgactggaatggttgacaaaagaacactggagaaatatgaaagagaagctaaggaaaaaaacagagaaacctggtatttgtcctgggccttagatacaaatcaggaggaacgagacaagggtaaaacagtcgaagtgggtcgtgcctattttgaaacagaaaggaaacatttcacaattttagatgcccctggccacaagagttttgtcccaaatatgattggtggtgcttctcaagctgatttggctgtgctggtcatctctgccaggaaaggagagtttgaaactggatttgaaaaaggtggacagacaagagaacatgcgatgttggcaaaaacggcaggggtaaaacatttaatagtgcttattaataagatggatgatcccacagtaaattggagcatcgagagatatgaagaatgtaaagaaaaactggtgccctttttgaaaaaagtaggcttcagtccaaaaaaggacattcactttatgccctgctcaggactgaccggagcaaatattaaagagcagtcagatttctgcccttggtacactggattaccatttattccgtatttggataacttgccaaacttcaacagatcaattgatggaccaataagactgccaattgtggataagtacaaagatatgggcactgtggtcctgggaaagctggaatccgggtccatttttaaaggccagcagctcgtgatgatgccaaacaagcacaatgtagaagttcttggaatactttctgatgatactgaaactgattttgtagccccaggtgaaaacctcaaaatcagactgaagggaattgaagaagaagagattcttccaggattcatactttgtgatcctagtaacctctgccattctggacgcacgtttgatgttcagatagtgattattgagcacaaatccatcatctccccaggttataatgcggtgctgcacattcatacttgtattgaggaagttgagataacagcgttaatctccttggtagacagaaaatcaggagaaaaaagtaagacacgaccccgcttcgtgaaacaagatcaagtatgcattgctcgtttaaggacagcaggaaccatctgcctcgagacgttcaaagattttcctcagatggtcgttttactttaagagatgagggtaagaccattgcaattggaaaagttctgaaattggtcccagagaaggactaagcaattttcttgatgcctctgcaagatactgtgaggagaattgacagcaaaagttcaccacctactcttatttactgcccattgattgacttttcttcatattttgcaaagagaaatttcacagcaaaaattcatgttttgtcagctttctcatgttgagatctgttatgtcactgatgaatttaccctcaagtttccttcctctgtaccactctgcttccttggacaatatcagtaatagctttgtaagtgatgtggacgtaattgcctacagtaatgaaaaattaatgtactttaatttttcattttcttttaggatatttagaccacccttgttccacgcaaaccagagtgtgtcagtgtttgtgtgtgtgttaaaatgataactaacatgtgaataaaatactccatttgaaactc

SEQ ID NO: 15133 - protein, 504 aa, Homo sapiens
MGRGAPVEPSREEPLVSLEGSNSAVTMELSEPVVENGEVEMALEESWEHSKEVSEAEPGGGSSGDSGPPEESGQEMMEEKEEIRKSKSVIVPSGAPKKEHVNVVFIGHVDAGKSTIGGQIMFLTGMVDKRTLEKYEREAKEKNRETWYLSWALDTNQEERDKGKTVEVGRAYFETERKHFTILDAPGHKSFVPNMIGGASQADLAVLVISARKGEFETGFEKGGQTREHAMLAKTAGVKHLIVLINKMDDPTVNWSIERYEECKEKLVPFLKKVGFSPKKDIHFMPCSGLTGANIKEQSDFCPWYTGLPFIPYLDNLPNFNRSIDGPIRLPIVDKYKDMGTVVLGKLESGSIFKGQQLVMMPNKHNVEVLGILSDDTETDFVAPGENLKIRLKGIEEEEILPGFILCDPSNLCHSGRTFDVQIVIIEHKSIISPGYNAVLHIHTCIEEVEITALISLVDRKSGEKSKTRPRFVKQDQVCIARLRTAGTICLETFKDFPQMVVLL

SEQ ID NO: 15134 - DNA, 2402 bp, Homo sapiens
  CDS (318)..(653)
atgttctgtcgtctctcgcagtttacgcggaagattcagagcccgagtctgatggcgaggctggaatcgaggcggtgggcagcgcggctgaggagaaaggcggattggtatctgatgcctatggggaggatgacttttctcgtctagggggtgatgaagatggttatgaagaagaagaagatgagaacagtagacagtcggaagatgacgattcagagactgaaaaacctgaggctgatgacccaaaggataatacagaagcagaaaagcgagacccccaggaactcgtggcctccttttctgaaagagctcggaacatgtcgcctgatgaaatcaagatcccgccagaaccccctggcagatgttcaaatcacttgcaagacaagatccagaagctttatgaacgaaagataaaggagggaatggatatgaactacattatccaaaggaagaaagaatttcggaaccctagcatctacgagaagctgatccagttctgtgccattgacgagcttggcaccaactacccaaaggatatgtttgatccccatggctggtctgaggactcctactatgaggcattagccaaggcccagaaaattgagatggacaaattggaaaaggccaaaaaggagcgaacaaaattgagtttgtgacgggcaccaaaaaaggcaccacgaccaacgccacgtccaccaccactaccactgccagcacagctgttgcagatgctcagaagagaaagagcaagtgggattcggctatcccagtgacaacgatagcccagcccaccatcctcaccaccacagccaccctgccagctgttgtcacggtcaccaccagcgccagcggctccaagaccaccgtcatctctgctgtgggcaccattgtgaagaaggccaagcagtgacctgaggggccaccctaggacttgaaaggaccgtgcagcccagtgaccactgcccagtgggaggcgccactttgtatatttcaggactgggacctactccccagatgccacctgagaggagcttctgtttggcattccagatggaaggacaggcagcacgggagccaggcgctgtggacagggtctgtccacgcaccacctggggtctgccgcctattaaaagtgccgtattcttacctcttggcatctcagatgcactggcctctcctgcattctgtttgcaggcaaatgcttcagctcacatgtcccccaagactcaatagtcttggttgggactattgcctcagggttgacaacagggtgatggaggcctgggacgctgttcagaggggtgacccaagaagtcaccgttgttatccgtgtatgcctctgggcatggacaggcgggagtccccgagccccacgtatgccccatctgccgccttgatcccaaaacccagccagttctcgggcgatggtggagctgtgctcccttgagtgcacttgagcactccccagaccagatcactttttggacacacccaggaaggcttttgaagtcaagccagtttccagaagggctggggtgagatcctgacctgtgcagagagtggggaggcgtcagcgcctggccagggctgccccagtcctttggtgcccggtgagcgcagccagcaggagctgagcagcgggggagatgaatcacctcctgccttggcgaggcggcagctcattgtttacaggcaagccctgctcctgggagggctcctgccaccccacccttcctctgtgtgttatctctgccccacagcagcccctgggcagcaccagtggccactgggctccccccggggttgaaacgggtttcccagaccaggggttcagaggagactatttacccttcatgatctttggcgattctccactggagcggaagggctgtgtgtcaaaagaaggaagccaggctgtgaagggccgtgttgctttcagtgggtgggcagaggtttagaaaggtggttctgaaatggcacctggtactcttgtgggacctggggaatataaggaactctgtgcatgaggtttcaaaaataaaaattgagtccactctccccgtacacacacactcgggcacttcaggaggtcagttctcaccccttcctcgatggggctttaaagctctggggagaagagctgctccccactcatgccccagagggactgtgaaaaggcttcctgtgacctccgatggcggcccctcattggccaagggcactgtggatgttttgtgggaggcagcatggcaccgtggaaagggcagtagacgtggagccggcacctctggtctggattccacttaaaaccagttgagtggtctcaagcccttaacctctgtaagcctgtttcttctctgaaatcacagtaataaagcgtcgtaagatggttgggaagaacc

SEQ ID NO: 15135 - protein, 112 aa, Homo sapiens
MSPDEIKIPPEPPGRCSNHLQDKIQKLYERKIKEGMDMNYIIQRKKEFRNPSIYEKLIQFCAIDELGTNYPKDMFDPHGWSEDSYYEALAKAQKIEMDKLEKAKKERTKLSL

SEQ ID NO: 15136 - DNA, 2459 bp, Homo sapiens
  CDS (693)..(1412)
aaaaaaaaaaaaaaaaaaaaaaaaaaaaaaagttcctgggagaagccgggctgcctcacgaggcactaggaactacatttcccggaaagtactaaatttaagaatgtttggacaactcattccaggtcacctatagcctatgagagaggaagaatatattttgacaattatcggcgctgtgtcagcagtgttgcatctgagccaagaaaactttatgaaatgccaaaatgttccaaatcagaaaaaatagaggatgctttattatgggaatgcccagtgggagatatacttcccaattcatcagattataagtcctcactcatagcactgactgctcataattggctacttcgtatatcagcaactacgggaaaaatccttgagaaaatatatcttgcaccttattgcaaattcagatacttgagctgggacactcctcaagaagtcattgcagttaagtcagctcagaacagaggctcagcagtggcccggcaggcaggcattcaacaacatgttttgctgtaccttgcagtgttccgagttctacctttttcacttgtagggattctagagatcaacaaaaagatttttgggaacgttacagatgctaccttgtctcatggaatactgattgtgatgtacagctcaggactggtcagactctatagcttccaaaccatcgctgaacagacatgccaccactgctctttgaggtgtcatccctggagaatgcttttcagattggaggccatccttggcactacatcgtcacacctaataagaagaaacagaaaggagttttccatatttgtgccctaaaagacaattccctggcaaaaaatgggatccaggaaatggattgttgttctctagaatctgactggatctatttccatcctgatgcttctggtagaataatacatgttggtccaaatcaagtcaaagttttgaagctaactgaaatagaaaataatagttctcagcatcagatctctgaagattttgtcattttggccaacagggagaaccataaaaatgaaaatgtactcactgttacagcttctggacgggtggtaaaaaaaagttttaaccttctggatgatgacccagaacaagagactttcaaaattgtggactatgaagatgagttagatttgctttctgtggtagctgttactcaaatagatgctgaaggaaaagctcacctggatttccactgtaatgaatatggaactttacttaaaagcattccactagtggagtcatgggatgtgacatatagccatgaagtctactttgacagagacttggtgctacacatagagcagaaacccaacagagtcttcagctgctatgtttaccatatgatatgtgacactggggaagaagaagaaaccataaacagaagctgttaaaaagagtgagataattgtaacctaagagacttttagccaaacaccccagcagctgcgtccaatccattttattatctgcatggcacattctccagtattttccaaaaaagtcttgtgttgacttcagatgactatgacttcttttttaaactcttgctgtaaaagatggtgaggacttcattttttttaaaggttttttagaatactgttccaagaagtttagtgttttgcagctttgagctaggtggtaatgcaaatataaaatgctgggaacagaaaaggacaggttaattccaattgttgaggagttaagtcattgatggggtgggtcattgatgagttcttaaaggatggtatggaattttgtttgttaaggctaggaaagacagggagagacaaaagtaaacatgcagaaagaaatcttatatcctctataccaaactttgcttaaggatgagaaatgagatgtgttatgtgagaacattattttgagcccaaaatgtgtcatcacagtttttaaaaatcttatatatgtatttatatgtgtttcgtatttgtatatagtatcaagaattggttctagttcccaaattatcttttcttccttggttttgttctcttggcttgatgttcacattggatatttgtgtttctatataggctaatgtaaaagatgccaagcaaaccttaagtgaaattgttttctgatttgcatcctgtttagctcttaatgtatctaaggatgttctcatctcaccattctactcatttagtgagttttctgatcttgtttaggcaatatttgcatacttatgcaataagataaaggtacccttgcctgcagtagttctgtttcctgtagaaaagtggataaagagtcccagaagaagttcttactagcttgggagttacctgattaaccagagaaaatttttggcttacttatggaacaagcattatttcttctttgttaggaaagatctaaatatggtccttgacttttaataatcattctttagaatgttaaataaaggcaacccaagt

SEQ ID NO: 15137 - protein, 240 aa, Homo sapiens
MPPLLFEVSSLENAFQIGGHPWHYIVTPNKKKQKGVFHICALKDNSLAKNGIQEMDCCSLESDWIYFHPDASGRIIHVGPNQVKVLKLTEIENNSSQHQISEDFVILANRENHKNENVLTVTASGRVVKKSFNLLDDDPEQETFKIVDYEDELDLLSVVAVTQIDAEGKAHLDFHCNEYGTLLKSIPLVESWDVTYSHEVYFDRDLVLHIEQKPNRVFSCYVYHMICDTGEEEETINRSC

SEQ ID NO: 15138 - DNA, 2555 bp, Homo sapiens
  CDS (113)..(1225)
gcgcccagcctgccagccgcgctgctgctgctcctcctgctgtgggaccgctgaccgcgcggctgctccgctctccccgctccaagcgccgatctgggcacccgccaccagcatggacgctcgccgcgtgccgcagaaagatctcagagtaaagaagaacttaaagaaattcagatatgtgaagttgatttccatggaaacctcgtcatcctctgatgacagttgtgacagctttgcttctgataattttgcaaacacgaggctgcagtcagttcgggaaggctgtaggacccgcagccagtgcaggcactctggacctctcagggtggcgatgaagtttccagcgcggagtaccaggggagcaaccaacaaaaaagcagagtcccgccagccctcagagaattctgtgactgattccaactccgattcagaagatgaaagtggaatgaattttttggagaaaagggctttaaatataaagcaaaacaaagcaatgcttgcaaaactcatgtctgaattagaaagcttccctggctcgttccgtggaagacatcccctcccaggctccgactcacaatcaaggagaccgcgaaggcgtacattcccgggtgttgcttccaggagaaaccctgaacggagagctcgtcctcttaccaggtcaaggtcccggatcctcgggtcccttgacgctctacccatggaggaggaggaggaagaggataagtacatgttggtgagaaagaggaagaccgtggatggctacatgaatgaagatgacctgcccagaagccgtcgctccagatcatccgtgacccttccgcatataattcgcccagtggaagaaattacagaggaggagttggagaacgtctgcagcaattctcgagagaagatatataaccgttcactgggctctacttgtcatcaatgccgtcagaagactattgataccaaaacaaactgcagaaacccagactgctggggcgttcgaggccagttctgtggcccctgccttcgaaaccgttatggtgaagaggtcagggatgctctgctggatccgaactggcattgcccgccttgtcgaggaatctgcaactgcagtttctgccggcagcgagatggacggtgtgcgactggggtccttgtgtatttagccaaatatcatggctttgggaatgtgcatgcctacttgaaaagcctgaaacaggaatttgaaatgcaagcataatatctggaaaatttgctgcctgccttctacttctcaaatctttcttgtaaaagtttccaattttttcactgaaacctgagttaaaaatcttgatgatcagcctgtttcataagaaactccaatcaagttaatcttagcagacatgtgtttctggagcatcacagaaggtatattgctagttacactttgccctcctgcagtttcttctctgctcccaacccccatctcatagcatccccctctatttccaatgctcctctccaaccgcttagtttctgaatttcttttaaattacagttttatgaaagcatattttatttacttggtgttgaaatagccctcataaaacctaagcacttggaaacacaataatagtattaactaactagatctattgaatttcagagaagagccttctaacttgtttacacaaaaacgagtatgatttagcattcatactagttgaaatttttaatagaatcaaggcacaaaagtcttaaaaccatgtggaaaaattaggtaattattgcagattgatgtctctcaatcccatgtattgcgcttatgttacaagttgttgtcacagttgagacttaatttctcctaatttcttctgcccgaagggtaagtggtgcgtccagcttacacaatcataattcaaaggttggtgggcaatgtaatacttaattaaaataatgatggaagagctatctggagattatgagtaagctgatttgaattttcagtataaaactttagtataattgtagtttgcaaagtttatttcagttcacatgtaaggtattgcaaataaattcttggacaattttgtatggaaacttgatattaaaaactagtctgtggttctttgcagtttcttgtaaatttataaaccaggcacaaggttcaagtttagattttaagcacttttataacaatgataagtgcctttttggagatgtaacttttagcagtttgttaacctgacatctctgccagtctagtttctgggcaggtttcctgtgtcagtattccccctcctctttgcattaatcaaggtatttggtagaggtggaatctaagtgtttgtatgtccaatttacttgcatatgtaaaccattgctgtgccattcaatgtttgatgcataattggaccttgaatcgataagtgtaaatacagcttttgatctgtaatgcttttatacaaaagtttattttaataataaaatgtttgttctaacttgtctgcttttttaaaaataatcttactgtacttaattctaattttttcctcatatttaaataaaaggccatttccaccttttct

SEQ ID NO: 15139 - protein, 371 aa, Homo sapiens
MDARRVPQKDLRVKKNLKKFRYVKLISMETSSSSDDSCDSFASDNFANTRLQSVREGCRTRSQCRHSGPLRVAMKFPARSTRGATNKKAESRQPSENSVTDSNSDSEDESGMNFLEKRALNIKQNKAMLAKLMSELESFPGSFRGRHPLPGSDSQSRRPRRRTFPGVASRRNPERRARPLTRSRSRILGSLDALPMEEEEEEDKYMLVRKRKTVDGYMNEDDLPRSRRSRSSVTLPHIIRPVEEITEEELENVCSNSREKIYNRSLGSTCHQCRQKTIDTKTNCRNPDCWGVRGQFCGPCLRNRYGEEVRDALLDPNWHCPPCRGICNCSFCRQRDGRCATGVLVYLAKYHGFGNVHAYLKSLKQEFEMQA

SEQ ID NO: 15140 - DNA, 2900 bp, Homo sapiens
  CDS (157)..(2154)
ggagtttctccaccagcaacatggccgccgcctgagaggagagccgggccgccgccgtctctgcagcccgcgggtaactgggccgttgccgccgtccgcgctcggcccccgcggagagatcgagctgaaggactgcgcggctggctctcctctagtatggccaatgaagaggatgacccagttgtacaggagatcaatgtgtacttggccaagagtctggcggaaaagctgtatctatttcagtaccctgtgcgtccagcctcgatgacctacgatgacattccgcacctctcagccaagatcaagcccaagcagcagaaggtagagcttgagatggccatcgacaccctgaaccccaactattgccgcagcaaaggggagcagattgcgctgaacgtggacggggcctgcgccgacgagaccagcacgtattcctcgaagctgatggacaagcagaccttctgctcttcccagaccaccagtaacacatcccgttatgccgctgcactctacaggcaaggtgagctccacctgacacctttacatggcatcctgcagctgcggcccagcttctcctacctggataaggctgacgccgagcaccgggagagggaggcggccaatgaggcaggggactcttcacaggatgaggcggaagacgatgttaagcagatcacggtgcggttctcccggccggagtcagagcaggcccgccagcgccgtgtgcagtcctatgagttcctgcagaagaagcacgcagaggagccctgggtccacctgcattactatggcctgagggacagtcgctctgagcatgagcgtcagtacctgctgtgccccggctcaagcggggtggagaacacggagctcgtcaagtcacccagtgagtacctgatgatgctgatgccacccagccaggaggaggagaaagacaagcctgtggcccccagcaacgtcctgtcgatggcccagctgcgcacgctgcccctggccgatcagatcaagatcctgatgaagaatgtgaaggtcatgccttttgccaacttgatgagcctcctgggcccctccatcgattccgtggctgttctgcggggcatccagaaggtggcgatgttggtccaagggaactgggtggtgaagagtgacatcctataccccaaggactcgtccagccctcacagcggcgtgcctgctgaggtgctctgcaggggccgagacttcgttatgtggaagttcacgcagagccgctgggtggttaggaaagaggtggcaaccgtgaccaaactctgcgccgaggatgtgaaggacttcctggagcacatggccgtggtgaggatcaacaaaggctgggagttcattctgccttatgatggggagttcatcaagaagcacccggatgtggtccagcggcagcacatgctgtggacgggtatccaggccaaactggaaaaagtctataatcttgtaaaggaaaccatgccaaagaagccggatgcacaatcagggcctgccgggctggtctgtggggaccagcggatccaagtagccaaaaccaaggcccagcagaaccacgcgttgctggagcgggagctgcagcggcggaaggagcagctgcgggtgcctgcggtcccgcccggtgtgcggatcaaggaggagcccgtgagcgaggagggcgaggaggacgaggagcaggaggcggaggaggagcccatggacacttcccccagcggcctccacagcaagctggccaacgggctgcctctcgggcgggctgcgggcacagacagcttcaacgggcacccgccccagggctgcgccagcacccctgtggctcgggaactgaaggccttcgtggaggccacctttcagagacagtttgtgctcacgctgagcgaactcaagcgcctcttcaatctgcacttggccagcctgccccccggccacacactcttcagcggcatctcggaccgcatgctacaggacacggtgctggccgccggttgcaagcagatactggtgccttttcccccccagactgctgcttccccggatgagcagaaggtgtttgccctctgggagtctggagacatgagtgatcaggactgctgtgtaagctatggtggcatgtggtaccttaaagggacagtacagtcttgacaatagtagcaaactactaacccagcaaatctaagcccaaggaagaagggcggaaccagaagtagggcctcgacttgcttcagacgacacagagcaagaggaactgaccatctcatgacctgtggcattgcacggtgcagtggacagaagggattatcctcagccagtcacagggtcagcttaagttagttagatcactcccagaagagaccagctgggaccttctttgcagtacaatttgaaattcctgatgtattttgcttattatttggtttcattctcataataaagagtgtgtatactgacatgggcaggatgataaaaatcatggtttaatattttcttttgtaaacttaatgccaacaaggtctaagttatgtttacaacatgaagaaaacctcaaagttcttaatttttaaaatgcctagaagacaatatttagtcttggattatctatctgctaagacctccaccaatttcattaaaccaaattgaattattctattcttgggattctgtggccacttcacctttgacaacaacctactttatgtagcagtctcaactgtttacatgaaccatagcaaaaaaatcagaatcaaatccatctccttttaatgtttgcagaaagatgcaaacaaaaccaggtaagtatggaacaatgtgtaagtgaggttatcacactttgatgtaaaaatttctattttgtgtatttttaaaataaatgcaaacactaaactagc

SEQ ID NO: 15141 - protein, 666 aa, Homo sapiens [sequence omitted]

SEQ ID NO: 15142 - DNA, 2319 bp, Homo sapiens
  CDS (157)..(1293)
tttgacaactcacagtcactggatgctgctgaagaagagccctctgagagaggaacagaggaggaccctgtattctctgttgagaattcagggagggactcagatgcccttagacttgaaagtacggtggttgaggagagcaatggttctgatgagatggagaattcagatgaaaccaaaatgtcagaagaaatactggctttggtggatgaatttcaacaggcatggcctttggaaggctttgggggtgcactagagatgaaagggcggcgtctagacttacaaggaatacgggtgctgaagaaaggtccccaggatggagtggccagaagctcttgctatggagactgcagaagtgaagatgatgaagcaacagaatggattacattccaggtcaaacgtgtaaagaaacccaaaggagatcataagaaaactcctgggaaaaaagtagaaacaggtcagatagaaaatggacatcgttaccaagcaaacctagagatcactggccccaaggtggcatctcctgggccacaaggaaaaaaacgtgactaccagcgtctgggatggcccagcccggacgaatgcctcaaactccgctgggtagagctgactgccatcgtgagtacctggcttgcagtttcttcaaaaaacattgacatcacagaacacatagattttgccacccctatacagcagccagcaatggagcctctttgcaatggcaatctccccacgagtatgcataccctggaccacttgcatggggtttccaaccgagccagcctgcactacacaggggagagtcagttaacagaggtattacaaaatctcggcaaagaccaatatccacaacagtcgcttgaacagattggcacccgaattgccaaagttttggaaaagagccagacgtcctgggtcctctccagcatggcagccctctactggagggtgaaaggccaaggaaagaaggcaatcgactgcctccgccaggctctgcactatgcgccacaccagatgaaggatgtgcccctgattagcctggccaacatcttgcacaatgccaagctctggaatgacgccgtcatagtagccaccatggcagtagagatcgcaccacactttgctgtgaaccacttcactctgggcaatgtctacgtggcaatggaagaatttgaaaaagcactggtgtggtatgaatccacattgaagcttcagcccgagtttgtcccagccaagaaccgaatccagaccatccagtgtcacttaatgctgaagaagggacggcgctctccttagtgcacttcttccttctctctttctctttactcatgctctaaaaaaaaagaataagaaaagaaaccaatcattgtcagtatctactattaatgatgagtgtgaaaataactaagacttataacaggacttttacatatgtgggaattggtttgtttttgtttttacgtttctcctttcccccaaccaacctcagaagaggcaccttcagaaacacacatttcttaaaaggaaagtgcagcttcaagatattgtgtaaatactgagccaagacatttctggagctgtgctctgtctccaaaaacctcaatgcctttagggcttttctcagtggtccagctagccttctctttggaggaggatgaagccgcattgcacattctctgcttcctgtcgtagcctctgttgtcaatggaaatgcggaagcccatctggtgcccgtcagtgagaagcaacgttctgcgctctctccgttagacctccatgctgtccccagtcttgtccattccatgctgctgtgttacaaactctcagaggtagtttgcaggggaggaaggggaatatgattttaaaaacaaaatatttacaacaacaaaaattcttaggatcacctgacctttgtaatgttatttatgttggggagggaggggggctgagaaggggaaatcagcagtgtgcaacatctttataatttgtacgttaattacaaatcacaaggaaaccaataagttgaaatcctatataacaggtttatatatatagaatatgtatatttgaagccctctacagactgagtctatgttttactaattctttgttcactgtgttacccatcttggaataagttgtgaatgtcagctccctctctctgaggcctccagacttagctcctcaggagggtaatgagccaaggttgagtgtttccatacaatgcttttacctttgatcccaggagaatcagaaactccaacattttggaatcttcaagggcacatactgagaaaaaaaataaaattgtttatgagc

SEQ ID NO: 15143 - protein, 379 aa, Homo sapiens [sequence omitted]

SEQ ID NO: 15144 - DNA, 3389 bp, Homo sapiens
  CDS (78)..(1466)
agcgggcgtgcggagcgggcgacagtggcgtgggatctgcctctctgcgagcagctgggagcggcggcggcggcgccatgagcgggggcaccccttacatcggcagcaagatcagcctcatctccaaggcggagatccgctacgagggcatcctctacaccatcgacaccgaaaactccaccgtagcccttgccaaagttcgatcctttggtacagaagacagaccgacagatcgtccaataccacctcgagatgaagtctttgaatacattatattccgtgggagtgacattaaagaccttactgtttgtgagccaccaaaaccacagtgttctttgcctcaagacccagctattgttcagtcctcactaggctcatcgacttcttcattccagtccatgggttcttatggacctttcggcaggatgcccacatacagtcagttcagtccgagttccttagttgggcagcagtttggtgctgttggtgttgctggaagctctttgacatcctttggaacagaaacatcaaacagtggtaccttaccccaaagtagtgcggttggttctgcctttacacaggatacaagatctctaaaaacacagttatctcaaggtcgctcaagccctcagttagaccctttgagaaaaagcccaaccatggaacaagcagtgcagaccgcctcagcccacttacctgctccagcagctgttgggagaaggagtcctgtatcaaccaggcctttgccatctgccagccaaaaggcaggagagaatcaggagcacaggcaagctgaagtacacaaagtttcaaggccagaaaatgagcaactcagaaatgataacaagagacaagtagctccaggtgctccttcagctccaaggagagggcgtgggggtcatcggggtggcaggggaagatttggtattcggcgagatgggccaatgaaatttgagaaagactttgactttgaaagtgcaaatgcacaattcaacaaggaagagattgacagagagtttcataataaacttaaattaaaagaagataaacttgagaaacaggagaagcctgtaaatggtgaagataaaggagactcaggagttgatacccaaaacagtgaaggaaatgccgatgaagaagatccacttggacctaattgctattatgacaaaactaaatccttctttgataatatttcttgtgatgacaatagagaacggagaccaacctgggctgaagaaagaagattaaatgctgaaacatttggaatcccacttcgtccaaaccgtggccgtgggggatacagaggcagaggaggtcttggtttccgtggtggcagagggcgtggtggtggcagaggtggtaccttcactgcccctcgaggatttcgcggtggattcagaggaggtcgtgggggccgggagtttgcggattttgaatataggaaagacaacaaagttgctgcatagtctacaaacaagtctctgaaaataggtgaatttctagctcttcatggtcctgaacattgatttcagtctttgcaaagaatgaagaagtgaattcgctgtacatttgtcaccagcactgggtttttgttttttgtttgtttttccgcttaatttcaaagataaaatgcagttacttttgggggtggaaggctcatcttaaaacatgagcattaaatatatttggaatagcagaaggttaagtaatttcttatgtatagttaaactaaagcagtacttcagtgggacttaacaagtattttttcatcactgaaaggtttttttttttttatcactaaattgtatttggcaattgcaagttgcctgcagatagggccgtgatactgtgttttgagccacagaaggttgtgtgtgtgtgtgtgtgtgtgtgtgtgtgtgtgtgtgtgtgtatgtgtgtgtctttttcctcctttcttttggggaatcctgtaatatgaggtagcttatttcgtcaattaattagggtgctggatggtagagaattttgtcagtcaactatgtacacacagtaaatactgtttcttaggcaaaggtaacttttttatatagttgtaaaattccattatattccattgccaaagaaacattaagaactttgtatagctgtataaaaagcaactaattttttaaagaataaacattttaaagtcagcaaacatactgtgtccttgcagaagttgatgtgctgagcagcagccttatgggtgggtctttttttcttagttttccaggcttaacatttttgattttgttttttaatgtttggaacataaatgaagatttgatacattatttcattatctaaaaaggattaattattcatgctcattgtaagaacttcattttgtagcaaatggcatatcacaggatctgtccagataatcgatattttcagtatacaaatgtaaataatcacagatgagaatgtacttagctgtattttcaaataagtaatcttccccccttttgtaggactttaaaactaggcatcaatgaacctgtttttcctattatgcctggaatttagtcatgataccttgactcattccatcatatttcaagaggattcagagtgctagaaattattttggtagcctgtaacacacggcaacactggtccttgggcctatgatgacccacagatgactcagtatagagttcattgctaattataaattactagtgaatctttttgatattttaagctctagtgggaaaaatctggccacttttgtgtttttatgaaggccatggaataaaagggtccaaagatttaaatatttttatctaatattttgattgttttcttaactttctccttaaaacattcagtagtgataaagatatagaaactgcactgtaggagaattggaatatttaaggctggttgacattttttattttcattttatatcttttgtatagctctacaaggcagtgttttgtaatttggtttcattatgaagatccagtacttggcagccatagtttagacaatattgttcagtgctgtttgcttgcatgttaacaacaaaaccttttagaggacccacaaatcatgatattgaacacagttccgaggcattcagagcatcagagcaagtaccatggcaatacatgtgtagactgttggagatgtcccgggccaatttcaagaaagaaaactgtaaatactagttctacttgctctgaaattatgagtttatgcgttttcccagccctccgaatcactgactggggcgttttgtgccccagcaataactggcagcatggcatacctgcagtaccccttacaatattaaagcaaagtttttattctaaaacagaataaaactgttcaataaaaaatgctcgtcaaagttc

SEQ ID NO: 15145 - protein, 463 aa, Homo sapiens
MSGGTPYIGSKISLISKAEIRYEGILYTIDTENSTVALAKVRSFGTEDRPTDRPIPPRDEVFEYIIFRGSDIKDLTVCEPPKPQCSLPQDPAIVQSSLGSSTSSFQSMGSYGPFGRMPTYSQFSPSSLVGQQFGAVGVAGSSLTSFGTETSNSGTLPQSSAVGSAFTQDTRSLKTQLSQGRSSPQLDPLRKSPTMEQAVQTASAHLPAPAAVGRRSPVSTRPLPSASQKAGENQEHRQAEVHKVSRPENEQLRNDNKRQVAPGAPSAPRRGRGGHRGGRGRFGIRRDGPMKFEKDFDFESANAQFNKEEIDREFHNKLKLKEDKLEKQEKPVNGEDKGDSGVDTQNSEGNADEEDPLGPNCYYDKTKSFFDNISCDDNRERRPTWAEERRLNAETFGIPLRPNRGRGGYRGRGGLGFRGGRGRGGGRGGTFTAPRGFRGGFRGGRGGREFADFEYRKDNKVAA

SEQ ID NO: 15146 - DNA, 2190 bp, Homo sapiens
tttttttttttttttttggtttttatgtgtatttattaaaaaaagcaattacccgattaggctgacagaatgattaggctgaccattaaaaggactggcaactttatcctcagagtttagaggtaagtttgtaagaattcaggatgtttgtctaagattgcttgatactagggcaacaagactgagagcagagggcactaaaaagactgtctaggggttagacatcaattgtgtttaagtctgagatctgccccttaggtaccatatgaccctgcacaagtcatcgacccctccacactccagtgtgtcatctgtaatgaggatggggcactcccttccacactgcagcactgcgggaaccgagacaatgccatcgcagaggacctgcaggggacaggctacttcactcactcctctccttcccactcttcagagaacaaggacttgtgctactgtattctcacagcactcactggcctgggaaccagctgtgggagccctatgggcctggtcatcaactctcaactgcttgtgtgcagctgtaggaaccctctgaggtgtggcaggtagaggatggggtgggtgcccaggcacactgctgactttctggagccctgcccacccccaaccctctccttattactaatgacatgggaacccacctgctccactgtgcagccccaagtctgatccaagtcaggctcctgaatgtgaggaagccgagcatgggggcgacagggaggtgggatgcactgaaaagctctaaccattgccgctaaggcacatcagtctctgaccaggtccagcagcctccacgtacgtcccagtccttcaacacacatttactgaatgcccactgcacacaggagtgtaggtaatagcatggtatgacagtaaaattaagtaaacaactcccacttctacctttctggactacgaagagctcctcctggtcttccttatcatttcctatgtgattacttccgggtcctcttggagaacagagcattttgcctcccatgcagttttccactgcttgacagggagaaattcctcgtgacctatggtccatcggctgatctggaagctgaacccttggaataaagacacctgcatgctcggatttgcaaaaggaatggaaaagaacccttaaatatgagtaagtcgtgggagtagatatgaaacagggttataagcacatctcagtgtctaattttacagaataaatacttctattctatcgcagctcacatgtaaatccaggtaggtatgtccctatcccacttagaataaaatgaacagccaagtggccaaagtttccataactttcctccttgctgacaaatccaacccgaagtctgtgcctcctagggaaaggacaggacaaaggtacaattcagttcctaaagttatttctccctctgggagagaaaggcactgtcaaagtacaaacccaagtcagcgtgctttgaaagatcatgtcacttgtttgtaataggaaatcatgtcatccagagttttgaaagtaactgtgggggcttgtggtgggttgtcgggggcaggagtgggtgacgtatgttcagggctaggtccgtggctctggtcagggcactgccctgggtcactctgtgctggcccaggtctgctccatgcctggctgctggaaaaaccagttctcttctgacccacaaagtaatctgacggcggggcaaactcaggatctctctcagcccggagatctgactgcctcttcgaccagtatccaaaggaaaattcttttccgcggtcccactcccggatgtgtggcactccaggcttggtgtccttcctctcctggacaatgacttctactttgctactctgggcagcaggacgtggggttggcacagcctctggctccggtggcaaaggcccaataacatctccatctctattttcttcttctgttccaccttcttttgattttttcatctttttttgtcgaagtttggcaagtcttgcccctaagatagcctttcgcttttcctttatgttttctcgttttgttctctgatctgttgtctgttcacgcagcatctctaaggttttcatctgcttgtttctcaactctttgtctcgggcaaaggcaaaatacccaacaccaagttgccgggcctcattttcccgaatgtcttcataatgtacgggccc

SEQ ID NO: 15147 - DNA, 2712 bp, Homo sapiens
ttttaatggtgctcatatatactgtattttttgttgtttagttttacttattgagagtgtcacaacatgaatcacataatcatgattttttttttttacttttactccccaaattattcatgtttcttagatcgtagtcattgagaagtcccaataactctaaacttttgagttataacgtagtaaacttctctttcatctttgtgttagctctgtagtcttaacctggattttaatttttttgtttccaaagtcacaattgaattattcttagataccttaagccactgaattcagttctgtttgactgaaagcaaaacaacgtgacagtttattttcaaacactaacttcttgatattttgttatggtatatctttttattaaatatttattttgactaagctttcataaaatatttgaagctattttaatcatcaagtatggaaaacaaattactattgcattttcctatatatgcatatattatggattaaccagaattgtatcatttttggcctaatgtctggatataaaagataattagcctactatagtattaataaatttttcagttggtttgggcaaatttaaacctgaaaaataggttaaaaagtagttacaaattaaacttactaatttatacctgattttttttcttgaattaaagtacattttaaatgagctttataataccttaaaaagttggttctaatttaaaatatgaaagctctggctatcatcctgggatagtaatttctaattatatagtatttcaaaactatatattttttagttcctttgagataactaatttctaattatatatgtttcaaaaaccatatcctgtattttttttaagaattgttttataaataggtcataagatacaaggtctgcattagaagacccactcttactaggttccctaaggatctgccatagattttttttttttttttttttttttaggtagtttaaagcaagcactgataccagtgggagttggtcttgatctaggagattctgttaagcatccaaaaacaatgcctaatttcagttcttaggttatggcttgtgactccagataaaagatggagaatacctcatgtactgtgacttgaaaatgaattcttaaaattcttaggctctctccatgtatctttcttaaggaaaagtttctgagtgtgatctctcttttgccatagtatcaagtggagggtagttcagaaaagttaataggaaatcttttgtgacagcagactataatagaagtttgagtaatattttaataaatttatataattcaaatgataaaaatgtatcaatgttatccaatgatttttattaaaaaattaccttattattagaactgtgcctattacataaaaagtgctcatgtatttgaattttaaataatttatttaaatcaagaccaccataagtcattaataatttaataattgttttaaatcagtggttttcaaccctcacttcatattagaatcatctgaggacttttaatatggaatccacctcataacaattaagtctaaatttctggaagatggagccatgcttgtttttccaaaagctctttgagtgattctaatttgtagtcagagttgaagaccactgctctaaattagtgcaggaaaatgcttttatttctcccatgttaacttttaaaactagtaatgtacccagttaagttttgatggtttaaattccactaaagaacatattcttctaataactagcatttattacatgaaatttaagagtttaagttccatcaaactagcccttgtgtaagattattatttcttctctataacttcaaaatagatatttcattcaaactgttcaggtgagaaaacataatggatttttttttttttcctctggagctgcctgttcagtgagatggaggaggtgggcacatttaaggtcagttcactaacctatggttcagagttctgatcatatggaagtttggaaaagagagcttatcacaggtttgtatgctggtgaatggatagttttaattctcactgtctcaaaagagaatcagctctccagcagttctagaaaagctttgacaatccccaaggggcagtgttaccttactccttcactgcttcttagaaggtagaattaagtttctggaattgcacctacatgttttcttattaacattcagaattgggaatattaatttttccagtgagtagttttctgaaattggtaacttggagagtaaaataacgtattttgcttttcaattttgtgtttgtttacttttatgtaaaaatttgatatgtgaattacacagttctaataaaacctcatgccttttcattacatctaatttgaactctcaacttcatgttacagaatgctttaaagatgctttaatgaaaagtattaagaaaatatatagatttgtatgtcagtttatacttcagaaatccatatatttgtcatatttatttttttagaaacctcctaattggataactagatggtatttaaaatgaatgcccaaaaatatcttgtacctttgtccaaaagtttatctgttggaagccgccagccattcatgtagagagtttataagaaaataatttaaaattgtatgcattttatattactatggtatctgtgtaccatatttctaagtattcattattaaattggtacttcttaaaacc

SEQ ID NO: 15148 - DNA, 2477 bp, Homo sapiens
  CDS (69)..(1088)
gcagaggtgcggccggggaggcgcgcggaggctggagctggaggcgcggcgccggtgagctgagaaccatgtgtgctcagtattgcatctcctttgctgatgttgaaaaagctcatatcaacattcgagattctatccacctcacaccagtgctaacaagctccattttgaatcaactaacagggcgcaatcttttcttcaaatgtgaactcttccagaaaacaggatcttttaagattcgtggtgctctcaatgccgtcagaagcttggttcctgatgctttagaaaggaagccgaaagctgttgttactcacagcagtggaaaccatggccaggctctcacctatgctgccaaattggaaggaattcctgcttatattgtggtgccccagacagctccagactgtaaaaaacttgcaatacaagcctacggagcgtcaattgtatactgtgaacctagtgatgagtccagagaaaatgttgcaaaaagagttacagaagaaacagaaggcatcatggtacatcccaaccaggagcctgcagtgatagctggacaagggacaattgccctggaagtgctgaaccaggttcctttggtggatgcactggtggtacctgtaggtggaggaggaatgcttgctggaatagcaattacagttaaggctctgaaacctagtgtgaaggtatatgctgctgaaccctcaaatgcagatgactgctaccagtccaagctgaaggggaaactgatgcccaatctttatcctccagaaaccatagcagatggtgtcaaatccagcattggcttgaacacctggcctattatcagggaccttgtggatgatatcttcactgtcacagaggatgaaattaagtgtgcaacccagctggtgtgggagaggatgaaactactcattgaacctacagctggtgttggagtggctgctgtgctgtctcaacattttcaaactgtttccccagaagtaaagaacatttgtattgtgctcagtggtggaaatgtagacttaacctcctccataacttgggtgaagcaggctgaaaggccagcttcttatcagtctgtttctgtttaatttacagaaaaggaaatggtgggaattcagtgtctttagatactgaagacattttgtttcctagtattgtcaactcttagttatcagattcttaatggagagtggctatttcattaagatttaatagttttttttggactaagtagtggaaaaacttttatacttaactgagacattttgtcaaggctaaaaaaaagtcttgcaaaatggggcagtggactgacaggctgacatagaaaataaactttgcccaatcacaacttgtgcctcccatccctggagtactgactggcaccggtaagacagaatctctctgaatccattactccatgcccccttgaggcactgttgaagaaatctcacttttcagccagggtactggttctggtacatatggatcataagtccatttggggaagactcgtttatacaggttcatcagtactgtgtcttgagattttagcttcccatcaaagctgcatttcatgtggccatgggtacctagaaagacatcagaacaagtcggtcaaattaaaagtagaaaattttaaagcaatgacttccaacccaacagtcatttagcaacactgcagaaatgcagacatggtctcaaatcccgtgtttccttacctaaaggttccttgatatgtcctctccggccccacttcgttctcagttccactggtttaaaccacagcacatcctcttagaatcaaacacattaaagaccaagatgaaacatttacccacaaaatgtaaacccaacctttataccacaaaggcaatcagatcccatcctcctccttcatacccacctctgttgaagaacatgtaacgtactactgccatcttagtaaaaattttgaaaggatgaccactcagaacaactctcttgatgaccattctgtctggatctactgacataagatggcctgtagcaatgaggctgtgcattcctaaaggacaaaagcaaagaagctatttaggaatttacaggccaaagtcttcatttattgcccagtccatttaaagacccatgcaagagcctggtttgtcatccctgccctagcccaatctgaggctaagattggtaaactgtaagcccacacttaaccttgtcaataggttcttgaaaacttgtacttcaagagaaatgatgtataacaaaaccatactttttctcatcagttgttacaaggaaaggatgttgaacaaaaggcagttatttgaggactggctatacactgtttcacgtaaaagttggagttttcattgttctattaacaatgttaaatgaagacttactgtattttgaaaaccatcattaccttctccataccatttggctcccaaatttaaataaacaagagaaaacggtgttcatct

SEQ ID NO: 15149 - protein, 340 aa, Homo sapiens
MCAQYCISFADVEKAHINIRDSIHLTPVLTSSILNQLTGRNLFFKCELFQKTGSFKIRGALNAVRSLVPDALERKPKAVVTHSSGNHGQALTYAAKLEGIPAYIVVPQTAPDCKKLAIQAYGASIVYCEPSDESRENVAKRVTEETEGIMVHPNQEPAVIAGQGTIALEVLNQVPLVDALVVPVGGGGMLAGIAITVKALKPSVKVYAAEPSNADDCYQSKLKGKLMPNLYPPETIADGVKSSIGLNTWPIIRDLVDDIFTVTEDEIKCATQLVWERMKLLIEPTAGVGVAAVLSQHFQTVSPEVKNICIVLSGGNVDLTSSITWVKQAERPASYQSVSV

SEQ ID NO: 15150 - DNA, 2295 bp, Homo sapiens
  CDS (53)..(1762)
tagccagaaaagggggcgggaagggctgtagggtacttgtcaattcgccgccatgaacgtggtttttgctgtgaagcagtacatttccaaaatgatagaggacagcgggcctggtatgaaagtacttctcatggataaagagacgactggcatagtgagtatggtatacacacaatcggagattctacagaaggaagtgtacctctttgaacgcattgattctcaaaatcgagagatcatgaaacacctgaaggcaatttgttttcttcgacctacaaaggagaatgtggattatattattcaggagctccgaagacccaaatacactatatatttcatttatttcagtaatgtgatcagcaagagtgacgtgaagtcattggctgaagctgatgaacaggaagttgtggctgaggttcaggaattttatggtgattacattgctgtgaacccacatttgttttccctcaatattttgggttgctgccagggtcgaaattgggatccagcccagctatctagaacaactcaagggcttacagctctccttttatctctgaagaagtgtcccatgattcgttatcagctctcatcagaggcagcaaagagacttgcagagtgcgttaagcaagtgataactaaagaatatgaactgtttgaattccgtcggacagaggttcctccattgctccttattttagatcgctgtgatgatgccatcaccccattgctaaaccagtggacatatcaggccatggtccacgaactactaggcataaacaacaatcggattgatctttccagagtgccgggaatcagtaaagacttaagagaagtggtcctatctgctgaaaatgatgaattctatgctaataatatgtacctgaactttgctgagattggtagcaatataaagaatctcatggaagattttcagaagaagaaaccaaaagaacagcaaaaactagaatcaatagcagacatgaaggcgtttgttgagaattatccacagttcaagaaaatgtctgggactgtttcaaagcatgtgacagtggttggagaactgtctcgattggtcagtgaacggaatctgctggaggtttcagaggttgagcaagaactggcctgtcaaaatgaccattctagtgctctccagaatataaaaaggcttctgcagaaccccaaagtgacagagtttgatgctgcccgcctggtgatgctttatgctttacattatgagcgacacagcagcaatagcctgccaggactaatgatggacctcaggaataaaggtgtttctgagaagtatcgaaagctcgtgtctgcagttgttgaatatggtggtaaacgagtcagaggaagtgacctcttcagccccaaagatgctgtggctatcaccaaacaattcctcaaaggactgaagggagtagaaaatgtatatacacagcatcaacctttcctacatgaaaccctggatcatctcatcaaaggaaggcttaaggaaaacctatatccttatttaggccccagcacactcagagacagacctcaggatatcattgtgtttgtaattggaggagccacctatgaagaggctctaacagtttataacctgaaccgcaccactcctggagtgaggattgtcctgggaggcaccacagtgcacaacacgaaaagtttcctagaggaagttctggcttctggactgcacagccgaagcaaggagagctctcaagtcacatcaaggtcagcgagcagaagatgaaacggtggttgggggaagggcacagcttcctctcttgtccccactacaggttttccctactaaacaaaggtgttggagagcagctttgggttctgtgctggttgttagaactcatctccaggtagcccacggatacgtggttggcacagacacaagactcccagagttgtcctaacaataagtctgagcccatctcaacccacttttctccggtagtctttatgtatctgttagcacaatcacttcagttactgatgaattttgttgggatctgacttggggaaagggttatcagagcctagaggggcttaaaaagtaatcatttgatgtacataccacactccttggcttcctttctcttcccttaaccctttctgcttttcattaaccacattcctgcacaactcatttctgaaaacctaccatgtttctttacagagccatccaaaaattttttgtccctacatagcaattttctgtggcactgagaaaccatgtatgaccacaataaaaatccattttgtgaaagg

SEQ ID NO: 15151 - protein, 570 aa, Homo sapiens
MNVVFAVKQYISKMIEDSGPGMKVLLMDKETTGIVSMVYTQSEILQKEVYLFERIDSQNREIMKHLKAICFLRPTKENVDYIIQELRRPKYTIYFIYFSNVISKSDVKSLAEADEQEVVAEVQEFYGDYIAVNPHLFSLNILGCCQGRNWDPAQLSRTTQGLTALLLSLKKCPMIRYQLSSEAAKRLAECVKQVITKEYELFEFRRTEVPPLLLILDRCDDAITPLLNQWTYQAMVHELLGINNNRIDLSRVPGISKDLREVVLSAENDEFYANNMYLNFAEIGSNIKNLMEDFQKKKPKEQQKLESIADMKAFVENYPQFKKMSGTVSKHVTVVGELSRLVSERNLLEVSEVEQELACQNDHSSALQNIKRLLQNPKVTEFDAARLVMLYALHYERHSSNSLPGLMMDLRNKGVSEKYRKLVSAVVEYGGKRVRGSDLFSPKDAVAITKQFLKGLKGVENVYTQHQPFLHETLDHLIKGRLKENLYPYLGPSTLRDRPQDIIVFVIGGATYEEALTVYNLNRTTPGVRIVLGGTTVHNTKSFLEEVLASGLHSRSKESSQVTSRSASRR

SEQ ID NO: 15152 - DNA, 2133 bp, Homo sapiens
  CDS (39)..(935)
agctggctgggcggttaggagggcccggggccgagacgatggctgaccacaaccctgacagcgactccacgccgcgcacgctgctgcgacgcgtgctggatacagcggacccgcgcaccccgcggcgaccccggagtgctcgggctggagcccggagagccctgcttgaaacggcttcccccaggaagttgagtggccaaacaaggacgatagccagagggcgttcccatggagccaggtctgttggcagatcggcccatattcaggccagtgggcacttggaggaacagacacctcggacgctgctgaagaacatcctactaactgccccagaatcttccatcctgatgcctgagtcggtagtgaagccagtgccagcaccgcaggcggtccaaccctccagacaagagagcagttgcggcagcctggagctgcaacttcctgagctcgagccccccacaaccctggctccaggtctgctggcccctggcaggaggaaacagaggctgagactgtcagtgtttcagcagggagtggaccaggggctgtctctctcccaagagcctcaagggaatgctgatgcctcttccctcaccagatccctcaacctgacctttgccacgcctcttcagccacagtcagtgcagaggcctggcttggcccgcagacctccagcccgccgagctgtagacgtgggtgcctttttgcgggatctgcgagatacttccctggctcctccaaacattgtgttggaggacacccagccgttctctcagcccatggttggctcccccaacgtgtatcactccctgccctgcacgcctcacactggggctgaagacgctgagcaggctgccggtcgcaagacacagagcagtgggcctgggctgcagaagaatagtgagtgtgtggcactggtggcctggagccaaatttagcttgggtgagagttgacaatggtagttttccttcctcaagcccctctgtgcccctagagcaccctggctgtggctgcctccttcatccaagagcagagtccatgttgggccaggagacttcagatccatgtcctggtgctgcctctggctttgtctttcctcagtgggcaggactgggtctgctggtccatctttacccttctctgagctatgcagccttggcctgctgcgtctccggcctgtattctctccccttcactcaggccctgggaaaccagcccagtttctggcaggagaggcagaggaggtcaatgcctttgctctgggcttcctgagcaccagcagtggtgtctctggagaagatgaagtagagcccttacacgatggagttgaagaggcagagaaaaagatggaagaagaaggtgtgagtgtgagtgaaatggaggcaacaggagcacaaggacccagcagggtagaagaggctgagggacacacagaggtgacagaagcagagggatcccaggggactgctgaggctgacgggccaggagcatcttcaggggatgaggatgcctctggcagggcagcaagtccagagtcggcctccagcacccctgagtctctccaggccaggcgacatcatcagtttcttgagccagccccagcgcctggtgctgcagtcttatcttcagagcctgcagagcctctgttggtcaggcatccccctaggccccggaccaccggccccaggccccggcaagatccccacaaggctggactgagccactatgtgaaactctttagcttctatgccaagatgcccatggagaggaaggctcttgagatggtggagaagtgcctagataaatatttccagcatctttgtgatgatctggaggtatttgctgctcatgctggccgcaagactgtgaagccagaggacctggagctgctgatgcggcggcagggcctggtcactgaccaagtctcactgcacgtgctagtggagcggcacctgcccctggagtaccggcagctgctcatcccctgtgcatacagtggcaactctgtcttccctgcccagtagtggccaggcttcaacactttccctgtccccacctggggactcttgcccccacatatttctccaggtctcctccccacccccccagcatcaataaagtgtcataaacag

SEQ ID NO: 15153 - protein, 299 aa, Homo sapiens
MADHNPDSDSTPRTLLRRVLDTADPRTPRRPRSARAGARRALLETASPRKLSGQTRTIARGRSHGARSVGRSAHIQASGHLEEQTPRTLLKNILLTAPESSILMPESVVKPVPAPQAVQPSRQESSCGSLELQLPELEPPTTLAPGLLAPGRRKQRLRLSVFQQGVDQGLSLSQEPQGNADASSLTRSLNLTFATPLQPQSVQRPGLARRPPARRAVDVGAFLRDLRDTSLAPPNIVLEDTQPFSQPMVGSPNVYHSLPCTPHTGAEDAEQAAGRKTQSSGPGLQKNSECVALVAWSQI

SEQ ID NO: 15154 - DNA, 2121 bp, Homo sapiens
ggttaatggaggaagagatggaaggctcgtgccatgatttggtactgggtcatctgactgtccatgcagttagctacgcattctgcagacttcctccatccccagctcccacagttacaaaaagttctttcctgctctgagttctgaaatgctcacattcccagctccaagaggattcccaaaatgaatgtttaccttctcttacagttcagtctagccttcacatcttgggaggggttagagggggcagaggaaaggaactttagctgcctaggtgcagtttaaagagggtctaggtactgtggctctcagcagcctttgaccctggggccactctcttcatcttatggaggacaaggcctttggttccctggaggttcactgaaaatcactgacatgaggcagattgattaataggataaaagtcacacaaatttatttaatgtgagtacacatgaaccttcaaaatgaagacccaaagacacaggggaaattgtccatttttatggttgggtacaacaaagtatggacagccatgtagaaatatgattgaacaaaaagggtatgatctaatgctaatagactgagtggggaaaccaagcaaggcctgcctgtctggattcttcttggcctctctgagcatgcattcctctgtgaacccagaaaatctgagacagctctcagtccagaaagtttattttgccaagtttgagggccagcctgtgacacaacctcaggaagtcctgatgacatgtgcccaaggtggccggggcacagcttggttttatacattttagggagacatgagacaccaatcaatatatgtaagaagtacattagctctatccagaaagatggagacaactcaaaccaagccccctaccttccaggtcacaggtagctgacagacagatggctgcattcttttgagtttctgataagtctttccaaaggagacaatcagaatatgcatctatctttgttatctctgtgagcagagggatgactctgaatagaatgggaggccctgagcggttcccagcttgaaggggcccaagatattttcttttcacaccttccttctggatgtggggcaggaccctctctggaacaacgtagaacagatcatttctttatggtcagtttttacacagaaagatgaagagaaaattagagtaatgattttaggtttcatggctgactttgggaaaagggggttctggtttatacggctgccttggagaaggggaattctagttcctagttcctatggcttgccttgtgggacaatgagactgagacaggagggcaagagaagatcagagaaaaacttttgcttctggggcagtatctatatctatctctctatccatctacatatctatactggttgaattgaagtggtagtcattataacaatctttcaactattctgcatgcctgaaaatctgtataataaaaagttgggggaaacgctttaaaggctgccccgtgacaacatggattacctctttctctatttccctaatattgtgcattatcaacaacttaatcacatttcattgtaattatgtgctaagaaactttctcccataggctgtgtaaaagtacagtagctgcacacagtaggcactcaataactgcttgcatgcctgaatatcctctcctatgaggctgtccttgagaattaataagccaccggagtgggaagacgccagagttaaccatacactaccctttgatgcttcattcttcataacacagaagctcatgagcgagcacaggaaaggcgccgtggctgggaggaaagacaataaatggctatggactgaatgacagctcagtttaaaactcaggagatccagcctctgtggtcatatgattaactggctgtgtgaccatgtccaaacactaacctctctgtgcctctgttttctcacttgcaaacagggagtaataatgtgtcttggccaataagtggagaaaagtgttttgaggccgggcgcggtggctcaagcctgtaaccttagcactttgggaggccgaggcgagcggaccgcctgagctccagagttcaacaccagcctgggcaacacggtgaaacccgctctctactaaaat

SEQ ID NO: 15155 - DNA, 2832 bp, Homo sapiens
  CDS (247)..(2019)
agtcgaggtatcttctccccaaccactgctcttattttaattattgcagacggaagttgaagactattgacatagtaaatagctctgggtggcttgaaacgaaagtttaactttgcggacaaacaggacttattgtagggggtggtcaaaatagtcccggcggggcggggccatgacccctgacgtcgccggtccggcgcgcagttcagtttggcggttccggtaccgctctcacattggggcgggatgtgggagcggctgaactgcgcagcagaggacttttattctcgtctccttcagaaatttaatgaagaaaagaaaggaatccgtaaagacccatttctctatgaggctgatgtccaagtgcagttgatcagcaaaggccaaccaaaccctttgaaaaatattctaaatgaaaatgacatagtattcatagtggaaaaagtgcctttagaaaaggaagaaacaagtcatattgaagaacttcaatctgaagaaactgccatatctgatttctctactggcgaaaatgttggaccacttgctttaccagttgggaaggcaaggcagttaattggactttacaccatggctcacaatcctaatatgacccatttgaagattaatctgccagttactgcccttcctcccctttgggtaagatgtgacagttcagatcctgaaggtacttgttggctaggagctgagcttatcacaacaaacaacagcattacaggaattgtcttatatgtggtcagttgtaaagctgataaaaattattctgtaaatcttgaaaacctaaaaaatttacacaagaaaagacatcacttgtctactgtaacatccaaaggctttgcccagtatgagctctttaagtcctctgccttggatgatacaatcacagcatcacaaactgcgatcgctttggatatttcctggagtcctgtggatgagattcttcaaatccctccactctcttcaactgcaactctgaatattaaagtggaatcaggagagcccagaggtcctttgaatcatctctacagagaactgaaatttcttcttgttttggctgatggtttgaggactggtgtcactgaatggctcgagcccctggaagcaaaatctgctgttgaacttgttcaggaatttctgaatgacttaaataagctggatggatttggtgattctacaaaaaaagacactgaggttgagaccttgaagcatgacactgctgcagtcgatcgttccgtcaagcgtcttttcaaagttcggagtgatcttgattttgctgagcaactgtggtgcaaaatgagcagtagtgtgatttcataccaagacttggtgaagtgtttcacattgatcatccagagtctacaacgtggtgatatacagccatggctccatagtggaagtaacagtttactaagtaagctcattcatcagtcttatcatggaaccatggacacagtttctctcagtgggactattccagttcaaatgcttttggaaattggtttggacaaactaaagaaagattatatcagttttttcataggtcaggaacttgcatctttgaatcatttggaatacttcattgctccatcagtagatatacaagaacaggtttatcgtgtccaaaaactccaccatattctagaaatattagtcagttgcatgcctttcattaaatctcaacatgaactcctcttttctttaacacagatctgcataaagtattacaaacaaaatcctcttgatgagcaacacatttttcagctgccagtcagaccaactgctgtaaagaacttatatcaaagtgagaagccacagaaatggagagtggaaatatatagaggtcaaaagaagattaagacagtttggcaactgagtgacagctcacccatagaccatctgaattttcacaaacctgatttttcggaattaacactaaacggtagcctggaagaaaggatattctttactaacatggttacctgcagccaggtgcatttcaagtgaagtgtgctgatgaagtcctctataagcacaagccaaaaagagaaagagaaaaaaaggtaattattgtagaacctgaaaacagcaatgtatggaaaccctcaaagcagaaaagggaggaagatcctgaagattctcttatgaagctccaaaattgataatcctgtctcagctctgcctcctcaggaggagcattagtagaacagcagtgatgaggacacagagggagcagacagtgggtaccacgatctccgtaaccatttgcatgtgacttagcaagggctctgaaatgacaaagagaacgagcaccacaaatgagaacaggatcattttagtaaatacagctttatcccaaaagctttagctgtattgggaaaacttaaaaaatagcatcctcaaattttctgattcttatttgccatgaaatagaacttagtaaattaaatgttatttgaaaatgttataagagctttgtaaatatttcagaaaatatgggataaatgcctgaatttggttcttctacaggtgctataataaagtccatctctcaatacttatactttctaaattcatctcagaatattagcagccatattccacagttcctataatttttactgggggggatttgtgataggaaagtccttgggaaacatttccaatctttcaaaatattattgtgtatcttaagaagtataggaacttgtatgttgaaatgttgtatggtagttcttgtatagttaaataataatctttttaagagttaatgataagcatatgttatgtgcattattaataaaatagtggccactt

SEQ ID NO: 15156 - protein, 591 aa, Homo sapiens
MWERLNCAAEDFYSRLLQKFNEEKKGIRKDPFLYEADVQVQLISKGQPNPLKNILNENDIVFIVEKVPLEKEETSHIEELQSEETAISDFSTGENVGPLALPVGKARQLIGLYTMAHNPNMTHLKINLPVTALPPLWVRCDSSDPEGTCWLGAELITTNNSITGIVLYVVSCKADKNYSVNLENLKNLHKKRHHLSTVTSKGFAQYELFKSSALDDTITASQTAIALDISWSPVDEILQIPPLSSTATLNIKVESGEPRGPLNHLYRELKFLLVLADGLRTGVTEWLEPLEAKSAVELVQEFLNDLNKLDGFGDSTKKDTEVETLKHDTAAVDRSVKRLFKVRSDLDFAEQLWCKMSSSVISYQDLVKCFTLIIQSLQRGDIQPWLHSGSNSLLSKLIHQSYHGTMDTVSLSGTIPVQMLLEIGLDKLKKDYISFFIGQELASLNHLEYFIAPSVDIQEQVYRVQKLHHILEILVSCMPFIKSQHELLFSLTQICIKYYKQNPLDEQHIFQLPVRPTAVKNLYQSEKPQKWRVEIYRGQKKIKTVWQLSDSSPIDHLNFHKPDFSELTLNGSLEERIFFTNMVTCSQVHFK

SEQ ID NO: 15157 - DNA, 2954 bp, Homo sapiens
  CDS (54)..(1475)
ttatagatatattccatgaatataatcagactcttactcctgtacttctagaaatgatgcaaacacttcaaggacccacaaatgtggaagatatgaatgcactgttaatcaaagatgctgtgtataatgctgttggattagctgcttatgagctctttgacagtgttgattttgatcagtggtttaaaaaccagcttcttccagaattacaagtcattcacaataggtataagccattgcgacgcagggtgatttggctcatcggtcagtggatttctgtgaaattcaagtctgacttaagacccatgctttatgaagcaatctgtaacttgcttcaagatcaagatttagtggtccgtattgaaacagctacaactttgaagttaactgttgatgattttgaatttagaacagatcagtttctaccgtatttggaaaccatgttcacactactttttcagttactgcagcaagttacagaatgtgacacaaagatgcatgttttgcatgtcctttcttgtgtgatcgaaagagtcaacatgcagatacgaccatatgtgggatgtttggtacaatatttgcccctcctttggaagcagagtgaagaacacaatatgttgagatgtgctattttgacaacacttattcatcttgttcagggattaggagcagacagcaagaacctgtaccctttcctgctcccagttattcaactgagtacagatgtttcacagcctccacatgtttatcttctggaagatggtttagaattatggtcagtaactttggaaaacagtccatgtattacaccagagttgcttcgtatatttcagaatatgtcaccacttcttgaactaagttcagaaaatcttagaacttgctttaagatcatcaatggttatatctttttatcatcaacagaatttttacagacatacgcagtaggtctatgccagtccttttgtgaacttttaaaggaaattactacagaaggtcaagttcaggtgctcaaggttgtggaaaatgcccttaaagtgaacccaatactaggtccacaaatgtttcaaccgattttaccctatgttttcaagggtattatagaaggggagaggtatcctgtagtgatgtccacgtatcttggagttatgggtcgagttctactacaaaacactagttttttttcttcactacttaatgagatggcccataaatttaatcaggagatggaccagcttttgggaaatatgattgaaatgtgggttgatcgaatggacaacattacccagcctgaaagaagaaaactttcagctttggctttgctctctcttctgccatctgataatagtgttatccaagataaattctgtgggattataaacatttcagtagaaggcctgcatgatgtcatgacggaagatcctgaaacaggaacttataaagactgtatgttgatgtctcatcttgaggaaccaaagtaacagaagatgaagaaccacccacagaacaagataagaggaaaaagatgctggccctgaaggaccctgttcatacagtgtcactgcagcagttcatctacgagaagctcaaggcacagcaggagatgctaggagaacaaggtttccagtccctcatggaaacagtggatacggagattgtcacccagctacaggagtttttgcaaggattctaagagcacatgacatgtggctgcctcccctttcagaaacaagctgagtaacccagcctgccgtttgtatgtgagagcctgctgagatgaagaaatcacttcatgaaaataagcaaagaccacacattttttactacaaaatgtaaaggataaatgtaaatcctgcataactaaaatcacaaacctattcctcaaaagaatttaattttatatttatgagggggcccttcactaaaaagtacatgtaaaagtacatttgatgacaatagctgcttagtttcctgttaagagaagaaactttatcttttaattatgtgctcttaatatttgaaggtgagagttaatacctgagatgtttttctgcaaccaaaattcattaaatttggctgccttatcctttttttaagctaatgaaactacaggtttgaaaaatgacaaagctgttcagatgatgctattaaagaaatgtgtgtactaagcaaaaatatataaatagtgacaaatacacattaccaagcttatcttgcaagggagttattttcatctaacatagaaagtgtgttttatcagacaaatgcttttattttcattctaataatttgatacagaaattagtaaaggcatttttttcttttttttttccagtaaatacattgggtctataaatgtgcatttgtaagggccacaaaagtgaacgtgtggtactgtagtaccacgtgggagacctctggttatggtttagtcctagttcctttgttactcctgtgagcaccgagaagaactgggcgactcccagtcccacctgtgctgtgacagtcccacgtggctatgacagactgtttagtacttacccttctcaggttcctcagtgcaggggtgcatcagggcctcaataataggggtatacctgggaggatccagcagtaatccccagggtactaggattactagtactctgatggaactagtcttccttccttattcctcgaacatgcagtacataaaaaggggaaaaggagaaaaaaaaagccttactttgttttacttgccatttattgtaaggaaactttaaagcattttttaggaaatactcaaaagcaaggttggaaaatgttttatctttctatagaaagttgggtacagtatgtaactgcgggaaacccactgcccctttgtaagctgtggaacccaaactgtatggggatatttgatgttttcagaaagaggaagaaaatatggtccaaattaaattttccaaagatacctc

SEQ ID NO: 15158 - protein, 474 aa, Homo sapiens [sequence omitted]

SEQ ID NO: 15159 - DNA, 2993 bp, Homo sapiens
  CDS (42)..(2453)
ggtggcgggtggctggcggttccgttaggtctgagggagcgatggcggtacgcgcgttgaagctgctgaccacactgctggctgtcgtggccgctgcctcccaagccgaggtcgagtccgaggcaggatggggcatggtgacgcctgatctgctcttcgccgaggggaccgcagcctacgcgcgcggggactggcccggggtggtcctgagcatggaacgggcgctgcgctcccgggcagccctccgcgcccttcgcctgcgctgccgcacccagtgtgccgccgacttcccgtgggagctggaccccgactggtcccccagcccggcccaggcctcgggcgccgccgccctgcgcgacctgagcttcttcgggggccttctgcgtcgcgctgcctgcctgcgccgctgcctcgggccgccggccgcccactcgctcagcgaagagatggagctggagttccgcaagcggagcccctacaactacctgcaggtcgcctacttcaagatcaacaagttggagaaagctgttgctgcagcacacaccttcttcgtgggcaatcctgagcacatggaaatgcagcagaacctagactattaccaaaccatgtctggagtgaaggaggccgacttcaaggatcttgagactcaaccccatatgcaagaatttcgactgggagtgcgactctactcagaggaacagccacaggaagctgtgccccacctagaggcggcgctgcaagaatactttgtggcctatgaggagtgccgtgccctctgcgaagggccctatgactacgatggctacaactaccttgagtacaacgctgacctcttccaggccatcacagatcattacatccaggtcctcaactgtaagcagaactgtgtcacggagcttgcttcccacccaagtcgagagaagccctttgaagacttcctcccatcgcattataattatctgcagtttgcctactataacattgggaattatacacaggctgttgaatgtgccaagacctatcttctcttcttccccaatgacgaggtgatgaaccaaaatttggcctattatgcagctatgcttggagaagaacacaccagatccatcggcccccgtgagagtgccaaggagtaccgacagcgaagcctactggaaaaagaactgcttttcttcgcttatgatgtttttggaattccctttgtggatccggattcatggactccaggagaagtgattcccaagagattgcaagagaaacagaagtcagaacgggaaacagccgtacgcatctcccaggagattgggaaccttatgaaggaaatcgagacccttgtggaagagaagaccaaggagtcactggatgtgagcagactgacccgggaaggtggccccctgctgtatgaaggcatcagtctcaccatgaactccaaactcctgaatggttcccagcgggtggtgatggacggcgtaatctctgaccacgagtgtcaggagctgcagagactgaccaatgtggcagcaacctcaggagatggctaccggggtcagacctccccacatactcccaatgaaaagttctatggtgtcactgtcttcaaagccctcaagctggggcaagaaggcaaagttcctctgcagagtgcccacctgtactacaacgtgacggagaaggtgcggcgcatcatggagtcctacttccgcctggatacgcccctctacttttcctactctcatctggtgtgccgcactgccatcgaagaggtccaggcagagaggaaggatgatagtcatccagtccacgtggacaactgcatcctgaatgccgagaccctcgtgtgtgtcaaagagcccccagcctacaccttccgcgactacagcgccatcctttacctaaatggggacttcgatggcggaaacttttatttcactgaactggatgccaagaccgtgacggcagaggtgcagcctcagtgtggaagagccgtgggattctcttcaggcactgaaaacccacatggagtgaaggctgtcaccagggggcagcgctgtgccatcgccctgtggttcaccctggaccctcgacacagcgagcgggtgagagcagctcgagcgggtgagagcagctggtgctgtggtgacccgttcccagagcgcccttggtttgcctttctcttccccaaatcccattgccagtggctgagacacgaaaggagcacttgggacaccagctccaacgccctgtcattatggtcacattgccttgtcctccctgggcctgctgtgaacgggatccaggtggggaaagaggtcaagacagggagcgatgctgagttcttggttccctccttgggccccacttcagctgtccttttccagagagtaggacctgctgggaaggagatgagcctggggccattaaggaaccttccttgtcccctgggaagtagcagctgagagatagcgagtgtctggagcggaggcctctctgaatgggcaggggtttgtccttgcaggacagggtgcaggcagatgacctggtgaagatgctcttcagcccagaagagatggtcctctcccaggagcagcccctggatgcccagcagggcccccccgaacctgcacaagagtctctctcaggcagtgaatcgaagcccaaggatgagctatgacagcgtccaggtcagacggatgggtgactagacccatggagaggaactcttctgcactctgagctggccagcccctcggggctgcagagcagtgagcctacatctgccactcagccgaggggaccctgctcacagccttctacatggtgctactgctcttggagtggacatgaccagacaccgcaccccctggatctggctgagggctcaggacacaggcccagccacccccaggggcctccacaggccgctgcataacagcgatacagtacttaagtgtctgtgtagacaaccaaagaataaatgattcatggtttttttt

SEQ ID NO: 15160 - protein, 804 aa, Homo sapiens
MAVRALKLLTTLLAVVAAASQAEVESEAGWGMVTPDLLFAEGTAAYARGDWPGVVLSMERALRSRAALRALRLRCRTQCAADFPWELDPDWSPSPAQASGAAALRDLSFFGGLLRRAACLRRCLGPPAAHSLSEEMELEFRKRSPYNYLQVAYFKINKLEKAVAAAHTFFVGNPEHMEMQQNLDYYQTMSGVKEADFKDLETQPHMQEFRLGVRLYSEEQPQEAVPHLEAALQEYFVAYEECRALCEGPYDYDGYNYLEYNADLFQAITDHYIQVLNCKQNCVTELASHPSREKPFEDFLPSHYNYLQFAYYNIGNYTQAVECAKTYLLFFPNDEVMNQNLAYYAAMLGEEHTRSIGPRESAKEYRQRSLLEKELLFFAYDVFGIPFVDPDSWTPGEVIPKRLQEKQKSERETAVRISQEIGNLMKEIETLVEEKTKESLDVSRLTREGGPLLYEGISLTMNSKLLNGSQRVVMDGVISDHECQELQRLTNVAATSGDGYRGQTSPHTPNEKFYGVTVFKALKLGQEGKVPLQSAHLYYNVTEKVRRIMESYFRLDTPLYFSYSHLVCRTAIEEVQAERKDDSHPVHVDNCILNAETLVCVKEPPAYTFRDYSAILYLNGDFDGGNFYFTELDAKTVTAEVQPQCGRAVGFSSGTENPHGVKAVTRGQRCAIALWFTLDPRHSERVRAARAGESSWCCGDPFPERPWFAFLFPKSHCQWLRHERSTWDTSSNALSLWSHCLVLPGPAVNGIQVGKEVKTGSDAEFLVPSLGPTSAVLFQRVGPAGKEMSLGPLRNLPCPLGSSS

SEQ ID NO: 15161 - DNA, 2836 bp, Homo sapiens
  CDS (323)..(1438)
agctcgttcgccgcactttggaggcttcggctgcccctccgacccacgtagggcccggacccgggcctccttgtgaacagcgtgccggcttcgccccacgggttcaccggctggctgggcttcaagcgccgaggccgccgcagtgaccccgcccccgggccgaggatgtgaggcgggccgggcgtccccacaccgggcccgggcgccgggagtgggcgtctgggcagcgccaggcgatggccctgctgctggtgctcctcgcctcttggggcctggggcagtgagggggccggcgggcgtgggccgagtggccgcgggcgccatggagggggtgctgtacaagtggaccaactatctgagcggttggcagcctcgatggttccttctctgtgggggaatattgtcctattatgattctcctgaagatgcctggaaaggttgcaaagggagcatacaaatggcagtctgtgaaattcaagttcattctgtagataatacacgcatggacctgataatccctggggaacagtatttctacctgaaggccagaagtgtggctgaaagacagcggtggctggtggccctgggatcagccaaggcttgcctgactgacagtaggacccagaaggagaaagagtttgctgaaaacactgaaaacttgaaaaccaaaatgtcagaactaagactctactgtgacctccttgttcagcaagtagataaaacaaaagaagtgaccacaactggtgtgtccaattctgaggagggaattgatgtgggaactttgctgaaatcaacctgtaatacttttctgaagaccttggaagaatgcatgcagatcgcaaatgcagccttcacctctgagctgctctaccgcactccaccaggatcacctcagctggccatgctcaagtccagcaagatgaaacatcctattataccaattcataattcattggaaaggcaaatggagttgagcacttgtgaaaatggatctttaaatatggaaataaatggtggggaagaaatcctaatgaaaaataagaattccttatatttgaaatctgcagagatagactgcagcatatcaagtgaggaaaatacagatgataatataacagtccaaggtgaaataaggaaggaagatggaatggaaaacctgaaaaatcatgacaataacttgactcagtctggatcagactcaagttgctctccggaatgcctctgggaggaaggcaaagaagttatcccaactttctttagtaccatgaacacaagctttagtgacattgaacttctggaagacagtggcattcccacagaagcattcttggcatcatgttatgctgtggttccagtattagacaaacttggccctacagtgtttgctcctgttaagatggatcttgttggaaatattaagaaagtaaacagaagtatataaccaacaaagaagagtttaccactctccagaagatagtgctgcacgaagtggaggcggatgtagcccaggttaggaactcagcgactgaagccctcttgtggctgaagagaggtctcaaatttttgaagggatttttgacagaagtgaaaaatggggagaaggatatccagacagccctaagtgtaggaatgtgggtgtagacggaactccagaaaccatcatggaccatgaggcaactctgaggatggaagccacacactaaggacggtaaagcagaaagaagagctgaaaccctgatgataaagaagcagccaattccgtcctgcactgcccacctccagatctcattcatgtgaaacaaagagaaactttatcttgttcaagtcactttagtcaagatttttattatcagatgaatgcaatttctaattgatacaccttaaaattttcaacatgtacacctgatttaacaaaatctagaattaagtcaatacttctacatgcattatagaccaaaggtcactgctataagaactttgggtatatagtcaaattcctcacatttttagaaacttgtttattcattgcatccctcccccatctcactctctcacacactcacatatttattttctcagatccttataagttcataagacatatgtccttattccatttttacagatgagaaaactggggtttgcaggggttaagtaacttatccaagatcacacaattaattagtggcgaagtcataatttgaagtctttctaatgcccaaatgtttccattgtgtcacatatcggagctgtgctctttccatcagccagtttcccattatcatagctgatgacatgcacacccaccatctggggcaggctttagtacagcactctgtgccatcatccagatcaccaaatcttagtaaatggacgtgtcataagagataaggctgccatagaatcacagcagcttctggcttagtaaattacctggatacacaccttttcctagaggaaatcccacatcttcgtaggagatctggtgtaatgctcttgggacctctctctagaggatgagctagtatcactgggtcctagtaagtttcagcaaatataatagagacagaactgtcatcattatcagaaaagaaacagagaaaaatgttaaaacaatggttttgtgaccttaaagtctgtgttagtcccttagcaccaccgctgagattttgctgaaagggacgttttgtgtgttgggcttcactgaaggaagcccctgaaagtgttcagaaatagggaaaatgagaaactgttccagctgaaaatacgggcaagggggaatcattgaagaagacagaatattgaagtgttcaaatgaataaagaagctaaaaact

SEQ ID NO: 15162 - protein, 372 aa, Homo sapiens [sequence omitted]

SEQ ID NO: 15163 - DNA, 2821 bp, Homo sapiens
  CDS (111)..(2681)
cagaacagggaaatgtggtgtttaccagtgcaatagatgggtggggctttggaattgagcacttcgccagaatctacagtcaaaaaattggcatcaaaaaggaagttcttatgaaaaccttgtggggagattactatataaatatgaaggctaaaaagatcatgaagggtgatcaggccaaaggaaagaaacctttatttgtacagttgatcctggaaaatatatggagtttgtatgatgctgttttgaaaaaggacaaagacaaaattgataaaatagtgacttctttaggattaaaaattggagcccgggaggcacgacattcagaccctaaagttcagatcaacgccatttgcagtcagtggctacccatatcccatgctgttcttgctatggtgtgtcagaaacttcctagtccccttgatattacagctgagagagtggagagactgatgtgcacaggatcacaaacttttgactcttttccaccagaaactcaagcactgaaagcagcttttatgaaatgtggaagtgaggacactgctccagttattatatttgtttccaaaatgtttgcagttgatgctaaggccttgcctcagaataagccaaggcctctcactcaagaagaaattgctcagagacgtgagcgtgcaagacaaaggcatgcagagaagcttgcagcagcacagggacaggcacccttggagcccacccaagatgggagtgccattgaaacatgtccaaaaggagacgagccaagaggtgacgagcaacaggtggaaagtatgacccctaaacctgtgctccaggaagaaaacaaccaagagtcttttattgcatttgctcgggtgttcagtggtgtggctcgaagaggaaagaaaatttttgtcttggggcccaaatacagtcctcttgagtttttacgaagggtaccattaggcttctcagctccaccagatggcctcccccaagtcccccacatggcatactgtgctctggaaaacctgtatcttctgatgggaagggaactggaatatctagaggaggtacctccaggaaatgtgctaggaataggaggccttcaagattttgtgctgaaatctgcaacactgtgtagcctgccatcctgcccaccatttataccactcaacttcgaagccactcctattgtgagagttgctgttgaaccaaaacatccaagtgaaatgcctcggctcgtaaaaggaatgaaactgttaaaccaggctgatccctgtgtccagattttaattcaggaaacgggagagcacgttttagtcacagcaggagaagtccaccttcagcgatgcctggatgacttaaaagaaaggtttgcaaagattcatatcagtgtatctgaacctattattccattcagagaaacaatcacaaaacccccaaaagttgacatggtcaatgaagaaataggcaaacagcaaaaagttgcagtcatacaccaaatgaaagaagatcaaagcaaaatccctgaaggaatccaagttgactctgacgggctaatcaccataacaactcccaataaacttgccacgctcagtgttcgagccatgccccttccagaagaagtcacccagattctggaagaaaatagtgatttgattcgttctatggagcagttgacatcctctttgaatgagggcgaaaatactcacatgattcatcagaagacccaagagaaaatttgggaattcaaaggaaaactggagcaacacctaacagggagaagatggaggaacattgttgaccaaatctggtcatttggcccaagaaaatgtgggcccaacatactagtcaataaaagtgaagattttcagaactcagtatggacaggtccagctgacaaagcttcaaaagaagccagtagataccgagatttgggcaatagcattgtgagtggcttccaactagcaaccctctctggccccatgtgtgaggagcctctcatgggtgtctgttttgttctggaaaaatgggacctaagtaaatttgaggaacaaggagcaagtgatctggcaaaagagggacaggaggaaaatgaaacctgttctggtggaaatgaaaaccaagagctacaagatggctgctctgaggcctttgagaagaggacatcacagaaaggagaatctccactcactgactgctatggacctttctcaggacagctaattgccaccatgaaagaagcatgtcgctatgcactgcaagtgaaacctcagcgcctgatggcagctatgtacacatgtgacatcatggccactggtgatgttctcggtcgagtctatgctgtcttgtcaaagagagaaggtcgggtacttcaagaagaaatgaaagaagggacagacatgttcatcatcaaggctgtgctgcctgttgctgaaagctttggttttgctgatgaaatcaggaagaggacaagtggcctggccagcccacaactagtattcagccattgggagatcattcccagtgaccccttctgggtgccaactactgaggaggaatacttgcactttggggagaaggctgactctgagaaccaagcccggaagtacatgaacgcagtacgaaagcggaaggggctttatgtggaagaaaagattgtggagcatgcagaaaagcagaggacactcagcaaaaataagtagctacctactactggtggattcttttccttatagtgaatttaaaagtatcatcaagggtttaatattgggaaaatttctttttgccacattatctctgtttattcactttcaataaagttgatccatataaatatttt

SEQ ID NO: 15164 - protein, 857 aa, Homo sapiens
MKTLWGDYYINMKAKKIMKGDQAKGKKPLFVQLILENIWSLYDAVLKKDKDKIDKIVTSLGLKIGAREARHSDPKVQINAICSQWLPISHAVLAMVCQKLPSPLDITAERVERLMCTGSQTFDSFPPETQALKAAFMKCGSEDTAPVIIFVSKMFAVDAKALPQNKPRPLTQEEIAQRRERARQRHAEKLAAAQGQAPLEPTQDGSAIETCPKGDEPRGDEQQVESMTPKPVLQEENNQESFIAFARVFSGVARRGKKIFVLGPKYSPLEFLRRVPLGFSAPPDGLPQVPHMAYCALENLYLLMGRELEYLEEVPPGNVLGIGGLQDFVLKSATLCSLPSCPPFIPLNFEATPIVRVAVEPKHPSEMPRLVKGMKLLNQADPCVQILIQETGEHVLVTAGEVHLQRCLDDLKERFAKIHISVSEPIIPFRETITKPPKVDMVNEEIGKQQKVAVIHQMKEDQSKIPEGIQVDSDGLITITTPNKLATLSVRAMPLPEEVTQILEENSDLIRSMEQLTSSLNEGENTHMIHQKTQEKIWEFKGKLEQHLTGRRWRNIVDQIWSFGPRKCGPNILVNKSEDFQNSVWTGPADKASKEASRYRDLGNSIVSGFQLATLSGPMCEEPLMGVCFVLEKWDLSKFEEQGASDLAKEGQEENETCSGGNENQELQDGCSEAFEKRTSQKGESPLTDCYGPFSGQLIATMKEACRYALQVKPQRLMAAMYTCDIMATGDVLGRVYAVLSKREGRVLQEEMKEGTDMFIIKAVLPVAESFGFADEIRKRTSGLASPQLVFSHWEIIPSDPFWVPTTEEEYLHFGEKADSENQARKYMNAVRKRKGLYVEEKIVEHAEKQRTLSKNK

SEQ ID NO: 15165 - DNA, 3511 bp, Homo sapiens
  CDS (1152)..(1625)
gctcgcagactccggagtcgccaacatgtcgaccgccatgaatttcgggaccaagagcttccagccgcggcccccggacaagggcagcttcccgctggatcacttaggtgaatgtaaaagctttaaagagaaattcatgaagtgtcttcataacaataattttgaaaatgctttgtgcagaaaggaatcaaaagaatatttagaatgcaggatggagagaaaattgatgctacaagaaccattggagaaactgggatttggagacttgactagtggaaaatcagaggcaaaaaaatgaattttgatgagaagacccctgggccgtgttcagtggtctctcaggacggagggcatcatcctgcctcttaggttggctgaggcctgcgtgtggtgtccttagaaatgggcttcgaatagaagctccagccctgtgggggcgtctcctgggtagggagtggcgtcccgttttcccttaggagggtgtttctgcattgaacccctgagtgggacggcgttcccggcaaagctgggagggaggcgagcgtggggcaagacccttgtcttcgaggccggggccctcttgtatggggcggttttatgttgcagtcctctgatactttctgagttcaaagaggtaaatgtataaatttcagtcccttctgaacacagatatcatcagaaaattaccattccctagcaggatgttttcgtgtttgtattcgtatatgccagttcatttcctttgaaaaaaaaaaaaaagtggaacacaaagtaggaagtgagaaccttctggctttggatggattgacttcttgattctttctggttttgcctgaacaccaagtagcttcataatcaaagggtcattttctggtttgtatcagaccgtatttataaagttgggtatttaatttcagtaactcctgtattttaacagaaaaagaacctgagtccatttgcagttaggctcgcaccagctgtcttctgtgccagccagctccgcccgagaccccggcacgtgttcgcagcacagcctggcaggggccctgagcggagttctcagcccgtctgtgccaaagttgcctgtgggtcacggaaacccggcccatgtccacccagtgcgtcaggccagccggggcccaaacctgtggatggaacgcaggtgcctgcacatctggggcctcagccagacctgtctccttcccaggcactgtcggaaaggggctggctcctgtctggtcagtggaggatggtggcaggagacggggtggggaggtccaggtcacgtcctctctggcgaccctggcagtggctgtctccaagccctggcaggtggggccaccaatctggccgacctcaggctctgggaaacaggctgccctcgtccctctgcctgtgggtggctgaggcttctcagcccatctccagttctctgcagcaaaggccctctgtttctgtcctgcagtggtggccctttcgtggttaaacatgtccctcccctcctcacagaactgagtacctattgcggctgggcccgcccaaccctgtgtccctgcacccatgggttctaccacctgattcggctgcagctgtcactgtcccgtgtctgctctctgtcaggcctctgagtgctgcagacgtattaacatatcaccgctagttgatggaaagtcttgtttcttattagaatattttgtgtaggcacagggttgccccagcactgtctatagcaaccccagtgtcctcacagtgcacgtgagccgtgacgcagccaccgtggagtcggcgctgacgcggtgtggccacgtgccatgagctcgccaacgcagtgcggctatatggcgtgagcttactgtgaagtggagacaggcagggacacaggaaactacaaacgagaaatccagaaggaggagctggaactgatgggcatagccggccgcgagcccctccgagcacccctgggggtggagttctggctgtcatggcagagggtttcacatgctcaaaaagtaaatgaaccaggatgtgaggggaacacaacagaccatgccgacggagctcccgggcccaggccggggcctcttcccatcgcactctgacccgccgtcgggagtgcccaggcccgggtcgggcctgcctctccgctcgcaccgcactctgacccatcaggagtgtggggaagaccgtcgaccaaaggtgggaaagacaggaaagatactgtactctaagtagtaaatttgttttttgcgtggacgattctgaagctgtattctgagatggaaaaaactagaaatacatcgtggatgatgagagccaggtgtattgagctcctgcttttctaacgtacaaaggtaactggatagagaaacggagtgatcgccctcacctggccagggtgtgctccgagaccccagcaggtgccgaagccgcggatagtcccgaatcctgtccaggcgctgttttttcctgtacgtacctgtgatcaagtctgagatgtgacagcaaaactgacagaacttcgtgcttccctcttcaaaatgtcacagatgggcactgtgttcttaccggagatcttagcaacctcggcatctggctgtttttcttataggtcaggagtttccaccttttcccttaaaggaagcgcttggcagcttctccggtgtgtctgagtcgccagcatcaccactgtcctgttctggggccattcttaagtaaaataaaagcttcttggacccaagcgccacatcaccgcgatggctggtctgatcaccgagatggctgctgagtgcctggcaggcagggtggcgtggatggcccgaaacgctggacggagggagggttgatgtcccagcaggacggctgctcagaacagcacagaatcaaaaactcatgaatggtttatttctggaattttccacttagtatttttggactgtggctgaccatgggtaactgaaaccgtgtgtaagggggactgttgtgaggggctgtgcacaaatgcttcccagctcttgagggcctggacgcagtgacccgtgcactcagggtcttggccctgataccattctgtaaccaaaaggaaccagggccaggccagagaaggtatcagatgagctagagagtgaagaattgctgggatgaggagacttgttgaaataacacggggggatgggaaggagcatacggtggccagcctggggcagtgtgagcgtgaaaataaacaggctgggcgcagcggctcacgcctgcaatcccagcactttaggaggccaaggtgggaggatcacttgaggctaggagttcaagaccagcctgggcaacatgggtgaaaccctgtctctacaaaacaagaaaagtcagccgtgcgtggtgtcacccgcctgtagtcccagatactcaggaagctgaggcaggaggatcacttgagccagaggttaagtctgcagtgagctgtgattgtaccactgctctccagcctgagcaacagagccggaccctgtctcaccaaagg

SEQ ID NO: 15166 - protein, 158 aa, Homo sapiens
MERRCLHIWGLSQTCLLPRHCRKGAGSCLVSGGWWQETGWGGPGHVLSGDPGSGCLQALAGGATNLADLRLWETGCPRPSACGWLRLLSPSPVLCSKGPLFLSCSGGPFVVKHVPPLLTELSTYCGWARPTLCPCTHGFYHLIRLQLSLSRVCSLSGL

SEQ ID NO: 15167 - DNA, 2261 bp, Homo sapiens
aactgggcttggcttcctcaagcaaaagttcccttttctgaagaaataagaaatttgattctaccatatatttctgacatgaactttgtgcaagatttatgtgaagatctctatgaactttttaagactgacaaaggatttgacaaagccacttttgaaagtcagatgtctgtgatgaggggtcagatcttaaaccttactcaggcattgagagacgggaagagtcctttccagctagtacagataccttgtgtgattgtggaacgcagtcaaggtggaagtcagggtcggattgtccacctgagcaattcctttacccagactgtcaattgcaggaagccatttttttcctcctggtagtaaatgtcagagtaagagaaacaaactgtttagaattatcatgtttttaaaacatcatagtaatataaatctgctgttaggagctccagttgctaaaacctcaatttaagtctttaaaaggttgtattttgaatgtaaccaaaagtttacagttttttgtccaaatattaaatttctatttcagggaagaagtgctatatctcctatattgtatttttgtagaaaatttgtattttatgttgttgttagtttaaaaggtaattttacacatgctggaatgactgtaattactctagaattccaagtagaatacaataacttttaatattgagaagaatgttcatgctaattcttcttacattacaaaaggcctttgaggatgcctacgtctgaaattgctcttacgaactttaataaaatagttagctaatagaaaaacaggtaagaataaagcaatgttgccttaatttcaaaagctgctattttagaatttgaataagtactcctaaagtgaccattattagggaccagaaaattatatcttggctaagtaatagaggaccattttggtttttgtacttgagaatatttttggtgaattactttgttgtagtgaggaaaaaacctaagaaatttcccctttttttaaaaaatggaaatattcaattgagacttgaggggaataatagaaaattaaggtagatccccaatattttggaataccaaaattgccttaaaaattcccttctgtttcttacatgggatcaaatacttgagattagtacttcagagtactggccttgttcaatttagtacttcaattagtattaaacttcactaaaaagtaaaccatactccaaattgtatattggattgcattttggggtcctaggtcatacgttcttcaaaattattatgattgtactattgtacttgaaattacagatgttattataattacagtcaaatgtagactatcaggccaaattaaaggggagcatggcagataaccataaagtcatttatatttgattttgaaatgtatttttgtactttattttgaatatcatccatatgtctgacattattggaatttgtaacattgttaatgcactaagtgatttaaattcaattgatgaagatgtgattttacagaagcagaagtttcattttcttgaggcttaaaaccaatgtcaccacttgggcttaactgggtaatttgtggtctaggccttttgttttctaagcttactatcttgtgtttgtttatttgcttttaatgaagtattttgtgtagaaggttaaattaggatgcaaaacagatctgccattcctttttcccttatatcttccttttggtcctcatggacgagatgaatgaggattctgctgccctgagggagttcattggaaacctgcgttctcctacctcttccaaccctccattagctcaattttgagataatggaaaattgactggaaattcaaaactcaaactactatctttagatataaacactagtaattaaaatgtgccttttgaagatgttttctaagagaaaggaaatacgttgcagtgatgtgggtactgctttcataaaacagttttttcagtattttgagaattgccatattaatttttataatggaaaacttaataaattgctactgttttatatcataaaattaaaataccatggtaatatttgcaaaaggtctggccataccagaaaagtacagttgagatagttaagatataaccacaagtcagagtacattggttgtattttgtaaactttcatgaactgaattcttatttaaatagtatggttttttttcaataagtatatttatagtgacaaatgtggtagactaaaggtaataaaaatcattgtcttaag

SEQ ID NO: 15168 - DNA, 3073 bp, Homo sapiens
aatataatgaagaagtggctgacttaaagataaagcgatctaaacttcatgaacaagttttagatttgggcctgacatggaagaagataataaaatttttgaatgaaaaactggagaagagtaaaatgcaaagtataaatgaagacttaaaagatatattacatgctgcaaagcagatagaagtgaattgtccattccagaagaggaggctggatggaaaagaggaggatgagaagatgagcagagcttctgacagattcagaggactaagatgacaaaaatgactaaaatggacaaaagaagaaatagaaaatctgaatatttgactattaaaggaatttaatctgtaattaaaaaccttaagtacaaagaaatctatatgctatgatggctttaatggagaatgtcataatgtcatttaaaaaggtatgagagtactattgtagattaaaagaggttaaaggcatataataatcaaaatgtaatgtatgatccttgattgactcttgaatcagaaaaaaattacgtatttttggggccgttggagaaatctgaatatgggctggacatcattaggtaatattagatctcaggtgtgataatgttgtggctatgtaagaggatatcctaaatctcaggagaagcatactgcagtatatatagtggtatctcatgaagattaaaatgtactgtcaaatgtgtcagcaaaagaaatacacatgatgtgtgtgtgtgatcaagtgtttataatgagtggattaataaatatgagaagatagggtgatttgttgtaaagtaataaaggtttaaaaattacatgattcagtagagaaaaagcattttatgaatatctaacattacttatgataaaaaatctcagcaaactaggaatagaaggggattttgttaatctgataagctgtagctataaaaaacttggagaaaacatacttaatgctacaaagttagaagcttccctgaggtacggaattagacacaaatgcctgttaccacttctgtttctcactgtattaaaaatccttgctaacataatatggcaagaaaaagtaagggcataaagactggaaaaaaaaacttttccatttttcacatgactgtacctgtagaaaatgaatttaacaaggttaatataaaaatcaattttatttctacttactagaagcacattaaaaattacacttatctttatgtaacgtaatacattttaccttaaattttaaaattttattttacgtttacaaaagcatcaaaaacatcaaatacgtaggagtaaatttaacaaaaaataagcaagacttcatggaaaactaaaatattgagagaatttaaagaagatctaaataaacagagggatataccaagaattggaagactcactattataatgatatattttttacccaaattgatctgtagattcagtgctatcccaggcacagtcttatgtttgagggtgtgtgtgtgtgtgtgtgtgtgtatgtgtgcatgtgtgtgtgtggaaattgacaagggtaatatgaaagttatatggaaattcaaaggcaaagagcagcctggttaactttgaaaaataaaaagggagaacttactctagtagatcttaaaacttattataaagataagtatacagtgtggtgttggtccaagaataggcaaatggactagtatgacagaatatagcccagaaacaaacctacggatagaaatatacttgatttataatgaaggccaaacaatagtgagacaaggctattttttcagtatatggtgctgggtcaactgcatatacagatgaaaaaaagtacctattttacaaataattttaaacagcctacagaattaagcatgatacacaaaacaatacatcttctaaaagatgtaaaagagtgtcttcaggatctttgtatgtgcgaaaatttatcaaacagagaacaaaaagtacaaagggaatgattaagttggactgtagtaaaattaataccttctatttattaagagtaaaaaggcaaaacatggagtgggagaatatagcttcaagatatataaccaaaaagagagcttttatccaggttaaatacgagctcctacaaatcaataaggaaaggacagataatcctatatgaacatgagtaagagctttgaacaaggacttcacaagagatagttgaccagtaaacatgaaaagggcttcagcttcattggtagtcaaggatatgccactgcatgcccattagaatggttaaaatgtaaaagactgacatacctattgttaggatcaagaatgtgaactagaatttttgtctactgctgctagagtttacaattggtacaaccactttgagtaactgtttgacagtgtctactattacctactgtggttggacaagtgaaattttaaatcttagaacataaatatccaataaaaatgcttgtacatacatgtatatcaaaaataggtgcattcattgcaacattatttgtgatagccttaatgtagaaacaacccagttcattgttaaaaagcttaagttgtagtatgtagactgccttatagcagtaacggattacagctatgtataacattgtaagtgaatcttataatgttgacaaaagaagccatacaacacatattatgattccattaatatgaaactgaaaactaggcatgaccagtctctggttttagaagtcaggatagtggctgcttttgaggaaggaggtagtgactaggagtgaatatgagggaggtttctggggagctgataatgttctgattcttgaagtagttaaccagattacacaggtgtgttcgttttttgataattctttgaactgtatgtgtactgtatattttcttgttatattcaataaaaagaattactatgatttttatattacatagattaaataagaagtatttcagattgataagtaacacatgcttgtgtatttatttagcttaaggtttggctatcatggtgagaactcctatgtagcctgctcaggtcctggtaaacagtatcataagtataataaattggtgtttttcatt

SEQ ID NO: 15169 - DNA, 3338 bp, Homo sapiens
  CDS (201)..(1904)
gcaggggccagacccggacggctccagagcctccagagcctccgggtctgggcggcgcttcggctcctcccgagccgcctgctagccccgcgccgcactccatccccacaggctggggacgggcccggtgcggctgtgtgggttcgggagcggagttgcagaatccaaggacccattttgttctttctccgcactgctttatgggaggcattatggcccccaaagacataatgacaaatactcatgctaaatccatcctcaattcaatgaactccctcaggaagagcaataccctctgtgatgtgacattgagagtagagcagaaagacttccctgcccatcggattgtgctggctgcctgtagtgattacttctgtgccatgttcactagtgagctctcagagaaggggaaaccttatgttgacatccaaggtttgactgcctctaccatggaaattttattggactttgtgtacacagaaacggtacatgtgacagtggagaatgtacaagaactgcttcctgcagcctgtctgcttcagttgaaaggtgtgaaacaagcctgctgtgagttcttagaaagtcagttggacccttctaattgcctgggtattagggattttgctgaaacccacaattgtgttgacctgatgcaagcagctgaggtttttagccagaagcattttcctgaagtggtacagcatgaagagttcattcttctgagtcaaggagaggtggaaaagctaatcaagtgcgacgaaattcaggtggattctgaagagccagtctttgaggctgtcatcaactgggtgaagcatgccaagaaagagcgggaagaatccttgcctaacctgctacagtatgtgcggatgcccctactaacccccaggtatatcacagatgtaatagatgctgagcctttcatccgctgtagtttacaatgcagggatctggttgatgaagcaaagaagtttcatctgaggcctgaacttcggagtcagatgcagggacccaggacaagggctcgcctaggagccaatgaagtgcttttggtggttgggggctttggaagccagcagtctcccattgatgtggtagagaaatatgaccccaagactcaggagtggagctttttgccaagcatcactcgtaagagacgttatgtggcctcagtgtcccttcatgaccggatctacgtcattggtggctatgatggccgttcccgccttagttcagtggaatgtctagactacacagcagatgaggatggggtctggtattctgtggcccctatgaatgtccgacgaggtcttgctggagccaccaccctgggagatatgatctatgtctctggaggctttgatggaagcaggcgtcacaccagtatggagcgctatgatccaaacattgaccagtggagcatgctgggggatatgcagacagcccgggaaggtgccggactcgtagtggccagtggagtgatctactgtctaggaggatatgacggcttgaatatcttaaattcagttgagaaatacgaccctcatacaggacattggactaatgttacaccaatggccaccaagcgttctggtgcaggagtagccctgctgaatgaccatatttatgtggtggggggatttgatggtacagcccacctttcttccgttgaagcatacaacattcgcactgattcctggacaactgtcaccagtatgaccactccacgatgctatgtaggggccacagtgcttcgggggagactctatgcaattgcaggatatgatggtaattccctgctaagtagcattgaatgttatgaccctatcatcgacagctgggaagtcgtgacatccatgggaacccagcgctgtgatgctggtgtttgtgttctccgcgagaagtgaccattgttggagcaccatccagagctagtgaccagtccagtggacagttagtgggagtatcaaaaatcctttccagaatgtctgtttctcactatgtgcaccgggtgattacaggcaccagtgcagtgatgattgtacttatttgacacatactccccgtcgtcctggttcttgttcctgagaagggtgggtaacagatattccaggaaaaagaatgcacattgaatggatgtgagagaccacattgcctctcccactgctttggggagcactttcctgtcatttctaacttaccacatgcttggtgtactatatgtacgttgtgcctcatatgttgcaaagaactaaggtgagtatagcctactagatatgggcaatatccagcctagatgattggaaagataccagtttaagtaaacttggtaaaatccaagtctttttttttttttccaggaacaactacattttctcatatacaggtagctaggggcaacacagttccattctagagggaaacaaaagggagagccccacaaaactttggggacaagggagagagagactcatctgacacttcttttggaggtcaggatttgtatatcagaattgaagttagaattaagtgaattaaactgaatttgattgtgagtgaacctagaacagcactgaagtattacataacctggaagactgagaagggtatattatttgaaggatctttttatttccccgaggtctttcgcactggagacagcataaaagagtgaacaaatgttgggatgagagaagatgacatcaatgtgggagttcagtataactggggataaactagaagaacctgtgattttacagtcatcttattacctgccagggctcatctagccatggcaatgtttgccttgaatgggggtgaaagcctttctttgttggatcaaatactactacactattacacttccacactatttatttggggatgggctgggagtgacagtagcctagtagttcagctacctgattactgccccattcttttagaagcacatgtctgccaaggagtggtttgtactgctgtgtttggtacatctagtcttttttctgctataagttttccttacctgtcctttagtgtagattttattcatcacaggacagaataatcaaggacaaccaaaatccttttgttagtttcagtacctcagctatcaacatttctgagctaccattcaatgttcctctgtgtcatggagtgaaattcttgttttgtgggtattaggagtgtgggaatgtgataacctaaacaacctttgctctgaaattccatttttccctctttccctgagttgtattgacctacagagttaatttcctttgtatttttttaagaaaatattaaaaatcaacggtctcaaatgccgagagtttgtggct

SEQ ID NO: 15170 - protein, 568 aa, Homo sapiens
MGGIMAPKDIMTNTHAKSILNSMNSLRKSNTLCDVTLRVEQKDFPAHRIVLAACSDYFCAMFTSELSEKGKPYVDIQGLTASTMEILLDFVYTETVHVTVENVQELLPAACLLQLKGVKQACCEFLESQLDPSNCLGIRDFAETHNCVDLMQAAEVFSQKHFPEVVQHEEFILLSQGEVEKLIKCDEIQVDSEEPVFEAVINWVKHAKKEREESLPNLLQYVRMPLLTPRYITDVIDAEPFIRCSLQCRDLVDEAKKFHLRPELRSQMQGPRTRARLGANEVLLVVGGFGSQQSPIDVVEKYDPKTQEWSFLPSITRKRRYVASVSLHDRIYVIGGYDGRSRLSSVECLDYTADEDGVWYSVAPMNVRRGLAGATTLGDMIYVSGGFDGSRRHTSMERYDPNIDQWSMLGDMQTAREGAGLVVASGVIYCLGGYDGLNILNSVEKYDPHTGHWTNVTPMATKRSGAGVALLNDHIYVVGGFDGTAHLSSVEAYNIRTDSWTTVTSMTTPRCYVGATVLRGRLYAIAGYDGNSLLSSIECYDPIIDSWEVVTSMGTQRCDAGVCVLREK

SEQ ID NO: 15171 - DNA, 2911 bp, Homo sapiens
  CDS (218)..(1993)
agtgggctctgcggataactcagacgccattaagctggggaatccaaactctaaaagaaggacgcattttaggtaagatctagtggctagatcttcagggtgggcttcgttcttgtggaaatcagtcaagaaagatcggattcgcggttatttatgcaaatcatctgggtggattgtgtacggagtcaaactgcgccttctggaccgggtctgaacaatggagactgcgctagcaaaaacgccacagaaaaggcaagttatgtttcttgctatattgttgcttttgtgggaggctggctctgaggcagttaggtattccataccagaagaaacagaaagtggctattctgtggccaacctggcaaaagacctgggtcttggggtgggggaactggccactcggggcgcgcgaatgcattacaaaggaaacaaagagctcttgcagcttgatataaagaccggcaatttgcttctatatgaaaaactagaccgggaggtgatgtgcggggcgacagaaccctgtatattgcatttccagctcttactagaaaatccagtgcagttttttcaaactgatctgcagctcacagatataaatgaccatgccccagagttcccagagaaggaaatgctcctaaaaatcccagagagcacccagccagggactgtgtttcccttaaaaatagcccaggactttgacataggtagcaacactgttcagaactacacaatcagcccaaattcacactttcatgttgctacgcataatcgcggagatggcagaaaatacccagagctggtgctggacaaagcgctggaccgggaggagcggcctgagctcagcttaacactcactgcactggacggtggggctccgcccaggtccgggaccaccacaattcgcattgtcgtcttggataataatgacaacgcccccgaatttttacaatcattctatgaggtacaggtgcccgagaacagcccccttaactccttagttgtcgttgtctccgctcgagatttagatgcaggagcatatgggagtgtagcctatgctctattccaaggcgatgaagttactcaaccatttgtaatagacgagaaaacagcagaaattcgcctgaaaagggcattggatttcgaggcaactccatattataacgtggaaattgtagccacagatggtgggggcctttcaggaaaatgcactgtggctatagaagtggtggatgtgaatgacaacgcccctgaactcaccatgtctacgctctccagccctaccccagaaaatgccccggaaactgtagttgccgttttcagtgtttctgatccagactccggggacaacggtaggatgatttgctccatccagaatgatctcccctttcttttgaagcccacattaaaaaacttttacaccctagtgacacagagaacactggacagagagagccaagccgagtacaacatcaccatcactgtcaccgacatggggacacccaggctgaaaaccgagcacaacataacggtcctggtctccgacgtcaatgacaacgcccccgccttcacccaaacctcctacaccctgttcgtccgagagaacaacagccccgccctgcacatcggcagtgtcagcgccacagacagagactcaggcaccaacgcccaggtcacctactcgctgctgccgccagaacccacacctgcgcctcgcctccctggtctccatcaacgcggacaacggccacctgtttgccctcaggtcgctggactacgaggccctgcaggcgttcgagttccgcgtgggagccacagaccgcggctccccggcgctgagcagcgaggcgctggtgcgcgtgctggtgctggacgccaacgacaactcgcccttcgtgctgtatccgctgcagaacggctcggcgccttgcaccgagctggtgccccgggcggccgagccgggctacctggtgaccaaggtggtggcggtggacggtgactcgggccagaacgcctggctgtcgtaccagctgctcaaggccacggagcccgggctgttcagcatgtgggcgcacaatggcgaggtgcgcaccgccaggctgctgagcgagcgcgacgcggccaagcacaggctggtggtgctggtcaaggacaatggcgagcctccgcgctcggccaccgccacgctgcacgtgctcctggtggacggcttctcccagccctacctgccgctgccggaggcggccccggcccaggcccaggccgactcgctcactgtctacctggtggtggcattggcctcggtgtcgtcgctcttcctcttttcggtgctcctgttcgtggcagtgcggctgtgcaggaggagcagggcggccccggtcggtcgctgctcggtgcccgagggcccctttccagggcatctggtggacgtgagcggcaccgggaccctatcccagagctaccactacgaggtgtgtttgaccggagactcaggggccggcgagttcaagttcctgaagccgattattcctaaccttttgccccagggcgctggtgaagaaatagggaaaactgctgccttccggaatagctttggattaaattagagatctcgtgatgacgcgttgttttctgccatttatcccaaactttttcagatctagaattcgagagtgtcatggacaaaaatttcaccttgagattgagcttttatttccctttttaatggatttgtctgttgaacttcatgctgtccaagtgttgaaaagtcaattttatttcattgcatttatttacatagtgtcattccaaatccatgcatgctgttgattttcctgagatttttttctcttcttgttggtatttgttgtgataaaccaccttaataaaatcaagtattaattttattttctat

SEQ ID NO: 15172 - protein, 592 aa, Homo sapiens
METALAKTPQKRQVMFLAILLLLWEAGSEAVRYSIPEETESGYSVANLAKDLGLGVGELATRGARMHYKGNKELLQLDIKTGNLLLYEKLDREVMCGATEPCILHFQLLLENPVQFFQTDLQLTDINDHAPEFPEKEMLLKIPESTQPGTVFPLKIAQDFDIGSNTVQNYTISPNSHFHVATHNRGDGRKYPELVLDKALDREERPELSLTLTALDGGAPPRSGTTTIRIVVLDNNDNAPEFLQSFYEVQVPENSPLNSLVVVVSARDLDAGAYGSVAYALFQGDEVTQPFVIDEKTAEIRLKRALDFEATPYYNVEIVATDGGGLSGKCTVAIEVVDVNDNAPELTMSTLSSPTPENAPETVVAVFSVSDPDSGDNGRMICSIQNDLPFLLKPTLKNFYTLVTQRTLDRESQAEYNITITVTDMGTPRLKTEHNITVLVSDVNDNAPAFTQTSYTLFVRENNSPALHIGSVSATDRDSGTNAQVTYSLLPPEPTPAPRLPGLHQRGQRPPVCPQVAGLRGPAGVRVPRGSHRPRLPGAEQRGAGARAGAGRQRQLALRAVSAAERLGALHRAGAPGGRAGLPGDQGGGGGR

SEQ ID NO: 15173 - DNA, 2818 bp, Homo sapiens
  CDS (688)..(1347)
aaaatatgaaggcaaaggaaatacatgtgacttaatgaacctcacacaaactgaaggttgaagtcaggctccggggctttttcctggacttatcctctgttttcccctgtgtacttgggcaaggatcttcacctgtgtcttagtatcgatttttatgaatcagtactgatggagtatatgtgtgtttaatggtgaatattaaccatagaagggctgagtgctcctccccatcttgggactcataatctgtgaaataaaacagtctgggcctccctgcccgggtagcatcaggatagacagatgaagagaagagaaagtaatgtgtcttgggcatcttctgtatgccaggcaccatgccagaggctttaagtacttcatcttacttgactcctcagatggccctgttagaagcctattttatgcaaaaggaaactgtagctgggggtaagtaacttgccaaggggtcacacagctagaaagcggtggaccctagatgcaggcgcagccattcagaccccacagtccacattcctttgagccagtccattgagggtcctcagggaatgtggcgggtcccctggtctcgctcccccgcagatcttgcatctcagcatgcgcctaccacatcagttgacattagcacagcttttccattaggagaacgaagtgaaactcctggtagaacggatgatggctctgcagaccgacattgtggacttacagaggagccccatgggccggaagcaggggggaacgctggacgacctagaggagcaagcaagggagctgtacaggagactaagggaaaaacctcgagaccagcgaactgagggtgacagtcaggaaatggtacggctgctgcttcaggcaattcagagcttcgagaagaaagtgcgagtgatctatacgcagctcagtaaaactgtggtttgcaagcagaaggcgctggaactgttgcccaaggtggaagaggtggtgagcttaatgaatgaggatgagaagactgttgtccggctgcaggagaagcggcagaaggagctctggaatctcctgaagattgcttgtagcaaggtccgtggtcctgtcagtggaagcccggatagcatgaatgcctctcgacttagccagcctgggcagctgatgtctcagccctccacggcctccaacagcttacctgagccagccaagaagagtgaagaactggtggctgaagcacataacctctgcaccctgctagaaaatgccatacaggacactgtgagggaacaagaccagagtttcacggccctagactggagctggttacagacggaagaagaagagcacagctgcctggagcaggcctcatgatgtggggggactcgaccccctgacatggggcagcccatagcaggccttgtgcggtggggggactcgaccccctgacatggggctgcctggagcaggccgcgtgacgtggggctgcctggccgcggctctcacatggtggttcctgctgcactgacggcccaggggtctctggtatccagatggagctctcgcttcctcagcagctgtgactttcacccaggacccaggacgcagccctccgtgggcactgccggcgccttgtctgcacactggaggtcctccattacagaggcccagcgcacatcgctggccccacaaacgttcaggggtacagccatggcagctccttcctctgccgtgagaaaagtgcttggagtacggtttgccacacacgtgactggacagtgtccaattcaaatctttcagggcagagtccgagcagcgcttggtgacagcctgtcctctcctgctctccaaaggccctgctccctgtcctctctcactttacagcttgtgtttcttctggattcagcttctcctaaacagacagtttaattatagttgcggcctggccccatcctcacttcctctttttatttcactgctgctaaaattgtgtttttacctactactttggtggttgtcctcttttcggcaaagttggagcgagtgccaagctctccatctgtggtcctttctgccaagagcgactcatagtaaccaggatgggagagcagctgccttattctgaatcccaaaaattacttgggggtgattgtcacagaggagggacagaaagggtatctgctgaccaccagcctgcctacccatgcccatgtctccattcctgctcaagcgtgtgtgctgggccggggagtccctgtctctcacagcatctagcagtattattaaatggattcattttaaaaatagctcctatattttgtaacatgtctcaaacactcatactgggttccacaatccactgttagaatacctatggttagggcttctgaactaaaataatggaaaattttaacaatttgtatagtgcctggatcattactagtgccataaccctgcttcttcaacatttcacagaacttctcttttatataaaggcaagagcacaaaatgagttcagatgatcacaaacaggtgagttttgttggagaagaaagttggagtaggagactttcacaagtggtttccatggagatagaatgaagcattctgtggtcaagtaagtttagggagctattcatgtttcacttgctttgtggagattcacactatgcactgggaaagtatctgaaaagtcttataataaagaaacaggcttaactttgtgtaagaacactgtttatcaatgtcatttggctatagaaacattttctcctgctgattgtgtgtgtgaaacatgtattaacattccaatgaactagcatttaataaagcacaattttgg

SEQ ID NO: 15174 - protein, 220 aa, Homo sapiens
MMALQTDIVDLQRSPMGRKQGGTLDDLEEQARELYRRLREKPRDQRTEGDSQEMVRLLLQAIQSFEKKVRVIYTQLSKTVVCKQKALELLPKVEEVVSLMNEDEKTVVRLQEKRQKELWNLLKIACSKVRGPVSGSPDSMNASRLSQPGQLMSQPSTASNSLPEPAKKSEELVAEAHNLCTLLENAIQDTVREQDQSFTALDWSWLQTEEEEHSCLEQAS

SEQ ID NO: 15175 - DNA, 1960 bp, Homo sapiens
  CDS (31)..(1704)
gctggaagagcagcggcccgagccggggccatggcgaagctgctgagctgcgtcctaggcccccggctctacaaaatctaccgggagagggactctgaaagggccccggccagcgtccctgagacgccaacggcagtcactgccccccattccagctcctgggatacgtactatcagccccgtgccctggagaaacatgctgacagcatcctggcactggcttcagtattctggtccatctcttattactcctctcccttcgccttcttctacttgtacaggaaaggttacttgagtttgtccaaagtggtgccgttttctcactatgctgggacattgctgctacttctggcaggtgtggcctgcctccgaggcattggccgctggaccaacccccagtaccggcagttcatcaccatcttggaagcaacacatcggaaccagtcttcagaaaacaagaggcagcttgccaactacaactttgacttccggagctggccagtcgacttccactgggaagaacccagcagccggaaggagtctcgagggggcccttcccgccggggtgtggccctgcttcgcccagagcccctgcaccgggggacagcagacaccctcctcaaccgggttaagaagctgccttgtcagatcaccagctacctggtggcgcacaccctagggcgccggatgctgtatccaggctctgtgtacctgctgcagaaggccctcatgcctgtgctgctgcagggccaggcccgactggtggaagagtgtaatgggcgccgggcaaagctgctggcctgtgatggcaatgagattgacaccatgtttgtggaccggcgggggacagctgagccccagggacagaagctggtgatctgctgtgaggggaatgctgggttttatgaggtgggctgcgtctccacgcccctggaagctggatattcagtcctgggctggaatcatccaggctttgctggaagcacgggggtgccattcccgcagaatgaggctaatgccatggatgtggtggtccagtttgccatccaccgcctgggcttccagccccaggacatcatcatctacgcctggtccatcggcggcttcactgccacgtgggcagccatgtcctacccagatgttagtgccatgatcctggatgcctcctttgatgacctggtgcccttggccttgaaggtcatgccagacagctggaggggcctggtgaccaggaccgtgaggcagcatctcaatctaaacaacgcggagcagctgtgcagataccagggtcctgtactgctgatccggagaaccaaggatgagatcatcaccaccacggttcctgaggacatcatgtccaaccgaggcaatgacctcctgctgaagctcctgcagcatcggtatccccgggtgatggcagaggagggtcttcgagtggtgaggcagtggttggaggcctcctcacagctggaggaagcctcaatttatagccgatgggaggtggaagaggactggtgtctgtctgtcctccgctcctaccaggcagaacacgggcccgacttcccctggagcgtgggggaggacatgagtgcagatggacggcggcagctggctttgtttctggctcggaagcatctgcacaactttgaggccactcactgcaccccactcccagcccagaacttccagatgccctggcacctctagggaccaactgggactcattatggaagaatggggtgagaggagacatgaggaaagaccctcttatttgtgattctctgtgttcatgttgctgtttatagtttgtggaaagtgggggaccatcccccttctcaccactgttcctcttgcacgtttcccctcattcatgtggctgtacttaaccttctccaacatacatcctgcattacatgaatggattattcctaataattaataaaaaggtattttttctact

SEQ ID NO: 15176 - protein, 558 aa, Homo sapiens
MAKLLSCVLGPRLYKIYRERDSERAPASVPETPTAVTAPHSSSWDTYYQPRALEKHADSILALASVFWSISYYSSPFAFFYLYRKGYLSLSKVVPFSHYAGTLLLLLAGVACLRGIGRWTNPQYRQFITILEATHRNQSSENKRQLANYNFDFRSWPVDFHWEEPSSRKESRGGPSRRGVALLRPEPLHRGTADTLLNRVKKLPCQITSYLVAHTLGRRMLYPGSVYLLQKALMPVLLQGQARLVEECNGRRAKLLACDGNEIDTMFVDRRGTAEPQGQKLVICCEGNAGFYEVGCVSTPLEAGYSVLGWNHPGFAGSTGVPFPQNEANAMDVVVQFAIHRLGFQPQDIIIYAWSIGGFTATWAAMSYPDVSAMILDASFDDLVPLALKVMPDSWRGLVTRTVRQHLNLNNAEQLCRYQGPVLLIRRTKDEIITTTVPEDIMSNRGNDLLLKLLQHRYPRVMAEEGLRVVRQWLEASSQLEEASIYSRWEVEEDWCLSVLRSYQAEHGPDFPWSVGEDMSADGRRQLALFLARKHLHNFEATHCTPLPAQNFQMPWHL

SEQ ID NO: 15177 - DNA, 2593 bp, Homo sapiens
  CDS (247)..(1092)
gtcttctcggtcacgttttctgttatatttgcctatgtagctgatgtcactcaggagcacgagcgaagtacagcttatggatgggtctcagccacctttgcggctagtcttgtcagcagcccggccattggagcatatctttctgccagttacggagacagcctcgttgtgctggtggccacagtggtggctcttctggacatctgcttcatcttagtggctgttccagaatctctgcctgagaaaatgagaccggtttcctggggagctcagatttcttggaaacaagcagacccttttgcgtcgttgaagaaagttggaaaagattctactgtcttactaatctgcatcaccgtgtttctttcataccttcctgaagctggacagtattcaagtttttttctctatctcaggcaggtcataggttttggatctgttaaaattgcagcattcatagctatggtaggaattctgtctattgtggctcagacggcctttcttagcatcttgatgagatcattaggaaataagaatactgtcctccttggcttgggcttccagatgctccagttagcctggtacggttttggatcacaggcctggatgatgtgggcagcagggaccgtggctgccatgtccagcatcacgtttccggcaatcagtgccctcgtcactcggaatgcagagtcagatcagcaaggagttgcccaggggatcataactggaataagaggactatgcaatggcctggggccagcactgtatggcttcatattctacatgttccatgtggaactgactgagttgggcccgaaattgaattctaacaacgttcccctgcagggagctgtcatcccaggcccgccgtttttatttggggcatgtatagtccttatgtcttttctggttgccttattcattcctgaatacagtaaagccagtggagttcaaaaacacagtaacagcagcagcggcagcctgaccaacaccccagaacggggcagtgatgaggacattgagccactactgcaagacagcagcatctgggagctctcttcatttgaggagcctgggaatcagtgcactgagctgtaaactcggcagaaagtgggattctgcatacgccatctctgagagccatggagggagccacacccctggtgacttcatggtgctggatgggagacgctagcggcatccttcagggccaagtttgataaataccaccgccatcattctgctcatcctcctcctgtttttttttttctcttacattctttttttttttcctgtttatacattagaacaagataagatttgaaatacttccttgcaaataatgtgcaactcccaaggtgaaactcaaatagaaaaagtcatctctctggtagaaaggatggctttcctgtaatgactatagagtaagagtggcagcaatctttccatgcccttttcagcagaaggcacagaacagtagcgggactgccatctctggcaagatttcaggtaaagaatctcttcttaatttctaccttcctgtttctctgaatcagcccataggtgttgatgagtggccactcttaaagagtcactcagtatcagggatctactgtctttgttcaaaggtcaaataaaaacctagtctccttttattctactttctattcttagctagaatgaaactcagcatatatacacttctggacataataatattgaatagtaattacctttactagatgaaagaaattttcattacaaacttaaatcatgtaaaactcaacaactcagattcctggacctggtgtcctggttgggtccaaggtgattttacagaagaaaaaaacaactcaagcattctggtggcaacatagagattgtaggctgcttctaagaaagttattaacaatttggaaattcctaagtaggatgagagttagtaactggatacgagtgaagtttatatccaagttcagactcaaaggcattattatgatttgcttcttcccatgtcttccatgtcctgcttctcaaagtttttctcatccatcacactcctgccttaactgctctgagtatgcatttgttttcaattcatctttatttcaatctgtttaacttttgaatcgcatgggaatacgcacattaagttcctttctaaaataaggttttatgaagctgagtttcacgataagtgtcttgctattttttgagatgttttatggacaaagaaaactttacagatttatatgtattttgctgcaccagtaaatggaccattaactagggcccacctttaacagagcacccctttgaaagttttataggtatgaaatatatgtagatatttgtaaagggttttaattttttttttgatggggtgctgtgtaaatcttgtatttataaatgtaatgaaggtattgacagaaaaaaatatatacaacttttataaaggattgtgtactgactgaatacatttaaaagaaaatatattttgaaacctgttctgctatgaacagagataacatatctttttactatgctattggtttttaggttaagcttcctaatgcataataaatttacagtggtt

SEQ ID NO: 15178 - protein, 282 aa, Homo sapiens
MRPVSWGAQISWKQADPFASLKKVGKDSTVLLICITVFLSYLPEAGQYSSFFLYLRQVIGFGSVKIAAFIAMVGILSIVAQTAFLSILMRSLGNKNTVLLGLGFQMLQLAWYGFGSQAWMMWAAGTVAAMSSITFPAISALVTRNAESDQQGVAQGIITGIRGLCNGLGPALYGFIFYMFHVELTELGPKLNSNNVPLQGAVIPGPPFLFGACIVLMSFLVALFIPEYSKASGVQKHSNSSSGSLTNTPERGSDEDIEPLLQDSSIWELSSFEEPGNQCTEL

SEQ ID NO: 15179 - DNA, 2996 bp, Homo sapiens
  CDS (389)..(2023)
aaaactcttctcagacccgggagcgtccgggacgcggagcccggagctggggcgacgaggcgattgcgggggcctgggctagctgctggctaccaatattctactttctgtctctatgtatgtgactaccctggttacctcatataatctccctggaaaaggagacatgaatgtctgcaatgatacttcctgacaagaagttgatacaagaaaaggaaaggagattaacagctagtgagcagaatttcgaacagcaggatttcgtattttttgcttccaactgcacacttccgtttcccacttttaaatcagagatacctacactcaaaacccagacaaggcaaaaggatacctttcttgtatattttttgagatcgaagaaacgacaatgtccaggaaacagaaccagaaggattcatcaggattcatttttgatttgcagtccaataccgtactggcccagggaggagcttttgagaacatgaaagagaagataaatgcggtacgtgcaatagttcctaataagagcaacaatgaaattatcctggttttgcagcactttgataactgtgtggacaaaacagtacaagcattcatggaaggtagtgccagtgaagtactcaaagaatggacagtaacaggcaagaaaaagaacaaaaagaagaaaaacaaaccgaaacctgccgcagaaccaagtaacggcatcccagattccagtaaatcagtttccattcaagaggaacagtctgcgccttcctcagagaaaggtggtatgaatggctaccatgtcaatggtgccatcaatgacactgagtctgtggactcactcagtgaaggtttggagacactttcaatagatgccagagaattggaggatcccgagtctgccatgctagatacgctggacagaacaggatccatgctgcagaatggtgtctctgattttgagaccaagtctttgactatgcactctattcacaattctcaacaacccaggaatgctgccaaatctctctcaagacctaccacagaaactcagttttcaaatatggggatggaagatgttcccctcgccaccagtaaaaagctaagttccaatattgaaaaatctgtaaaagacctccagcgctgcacagtgtctcttgcacggtatcgagttgtagttaaagaagagatggatgcctccattaagaaaatgaaacaagcctttgctgaattggagagctgtttaatggatcgagaagtggcgttgcttgctgaaatggacaaagtgaaagctgaagcaatggaaattttgctcagccgacaaaagaaggctgaacttctaaagaagatgactcatgtggctgttcaaatgtcagagcagcaattggttgagctcagagctgatatcaagcactttgttagtgaacgtaaatatgatgaggatctgggacgagtagcccggttcacctgtgatgtagagaccctaaagaagagcattgattcatttggacaagtgtctcatccaaagaacagctattcgaccagatcccgatgtagctcagttacatctgtgtccttgagtagcccaagtgatgcctctgctgcttcctcttccacctgtgcctctcctcccagccttacaagtgctaacaagaaaaactttgcaccgggagagactcctgcagccatagcaaactccagtggccagccctaccagccacttcgggaggtattgccagggaacagacgaggaggacagggctataggccacaaggccaaaagtccaatgaccccatgaaccaagggcggcatgacagtatgggtcgttacagaaacagctcgtggtattcatctggttccaggtatcagagtgctccatctcaggcaccaggaaacaccattgaaagaggccagactcactctgcagggaccaatggaactagagtcagcatggagcccagccctcccacgccttcattcaaaaaggggctcccccagcgcaaacccaggacctctcagactgaagccgtgaactcttgagagaaaatccagttggcctctctcctctatccacacaattcaacttgataactggactttaggaaacttacagttagatgtaataacaaaaagaagtttatgcgtatcactttttgtgccattctaagtatttttggttcttgtctccttatttcctctttaccatttttggaggggaagctattttttttccttgatctttcccagtgatatggattgaatctggttggtcatttccaccaggaatcagaggcagctgttaccaggtttcggccttccagttgatccctccactgtccaggctgtctcaggaggaggtgaatcagagctagtctgtcacctttccaatctaagccgaagccacaggtgcctgacaggttcccttctaacaactatttgaccaagagaggcaatcagggggttgtatactgcactggattcgccagagaagggaaaatttaattagtgaagaggaaagaacactaggaaacatttgagaacctgcctctatcccagaacgtgctggagatttgacactcaaatcagtgtttagtcttctgcttggcaccatagcttaacctgcagtttcttcaaaatgcccaatgccttgtttcctattaccttagattgcaaaccagtctagggaagtctatgagaaagtagcatttaattaaagtttaaaaaaaaaaaggttgggcgttgtggctcatgcctgtaatcccagcactttgggaggctgaggcgggtggatcactaggtcaggagttcaagaccagcctggccaacatggtgaaaccctgtctgtactaaaaatacaaaagttagctgagcatggtggcgtgtgcctgtaatctcagctactcaggaggctgaggcaggagaatcgcttgaacccaggaggcggaggctgcagtgagctgagattgtgccactgcactccagcctgggagacagagcaagactcagtctc

SEQ ID NO: 15180 - protein, 545 aa, Homo sapiens
MSRKQNQKDSSGFIFDLQSNTVLAQGGAFENMKEKINAVRAIVPNKSNNEIILVLQHFDNCVDKTVQAFMEGSASEVLKEWTVTGKKKNKKKKNKPKPAAEPSNGIPDSSKSVSIQEEQSAPSSEKGGMNGYHVNGAINDTESVDSLSEGLETLSIDARELEDPESAMLDTLDRTGSMLQNGVSDFETKSLTMHSIHNSQQPRNAAKSLSRPTTETQFSNMGMEDVPLATSKKLSSNIEKSVKDLQRCTVSLARYRVVVKEEMDASIKKMKQAFAELESCLMDREVALLAEMDKVKAEAMEILLSRQKKAELLKKMTHVAVQMSEQQLVELRADIKHFVSERKYDEDLGRVARFTCDVETLKKSIDSFGQVSHPKNSYSTRSRCSSVTSVSLSSPSDASAASSSTCASPPSLTSANKKNFAPGETPAAIANSSGQPYQPLREVLPGNRRGGQGYRPQGQKSNDPMNQGRHDSMGRYRNSSWYSSGSRYQSAPSQAPGNTIERGQTHSAGTNGTRVSMEPSPPTPSFKKGLPQRKPRTSQTEAVNS

SEQ ID NO: 15181 - DNA, 2486 bp, Homo sapiens
  CDS (102)..(2279)
cccgggacgtttggtgcgtcttctaagggcgtgggcgagtttacgcgggccagttgttgctggtcgcatgggagctgctgctaaataatttctgctcagccatgtcgccggctccagatgcagccccggctcctgcgtcgatctccctgtttgacctcagcgcggatgctccggtctttcagggcctgagcctggtgagccacgcgcctggggaggctctggcccgggctccgcgtacttcctgttcaggctcaggggagagagaaagcccagaaagaaagctactccagggtcctatggatatttcagagaagttattttgttcaacttgtgaccagaccttccagaaccaccaagaacagagggaacattataagcttgactggcatcggtttaacctaaagcaacgtctcaaggacaagcctctcctgtctgccctggactttgaaaagcagagctccacaggagatctttccagcatctcgggatcagaagactcagactcagccagtgaggaggacttgcagacactggatcgggagagggctacatttgagaagttgagccgacccccaggcttttaccctcatcgagttcttttccagaatgcccagggccagtttctttatgcctaccgctgtgtcctaggccctcatcaggatcccccagaagaggcagaactgctgctacagaacctgcaaagtagaggtcccagagactgcgtggtgctcatggctgcagctgggcactttgctggtgctatatttcaagggagagaagtggtgacacacaaaacttttcaccgctatacggttcgggccaagcggggcacagcccaggggcttcgggatgcccgaggtgggccatcacactctgctggagccaacctgaggcgctacaatgaagccacactatataaggatgttcgtgacctgctggcagggccaagctgggctaaggcgctggaggaggctggtacaatactgttgcgtgctccccgctctggccggtctttgttctttggaggcaagggagcacccctgcaaaggggggatccccgactttgggatatccccctcgccacccgcagacccaccttccaagagctacagcgtgtgctccataagctgaccactttgcatgtctatgaagaagaccctcgggaagcagtcagactgcactcacctcagacacactggaaaacagtaagagaggagagaaagaagcctactgaggaagaaataagaaagatctgcagggatgaaaaggaagcgctggggcagaatgaggaatctcccaaacagggttcagggtcggagggagaagatggctttcaggtagagttggagctagtggagttgactgtggggactctggatctttgtgagtctgaagtattgcccaagcggaggaggagaaaaaggaataagaaggagaaaagccgagaccaggaggctggggcacatcggactcttctccagcaaactcaagaagaggagccttccacacagtcatcccaggcagttgctgcccccttgggccctttgctggatgaggccaaagcccctggtcagccagagctctggaatgcactgcttgctgcttgccgagctggagatgttggagtgctaaagctgcagctagctcccagccctgcagaccctagagttctgtctctgctcagtgcccccttgggctccggtggctttactctcctgcatgcagcagctgcagctggaagaggctcagtggttcgtctgctgctggaagcaggtgctgaccccactgtgcaggactctcgggcccggccaccttatactgttgcggctgacaaatcaacacgtaatgagttccgaaggttcatggagaagaatccagatgcctacgattacaacaaggctcaggtgccaggaccattgacaccagaaatggaggcacggcaggctacacggaaaagggagcagaaggcagcccggcggcaacgggaggaacagcagcagaggcagcaggagcaggaggagcgtgaacgagaagagcagcggcgatttgccgccctcagtgaccgagagaagagagctctggctgcagagcgccgactcgctgcccagttgggagcccctacctctccaatccctgactctgcaatcgtcaatactcgacgctgctggagttgtggggcatccctccaaggcctgactccctttcactacctcgacttctctttctgctccacacgttgcctccaggatcatcgccgtcaggcagggaggccctcttcctgatctcttacagctctacctggggccaactcagggacctgagagggcacattcacagcagccctaggttttttcttccccgtgaaaccagagatgatttggaagatgggggtgaaggacactcgggaactagggcaaagacagggctagaggtatgtggagctggtactgtctctggaattttaatcacaataaagtttggcaagg

SEQ ID NO: 15182 - protein, 726 aa, Homo sapiens
MSPAPDAAPAPASISLFDLSADAPVFQGLSLVSHAPGEALARAPRTSCSGSGERESPERKLLQGPMDISEKLFCSTCDQTFQNHQEQREHYKLDWHRFNLKQRLKDKPLLSALDFEKQSSTGDLSSISGSEDSDSASEEDLQTLDRERATFEKLSRPPGFYPHRVLFQNAQGQFLYAYRCVLGPHQDPPEEAELLLQNLQSRGPRDCVVLMAAAGHFAGAIFQGREVVTHKTFHRYTVRAKRGTAQGLRDARGGPSHSAGANLRRYNEATLYKDVRDLLAGPSWAKALEEAGTILLRAPRSGRSLFFGGKGAPLQRGDPRLWDIPLATRRPTFQELQRVLHKLTTLHVYEEDPREAVRLHSPQTHWKTVREERKKPTEEEIRKICRDEKEALGQNEESPKQGSGSEGEDGFQVELELVELTVGTLDLCESEVLPKRRRRKRNKKEKSRDQEAGAHRTLLQQTQEEEPSTQSSQAVAAPLGPLLDEAKAPGQPELWNALLAACRAGDVGVLKLQLAPSPADPRVLSLLSAPLGSGGFTLLHAAAAAGRGSVVRLLLEAGADPTVQDSRARPPYTVAADKSTRNEFRRFMEKNPDAYDYNKAQVPGPLTPEMEARQATRKREQKAARRQREEQQQRQQEQEEREREEQRRFAALSDREKRALAAERRLAAQLGAPTSPIPDSAIVNTRRCWSCGASLQGLTPFHYLDFSFCSTRCLQDHRRQAGRPSS

SEQ ID NO: 15183 - DNA, 2593 bp, Homo sapiens
  CDS (133)..(1734)
cacatccgggagtcgctgccggccctacgtagcaaactacagagccagctgctgtccctggagaaggaggtggaggagtacaagaactttcggcccgacgaccccacccgcaaaaccaaagccctgctgcagatggtccagcagtttggggtggattttgagaagaggatcgagggctcaggagatcaggtggacactctggagctctccgggggcgcccgaatcaatcgcatcttccacgagcggttcccatttgagctggtgaagatggagtttgacgagaaggacttacgacgggagatcagctatgccattaagaacatccatggagtcaggacggggctcttcacccccgacatggcctttgaagccattgtgaaaaaacagattgtaaaactcaaagagccgagtttgaagtgtgttgatctcgtggtctcagagctggccacggtcataaaaaagtgtgccgagaagctcagttcctacccccggttgcgagaggagacagagcgaatcgtcaccacttacatccgggaacgggaggggagaacgaaggaccagattcttctgctgatcgacattgagcagtcctacatcaacacgaaccatgaggacttcatcgggtttgccaatgcccagcagaggagcacgcagctgaacaagaagagagccatccccaatcaggtgatccgcaggggctggctgaccatcaacaacatcagcctgatgaaaggcggctccaaggagtactggtttgtgctgactgccgagtcactgtcctggtacaaggatgaggaggagaaagagaagaagtacatgctgcctctggacaacctcaagatccgtgatgtggagaagggcttcatgtccaacaagcacgtcttcgccatcttcaacacggagcagagaaacgtctacaaggacctgcggcagatcgagctggcctgtgactcccaggaagacgtggacagctggaaggcctcgttcctccgagctggcgtctaccccgagaaggaccaggcagaaaacgaggatggggcccaggagaacaccttctccatggacccccaactggagcggcaggtggagaccattcgcaacctggtggactcatacgtggccatcatcaacaagtccatccgcgacctcatgccaaagaccatcatgcacctcatgatcaacaatacgaaggccttcatccaccacgagctgctggcctacctatactcctcggcagaccagagcagcctcatggaggagtcggctgaccaggcacagcggcgggacgacatgctgcgcatgtaccatgccctcaaggaggcgctcaacatcatcggtgacatcagcaccagcactgtgtccacgcctgtacccccgcctgtcgatgacacctggctccagagcgccagcagccacagccccactccacagcgccgaccggtgtccagcatacacccccctggccggcccccagcagtgaggggccccactccagggccccccctgattcctgttcccgtgggggcagcagcctccttctcggcgcccccaatcccatcccggcctggaccccagagcgtgtttgccaacagtgacctcttcccagccccgcctcagatcccatctcggccagttcggatccccccagggattcccccaggagtgcccagaagaccccctgctgcgcccagccggcccaccattatccgcccagccgagccatccctgctcgactaggcctcgaggggggcgtgctctcgggggggcctcacgcacccgcggcgcaggagcttcagtggtctggggccctccgccgcccctatgctgggaccaggctcccagtgggcagccctggcctcttccttaacgctggccccggtccagggccggcccctgtgcctggctggacaccgcactgcgcaaaggggccctggagctccaggcagggggcgctggggtgttgcactttgggggatggagtctcagggtggcagaggggggaccagaacccttgacaccatcctgaatgaggggtccagcctgggggggactctaccaaggtcttcttgggctgggaaagcccatgtagggcaggccttctataagtgcgggcaccaagggcgcctacatccccaggccttgctggggtgcaggggtatatcaacttcccattagcaggagctccccagcggcaagcctggcccagtgggctcggtagtgcccagctggcaggcctgaggtgtacatagtccttcccggccatattaaccacacagcctgagcctggcccagcctcggctgccagaggtgcctttgctaggcccggagccgttggcccgggccggccttgccctattcctctcctcctcctcctcctgggtcccccagggtggctgggcttgggctatgtgggtggtggtggcggggggtcttgggggcctctcagctcccgcccatgcctccctgatgggtgggcccagggcggcctctctctgaggagacctcacccactcctcgctcagtttgaccactgtaagtgcctgcactctgtattctattaataaactaaaataaagggaggacgctgctggtg

SEQ ID NO: 15184 - protein, 534 aa, Homo sapiens
MVQQFGVDFEKRIEGSGDQVDTLELSGGARINRIFHERFPFELVKMEFDEKDLRREISYAIKNIHGVRTGLFTPDMAFEAIVKKQIVKLKEPSLKCVDLVVSELATVIKKCAEKLSSYPRLREETERIVTTYIREREGRTKDQILLLIDIEQSYINTNHEDFIGFANAQQRSTQLNKKRAIPNQVIRRGWLTINNISLMKGGSKEYWFVLTAESLSWYKDEEEKEKKYMLPLDNLKIRDVEKGFMSNKHVFAIFNTEQRNVYKDLRQIELACDSQEDVDSWKASFLRAGVYPEKDQAENEDGAQENTFSMDPQLERQVETIRNLVDSYVAIINKSIRDLMPKTIMHLMINNTKAFIHHELLAYLYSSADQSSLMEESADQAQRRDDMLRMYHALKEALNIIGDISTSTVSTPVPPPVDDTWLQSASSHSPTPQRRPVSSIHPPGRPPAVRGPTPGPPLIPVPVGAAASFSAPPIPSRPGPQSVFANSDLFPAPPQIPSRPVRIPPGIPPGVPRRPPAAPSRPTIIRPAEPSLLD

SEQ ID NO: 15185 - DNA, 2925 bp, Homo sapiens
  CDS (72)..(1160)
gacggcgggtgcccgcgcctcagagttactgatttattcttgagattcctctactctcgttatctgacctcatggatgaacttcaggatgttcagctcacagagatcaaaccacttctaaatgataaggaacatgatatagaaacaactcatggtgtggtccacgtcactataagaggcttacccaaaggaaacagaccagttatactaacatatcatgacattggcctcaaccataaatcctgttccaatgcattctttaactttgaggatatgcaagagatcacccagcactttgctgtctgtcatgtggatgccccaggccagcaggaaggtgcaccctctttcccaacagggtatcagtaccccacaatggatgagctggctgaaatgctgcctcctgttcttacccacctaagcctgaaaagcatcattggaattggagttggagctggagcttacatcctcagcagatttgcactcaaccatccagagcttgtggaaggccttgtgctcattaatgttgacccttgcgctaaaggctggattgactgggcagcttccaaactctctggcctgacaaccaatgttgtggacattattttggctcatcactttgggcaggaagagttacaggccaacctggacctgatccaaacctacagaatgcatattgcccaagacatcaaccaagacaacctgcagctcttcttgaattcctacaatggacgcagagacctggagatcgaaagacccatactgggccaaaatgataacaaatcaaaaacattaaagtgttctactttactggtggtaggggacaattcgcctgcagttgaggctgtggtcgaatgcaattcccgcctgaaccctataaatacaactttgctaaagatggcggactgtgggggactgccccaggtagttcagcctgggaagctcaccgaggccttcaagtactttttgcagggaatgggctacataccatctgccagcatgactcggctcgcccgatcacgaacccactcaacctcgagtagcctcggctctggagaaagtcccttcagccggtctgtcaccagcaatcagtcagatggaactcaagaatcctgtgagtcccctgatgtcctggacagacaccagaccatggaggtgtcctgctaagcagatgctcctcccctggaccattgcaagtccattcttcaaatgaccactccataatataacatttcatccagtaaactggcctctactatctttaactcatgcatggccactgaacctctctctagtagcctggatttatcattctctctgcctgcccacccccttttttgtatagcccaagaaccacttccatgccatactgtaacattccaacatctttagctgatcagatctctccatatcctctcttgccagctttttcccgtgctcccccaactatgtatcagataagattctttgatcccgactctgtgtgtgcgagcacgcgtgtctgtgtttgtgtgtgcatagttctgtggttttagacacgctttcttgtagtgcttctgcaaaaaacaaaaaagggacttattttgcattctcaatggtgtttttaagggaattaggcagaacagatttctaggttgggtaggccactgcattctcttttgtttgcaaattggtcaacaaaatttgcaaagtgatttcaggagagagcagctttgaggaatgtggaaaatcataattgccgtctggaccattgattgattgtgaccagtagcagaagggtgcctgttacatagagaggctccttctgtccaaatgaatttctgtatactcttctataaataaaagggaggaatatattctgctggaagcccatgaaccatcgctgaggttctgatacaacatagagttttttccaaggagtgaatgtggtttaattactggactctcttagcacaggaaggtggaaacaaaatgccaggcctctgctctgaagagcaaaactgctgtcgctgcagtatctgataccagacatccacatatccacaagaagtgcctcttaggtctgtgacagagagtgtgtctccattcctcagttcccagaaaggggagaggtttggcctaaaaagcatgtagatgggggagaaatgggtggggggagaggaacagccattaacacagtatcatgtttaacaagtatagccttgatttcagtagatgtaatggaagccaaattaaattgatacagaacccatttctcagagtctttttttttttttgagacagagtctcgctgttacccaggctggagtgcaatggcgcaaacttggctcactgcaacctctgccccctgggttcaagcgattctcctgcctcagcctcccgagtagctgagactacaggcacctgccaccatacccagctaagttatgtatttttagtagggatggagtttcaccatgttggccaggctggtctcaaactcctgacctcaggtgatccacctgcctcagcctcccaaagtgctgggattacaggcatgagtcattgctcccagccattagaaagattgttaatcctatgaactcccttttgtaggagagaaagggccaatctgtaggggtagccctgtccaggtaaagttgttttcagcctcatgtctactgttaggtgagggagtcacagccagacagagagtattgctggagggtgagagaattgtggagaccaactaccacatagcaagagcccagctcttgggagcattgagatgtaagctcagggttacacagttccaaatcttgggaaggggcttttcagacagactgtttgctttctgctgagataaggaatgcatcactctgccagagtatgactttttacggattattaaataaagctgcatatgtctcattgttaaaaaaaaaaaaag

SEQ ID NO: 15186 - protein, 363 aa, Homo sapiens [sequence omitted]

SEQ ID NO: 15187 - DNA, 4222 bp, Homo sapiens
  CDS (351)..(941)
ttgttaactttgtcaaagatcaggttgttgtaggtttttggctttatttctaggttctctactttgtttcatttgtctatgtgtctgtttctataccagtaccatgctgtttttgttactgtactcttctagtatagtttgaagttaggtagagtgacacttccagcttttttttttttttcttaaggttggcttggctatttgggctcttttttggttccatatgaactttaaaagtttttatttttctaattctctgaagaatgtcagtagttcaatgggaatagcattgaatctatgaattacttagggccatatgcccatattcatgatactgattcttcctctccatgagcatggaatatttctccatctgttttgtgtccactctgatttctctgagcagttgtttgtggttctccttgaagaggtccttcactttctttcttagctgtattcctaggtatttttttctctttgtagcaaatgtgaatgaaagttcattcatgatttgtctccctgcttgcctgttgtttgtgcatgggaatgctagctacttttgcacattgattttatatcctgagattttgctactgttgcttatcaccttaagaagctttgggcctgagacaatgaggttttctagatgtaggatcaggtcatctgcaaacaaagataatttgacttcctctctttctattagaatactctttatttcttcctctggcctgattttcctggccaaggcttctgatactatattgaatggtagtggtgaaagagggcattcttttcttgtgccagttttcaggtggaacgtttctagcttttgcacattcagtatgatattggctgtgggtttgttgtatatggctcttattattttcaggtatgtttcttcacttcctagtttattgagaattttaaacctgaaagaatgctgaattttattggatgctttttctgcatttattgagataatcatgtggtttttgtatttagttctctttatgtgatgagtcacatttattgatttgcatatgttgaatcaaccttgcatcctggggacaaagccaactccattgttgcggatgaactttttaatgtgctgctggatttgttttgccagtattttattgaggatttttgcacagtgtttaccaaagacattggcatgatgtgttgttgttgttgttgttgttgtagtatctatgttaggttttggtatctggatgatgctggcctgatagaatgagttagagagaacttctttgtcttcaattttttttggatggttttaggagaaaaggtaccatctcctctttgtacctctgctcaaattcagcttgcttggtaggctagtttttactgcctcagtttcagaacacattattgatctattcagggttcagtcttgtggagggtttattttgcaaggaaattgtctatttcttctagattttctggtttatgtgcatacatatgtttatagtgttctctgattgttgttcatatttccatgggatcagtgatgatatctcccttattatttctaattgtgtttggttctcctttcttttcttatttatttgcctagctagtgttccatctagtttattaatttttttcataaaaacagctcctggatttgttgacttttttttttggaagagttttcagtgtctctatctccctcagctctactttgatcttggttatttcttgttttctgctacctttctggttagttttcacttggttttctagttcttttcatcaagatgttaggctgttaattttagatcttctagtttctcttttttttcttcttgtggcagagtctcactctgtcacccaggctggagtacagtggcatgatctccgctcactgcaacctccacttctcagttttaagtgatttctgctgtctcagcttcctgagtagctgggattacagatgtgcatcacaaaaaccagctaatttttgaattttttttgtagaggtggggttttgttgtgtggtccagactggtcttgaacatctggccttaagtgatttgcctaccccagcctcccaaagtgctggaactacaggcatgagccaccacacccagccctttctatctttttgatgtggacattagtgctataaatttccctcttttcttggtttccagtgattattttattctatcttggtgagtcatcagggaaataatcttaaatttacaatcaacatatagtttaaatccatataattgtgtgagaagaaccctttgttatttgaaggtgatgtttgaaagattttctaacggtgccttttagttagtcttaaatttctaattgtagttaaaaacatgccattgtcatttctgacattttaagtatatggtttagaagtggttagtatagttctattgttttgcagtaggttttagataatttgtgtcttacaaaagtaaaagtgaatactcattacttatgaaagaagttagttagcttgccttaggtagatagcaagagaagagtccctggaaagtccctggtcagtgcctcatccctgcataacatataaagaagcctggaaaaaatcaagctgcagacactaacaagggaactagcatatgttgttgtgcttggggacatgcccgtggctgcacagatagaaaaacctctggcccatttggataaaaacttgtagaaacctccagctcactcagataaaggaacaagaacgacctagcatagaaatgcctttgtttggccaggcacggtggatcatgcctgtaattccaacaatgtcggaggcagctgtgggcggatcatctgaggtcgggagtttgagaccagcatgaccaagatggacaaactctgtctttactaaaaatacaaaactagccaggcatggtgctgcatgcctataatcccagctacttgggaggctgaggcaggagaatcgctagaacccaggaggcggaggtttctgtgagccgagatcgcaccattacactccaggctgggcaacaagagcaaaactgcaaaaaaaaataaaaataaataaaaaaagaaagtacatctcaaaaaaaagaaagacaagaaaaagaaaaaaaagaagcacttttgtctttgtacagtcagtgggctcccaggaaaatgttccttctctttttgttggcatgggcactgtgggatctggtgcattccggtcgacactctcgtttatttggactgtaagtctgacctctatgaataattacttcagaccctgagtgctcccgggccaagctccttggccaaactttcaccttagcttctgataagtcttgggccaagctaagcagcatctatcaatcatcccttcagctcctgattgatcccgggccaaaggcctgggccaagctgagccacacgtttttcaagacagcctgtgaactaggcacatatccttcccttcccagtccataaaaaccctggacccagcctcgtagagggcaccactttcagacacctatctctgctggcaaagagctttcttctcttgcttcttaaactttcactccaacctcacctttgtgttcacgctccttaatctccttagaggtagaacaaagaactctggatgttatctcagactacgagagactgttacatcttggtgcactgctgagactacgacacttggtttctttgagtttgactaaatattttacatgagtgtaattatacagctttcctttttgactgtcttattttacttaacagaatgttttgaagatttgtccttattgtagtacttttcaagatttccttatttttaaggctgaatgctatcccagtgattgtacgtgccctgtttgctgaatctactcatccttaagggtacatttgcttccaggtaacatgtttgtgagtaatactacaatgtgcatatatctattccatgttctgctttgtctgtttgggatatttttcatacactgattcagtaccttgtgtattcccttgcttttgttgtctcatccgttgatgctacgtcccccaaattattgccacgaccagttgtaatgaagcttcacccttctgtattgtgctaggaattttacagctataggttttacattatagtcttcattcattttttaaaattgacacatgtaattgtgcatattttggggaaacaattatatatatgtgttgtataacaataaaaatcagtacttct

SEQ ID NO: 15188 - protein, 197 aa, Homo sapiens
MSMEYFSICFVSTLISLSSCLWFSLKRSFTFFLSCIPRYFFLFVANVNESSFMICLPACLLFVHGNASYFCTLILYPEILLLLLITLRSFGPETMRFSRCRIRSSANKDNLTSSLSIRILFISSSGLIFLAKASDTILNGSGERGHSFLVPVFRWNVSSFCTFSMILAVGLLYMALIIFRYVSSLPSLLRILNLKEC

SEQ ID NO: 15189 - DNA, 2479 bp, Homo sapiens
  CDS (190)..(2142)
aaactgggaaagttgctgggccagctcctttgtttccagtctgagcgttgcgttcggtttcccgagggtcttctgaggcaccgcggctgcgggcttctgagttcccggctctccgcagggaagcctcctcttcgtacctcgttttttggctcgtggggggtcctcccaccgctggccgacgcagccagcatgtccggggtgcgcgcagtgcggatcagcatcgaatcggcctgcgagaagcaggtccatgaggtgggcctggatggcaccgagacgtacctgcccccgctgtccatgtcgcagaatctggcgcgtctggcccagcggatagacttcagccagggttcgggctccgaggaggaggaggcggcggggaccgagggggacgcgcaggactggccgggcgccgggtccagcgcagaccaggacgacgaggaaggagtggtaaaatttcagccttccctttggccttgggactcagtgaggaacaatttgagaagtgccctgacagagatgtgtgttctctatgatgttctcagtattgttagggataaaaaatttatgactcttgatcctgtctctcaggatgcacttcctccaaaacagaatcctcagacgttgcaattgatatctaaaaagaagtcacttgctggagcagcacaaatcttattgaagggggcagaaagactgactaaatcagttaccgaaaaccaagaaaacaagctacaaagagacttcaattctgagcttttgcgattacggcaacactggaaacttcgaaaagttggagataaaattctcggagatctgagctacagaagtgcaggatctctctttcctcatcatggtacatttgaagtaataaagaatacagatctcgatctggataaaaagatacctgaagattactgtcctcttgatgtccaaattcctagtgatttagaggggtctgcatatatcaaggtttcaatacaaaaacaggctccagatataggtgacctcggcacagttaacctcttcaaacgacctttgcccaaatccaaaccaggttccccacattggcagacaaaattagaagcggcacagaatgttctcttatgtaaagaaatttttgcacagctctctcgggaagctgttcaaattaaatcacaagtccctcacattgtggtgaaaaaccagattatctctcagccctttccgagcttgcagttatctatttctttgtgccattcctcaaatgataagaaatcccaaaaatttgctactgagaagcaatgtccggaggaccacctttatgtcctagagcataatttgcatctactgattagagagtttcataaacagaccttgagttccatcatgatgcctcatccagcaagtgcaccttttggccacaagagaatgagactttcgggtcctcaagcttttgataaaaatgaaattaattcattacagtccagtgaagggcttctggaaaaaataattaaacaagcaaagcatatttttctaaggagtagagctgctgcaaccattgacagcttagcaagccgaattgaggatcctcagatacaggctcattggtcaaatatcaatgatgtttatgaatctagtgtgaaagttttaatcacatcacaaggctatgaacaaatatgcaagtccattcaactgcaattgaatattggagttgagcagattcgagttgtacatagagatggaagagtaattacactgtcttatcaggagcaggagctacaggattttcttctgtctcagatgtcacagcaccaggtacatgcagttcagcaactcgccaaggttatgggctggcaagtactgagcttcagtaatcatgtgggacttggacctatagagagcattggtaatgcatctgccatcacggtggcctccccaagtggtgactatgctatttcagttcgtaatggacctgaaagtggcagcaagattatggttcagtttcctcgtaaccaatgtaaagaccttccaaaaagtgatgttttacaagataacaaatggagtcatcttcgtgggccattcaaagaagttcagtggaataaaatggaaggtcgaaattttgtttataaaatggagctgcttatgtctgcacttagcccttgtctactatgattttctccagatgtttcctaaagaagtttccagaaactttgacttgaaatgtttgcagatcaactataagcacaaagaagagataacttccaaaagagtgctgtttttaaaaataataattaggaaatgtttatttagcactttcaaacttttcactttataaatgacaagtgctttgaaatgcagaagtttatgtacagttgtatatacagtatgacaagatgtaaaataatatgtttttcatgcagtttaaaatattactaacttaagggtttctatgtgctttttaaaatattccttctttgatgttgacatcaaataaagtatgtggttt

SEQ ID NO: 15190 - protein, 651 aa, Homo sapiens; identical to SEQ ID NO: 12174

SEQ ID NO: 15191 - DNA, 2482 bp, Homo sapiens
aacaatggagctgctgcaggatgtgagtgatgtcacagaaaggagtgagttctggaccctgaggaagccagaagctctccctacaaagctgagaagtatgttccgagccccagatctgaaaaggatgctgcgagtgtgtagaggggagatgaaatggccaggtgacatcctcacaggattcctcaccattcccctcaatgtagtaaggagagagataccagacatgagacagttggtcctattcaacattattgactcttttcatcattacagagctgacagatgtccaaagctactgggttgacgtgaccctgaatccacacacagctaatttaaatcttgtcctggctaaaaaccggagacaagtgaggtttgtgggagctaaagtatctggaccttcctgtctggaaaagcattatgactgtagtgtcctgggctcccagcacttctcctctggtaagcattactgggaggtagatgtggccaagaagactgcctggatcctaggggtatgcagcaattcactgggacctacattctctttcaaccattttgctcaaaatcacagtgcttactccaggtatcagcctcagagtggatactgggtgattgggttacagcataaccatgaatatagggcctatgaggattcttccccttccctgcttctctccatgacagtgccccctcgccgtgttggggttttcttagattatgaggctggtactgtctccttttataatgtcacaaaccatggcttccccatctacactttctctaaatattactttcccactactctttgtccatattttaatccttgcaactgtgtaattcctatgaccctgcgtcgtccaagctcttgaatattcttctgttcccacccacttctgataagtaccctgaggcttatcagcatgtgattctcccttctgatcttctgtttttctgtgttctcaattcttttgttgttttttggtttttgaatcttttttgagatggaatctcgctctgtcgcccaggctggactgcactggcgcaatctcggctcactgcaacctctgcctcctgggttcaagcgaacctcctgcctcagcatcccaagtagctgggattacaggcacccaccaccatgcccaactaatttttgtatttttatagagatagggtttcaccgtgttggccaggctgatctcgaactcctgaccgcaagtgatccacccgcctcggtctcccaaagtgctgggattacagatgtgagccgccgcgcccagacagttctttcgttttaaacagttactcagtactaggatgcacccagtggtgagagtaagcatctttgactgatgacaggtcttgaggtggatagggggcgctttcagtattttgccattaagcatagtatttgatgcaggttttttttgattgatgcaggggatcaaatttaggaagttctgatctgttaatttactacaagtttttgtataaaatgaaaactcgtattctacctatgtcttttctgtaaattattgagacaattgtgtatcatttttgttctgttaatgtggcttagtacattgatttacttcaatttgttaccacaacttgctgaaatacaccattattatttgttgtatgcaatactggatttattttgataacgtattgtttagattttgttctcatctatgttaatgaaagaaattggcctgtatttttacattcttgtaatatctttgccaggttctataaaatgcaataataagcaaataaattactttgtttttgtataagtatgtataggattgagctctaaaaccaaaccattataatgataatttgggtagcttcaaactcaaattgaagagagtcttcactacaatcttcactacaacctttggccttcctctctacatttaagagtagcaatagaacaataaaaaaaaatacgtctttcaaattaattgcagtaaaaacaaaagagtagtggggagagaaaaacaatccaatacatatttttctctcagaatagaaagaaaacacaaagagaaaatatgaacaatataaagcacttaaaggaagaggatgatttcttccagcttttccacactctctttatgcgcaggaacaaacagctgttgagtgagctgctatgactttggtagagaggtgcaatatgttttttgaaccagctataaaagaaattaagaggtacatgtgagggtagaaacaaatatcaaggatgagaatggcactggctgtcccatatggtatccaggagccaccaatgtctgttgagtacttcatacatgcctagtctgaattgagatgtgctcaatgtataaaatatataccagatttcaaatacctacttcaaaaaataatgtaaaatatctcactaataacttttcctttgtgtattgcaatgataatatgttggctctattggattaaataaagtatgttattcattttacctgtt

SEQ ID NO: 15192 - DNA, 2836 bp, Homo sapiens
  CDS (291)..(2582)
gctgtgaggctcggagtcgccggaggagccagtatctgtgtcgccgccgcccgcggcgtccccggtttggtgctgcggcgcccaccttcgggaggatcagtatctggcaccaattctgacccagtcatttgtgatccctggctcttgtgatatgctgaagatttccaggcagtttttgtggaacacctccccgtccagctctaatcaagcaccatataaacaagaaattgcctggtcaaatctgtgaggactgtattctgactgccaaagagatcaatactgacaccagaatggcagctactctcaagtcattaaaacttgtaagataccgagcattttgcagtccttctgcctttggtgcagtccgaagtgtgtcatactggaatgtgagcagcacacagcatgggggacaggaccctccagaacacattagcctctgccattctgccaaaaaagttaagaacatatgtagcaccttctcttctcggagaatcctgacaaccagcagtgcccacccaggtttggaattcagcaagacttcttcctctaaggccagtacattgcagctgggctcacccagggccacaggagttgatgaagaggacgtagaagtgtttgattcctttgaaaacatgcgagttttcctacagctaagaccagaataccgtgttcacagctataatgcatctgagacttctcagctcctgtctgtttcagaaggtgaactaattttgcacaaagtcagagttaatcaaaataatctccaggctcaagtcattgttgattatttgtgtaagctgagctctttgcctgcagagcagcatcctgtcttgctgggcagtaccagctttgctctgctctgccagctgagtgtgaagaagatacagctctttgatacccaagatctgatcaatgttttgaaagcttttgtcattttaggaatccctcactcccattcaatgctagatgtgtatgagaccaagtgttgccatcaggtatgggagatgaatatggatcagctccttttggtggctgatctctggaggtacttaggccgcaaagtacctaggtttttaaacattttttctagttatcttaatttgcactggaaggatctatccttgtctcagctagttcacttaatttatgttataggtgaaaatcgtcaggtatcccaggacctaatgcaaaaattggaatcattgatccttaaatatatagatttgatcaatttggaggaggttggtaccatctgtttggggttctttaaatcaagtactaatctctctgaatttgtcatgcggaaaattggagacttggcttgtgctaacattcagcatctgagtagtcgctccttagtgaatattgttaaaatgttccgtttcactcacgtggatcacatcaatttcatgaagcagattggagagatagctcctcagcgaattccttccctgggagttcaaggtgtcatgcacctgactctttactgctcggccttacgcttcctgaatgaaggagtaatgaatgcagtggctgcgtctttgcctcctagagtggcacactgtcgaagtaaagatgttgccaagattctgtggtcatttggaactctgaattataagccacccaatgcagaagaattttactccagcctgataagtgagattcacagaaagatgcctgaattcaaccagtacccagaacacctgcccacctgcctgctgggcctggcatttttggagtactttccagtagagttaattgatttcgctctcagtccagggtttgtcaggttagctcaggagagaactaagtttgacctccttaaggaactatataccctcgatggtacagttggcattgagtgtccagattacagaggcaatcgtcttagtactcaccttcagcaagaggggtctgaattgctgtggtatttagcagagaaggatatgaattcaaagcctgaattcttagaaactgtctttttactggagaccatgctgggggggccccagtacgtcaagcaccatatgattttgcctcatacccgatcttctgacttagaagtccagcttgatgttaacctgaagccattaccatttaatagagaagccacgccggctgaaaatgtagccaaattaaggcttgagcatgtgggagtcagccttacagatgatttgatgaataagttactaaaagggaaagcaagaggacatttccagggcaaaactgagtcagagcctgggcagcagcccatggagttggagaataaggcagctgtacctctggggggcttcctttgcaatgtagcagataaatcaggggccatggagatggctggcctgtgccccgcagcctgcatgcagaccccaagaatgaagctggctgttcagttcacaaacaggaaccagtattgctatggctccagggatctccttggactgcacaatatgaagaggcggcagctggctcggcttggctaccgtgtggtagagttatcctactgggaatggctcccactactgaaacgaactcgcttagaaaagttggcgtttcttcatgagaaagtattcacctctgctctctgaagggcatttaggggcatttctatggcaaagctataggtgtatactgtaccaggtgttgcaaaatgattataaaagccagaatgtaagtttggcgataaaatagtgtgttgaggagacttaattgtatccaaggcaggttagagctagtgtatgttactgtgaattgtaatgtagttggattgtacaaattactgcaaatgtatacatgttactcttagtaaataataaacatcttaatatgtcctacggtc

SEQ ID NO: 15193 - protein, 764 aa, Homo sapiens
MAATLKSLKLVRYRAFCSPSAFGAVRSVSYWNVSSTQHGGQDPPEHISLCHSAKKVKNICSTFSSRRILTTSSAHPGLEFSKTSSSKASTLQLGSPRATGVDEEDVEVFDSFENMRVFLQLRPEYRVHSYNASETSQLLSVSEGELILHKVRVNQNNLQAQVIVDYLCKLSSLPAEQHPVLLGSTSFALLCQLSVKKIQLFDTQDLINVLKAFVILGIPHSHSMLDVYETKCCHQVWEMNMDQLLLVADLWRYLGRKVPRFLNIFSSYLNLHWKDLSLSQLVHLIYVIGENRQVSQDLMQKLESLILKYIDLINLEEVGTICLGFFKSSTNLSEFVMRKIGDLACANIQHLSSRSLVNIVKMFRFTHVDHINFMKQIGEIAPQRIPSLGVQGVMHLTLYCSALRFLNEGVMNAVAASLPPRVAHCRSKDVAKILWSFGTLNYKPPNAEEFYSSLISEIHRKMPEFNQYPEHLPTCLLGLAFLEYFPVELIDFALSPGFVRLAQERTKFDLLKELYTLDGTVGIECPDYRGNRLSTHLQQEGSELLWYLAEKDMNSKPEFLETVFLLETMLGGPQYVKHHMILPHTRSSDLEVQLDVNLKPLPFNREATPAENVAKLRLEHVGVSLTDDLMNKLLKGKARGHFQGKTESEPGQQPMELENKAAVPLGGFLCNVADKSGAMEMAGLCPAACMQTPRMKLAVQFTNRNQYCYGSRDLLGLHNMKRRQLARLGYRVVELSYWEWLPLLKRTRLEKLAFLHEKVFTSAL

SEQ ID NO: 15194 - DNA, 3026 bp, Homo sapiens
  CDS (27)..(1862)
caccgtccggcagactactctcccccatggcggacttcgctgggccgtcttctgccggccgcaaggccggggctccccgctgctctcgaaaagccgcaggtactaaacagacaagtactttgaaacaagaagatgcttctaaaaggaaagctgaactagaagcagctgtgagaaagaagattgaatttgagagaaaagctctacatattgttgaacagcttttagaggagaatattacagaagagttcctaatggagtgtgggaggttcattacacctgctcactacagtgatgtcgtggatgaacgttctattgtcaaactctgtggttatcctttatgtcagaagaagctgggaattgtaccaaaacagaaatataaaatttctaccaaaaccaataaagtctatgatattactgaaagaaagtctttttgcagcaatttttgttatcaagcatctaagttttttgaagcacaaattcccaaaactccagtatgggttcgagaagaagagaggcatcctgattttcaactgctaaaggaagaacaaagtggccattctggagaagaagtacagttatgcagtaaagccattaaaacatcagatatcgacaatcctagccactttgaaaagcaatatgaatctagttcttctagcactcacagtgatagtagcagtgacaatgagcaagactttgtttcctccattctaccaggaaacagaccaaattcaacaaatattagaccacagctgcaccaaaaaagcataatgaaaaagaaagctggtcacaaagctaactccaaacacaaagacaaagaacagacagtagtagatgtcactgagcagttaggcgattgcaaattagatagtcaggagaaagatgctacatgtgaacttcctttacagaaagtaaatactcagagttcttcaaatagcactttgcctgaaagattaaaagcgtcagaaaattctgaaagtgaatacagtaggtcagaaataactctagtaggcataagtaagaaaagtgcagagcattttaagagaaaatttgccaaatcaaaccaagtgtctaggtcagtgtctagttcagtgcaggtgtgtcctgaagttggaaagagaaacttacttaaagttttgaaggagactttgattgagtggaagacagaagaaacattgaggtttttgtatggccagaattatgcttctgtgtgtctgaaacccgaagcctctctggttaaagaagaacttgatgaagatgacataatctcagatccagatagtcatttccctgcctggagggaatctcagaacagcttggatgagtctttaccttttaggggctcaggtacagccattaaaccactgccaagttacgagaatttgaaaaaagaaactgaaaagttaaatctgaggatcagggagttttgcagaggacggtatgttttgggtgaagaaaccaccaaatcacaagactcagaagagcatgattccacctttccactgatagactcaagttcccagaaccagattagaaaacgcatcgtacttgaaaagttgagtaaagtgttgcctgggcttctggttcctcttcagattacattgggagatatttacacacaacttaaaaatcttgttcgaactttcaggttaacaaatagaaatattatacacaaacctgcggaatggactttaattgctatggtgttgctgtcattactgaccccaattcttggcattcagaaacattctcaggaaggtatggtgtttacacggtttctagacaccctccttgaagaattacatctaaaaaatgaagaccttgaaagtctaaccatcatatttagaaccagctgtttaccagagtgatatattccatgaagacaaaatagaagatgaacttctattcaccgtttctggaattctagccgccatgatggtctggtggtgactgataactagttttattccaagacatacctttacctctttaagtttcaatctcccatctcccagtccttcagtccccaactgcagaggatgacctccccagatagaggagaatcattactccaacaagaataaccaagtctttgtatccctagtacaagacatagtatttttattcgaaaatgaatgtttaagtattaaattgaaacttgaatgaatattcaagaaaatataatgatctctactttttctggatgatttccagccatcatatcagtttgccaaaaaaattgagaaagttatgattttgacctcccaacctaaactctaaattctaaagatcagtaagcaattaggtcaataaatacatacaatttaagatgaagccctttggaagtctagtccaaaacaggaaaatctcagaactttctggactcaaggaaatgctttaaatggaatctgtagtttgtttgcaggagagacaatttctagaatttagattgcttttcaaaatgtttatcaggtaggcaagttagcagttgaggcggaacacagacaacttggggagctttactggaaggccaagaaaatactcttggacactggaggaaatgacagctactaaagcccaatcatggaaaaggaccagaaagcagcccactggaatggggagcttagtgggcaaggaggtagggatataatttctcttcttggctccaccagtaattagctctgtggcccagtcacctaaactttctggacttcagttcaggttgtatggcagtaggccatagaattggctactgccatacaatctctatgggaaaggactgcaaaaactaaattttatctctgtatgggcaaaggctactgtcatcctgttgttggtctggggccactctgacaattttttttaacctcatttgattgtgtaagggtctaaccacaacaaaaaatcatagtgtaatagaattaatcaagttcagcaaggtcacaggctagatcaatatacagaaaatcaattgtatttttctgttcagaaaactccaaaaatgaaataaagaaaattgtgttcacaat

SEQ ID NO: 15195 - protein, 612 aa, Homo sapiens
MADFAGPSSAGRKAGAPRCSRKAAGTKQTSTLKQEDASKRKAELEAAVRKKIEFERKALHIVEQLLEENITEEFLMECGRFITPAHYSDVVDERSIVKLCGYPLCQKKLGIVPKQKYKISTKTNKVYDITERKSFCSNFCYQASKFFEAQIPKTPVWVREEERHPDFQLLKEEQSGHSGEEVQLCSKAIKTSDIDNPSHFEKQYESSSSSTHSDSSSDNEQDFVSSILPGNRPNSTNIRPQLHQKSIMKKKAGHKANSKHKDKEQTVVDVTEQLGDCKLDSQEKDATCELPLQKVNTQSSSNSTLPERLKASENSESEYSRSEITLVGISKKSAEHFKRKFAKSNQVSRSVSSSVQVCPEVGKRNLLKVLKETLIEWKTEETLRFLYGQNYASVCLKPEASLVKEELDEDDIISDPDSHFPAWRESQNSLDESLPFRGSGTAIKPLPSYENLKKETEKLNLRIREFCRGRYVLGEETTKSQDSEEHDSTFPLIDSSSQNQIRKRIVLEKLSKVLPGLLVPLQITLGDIYTQLKNLVRTFRLTNRNIIHKPAEWTLIAMVLLSLLTPILGIQKHSQEGMVFTRFLDTLLEELHLKNEDLESLTIIFRTSCLPE

SEQ ID NO: 15196 - DNA, 2895 bp, Homo sapiens
  CDS (159)..(2264)
aatggtcctctacagatatgaaactggttctggagtgagatgagctcggctggggacgctacttgagaaggcctttccccacagggtgacttaaatgtcccaggctggagggtggagtgagaagtggatgcccccagggctctgggtcacactccaggatgacttctcggaaccagctggtgcagaaggtgctgcaggagctgcaggaagcagtggagtgcgaaggcctggagggtctcataggtgcttccttggaggccaagcaggtcctgtcttccttcactctccccacctgccgggagggaggccctggcctccaggtgctggaagtggactcggtggccctgagcctgtatccagaagatgctccacggaacatgctgccgctggtgtgcaagggggagggcagcctgctgttcgaggcggccagcatgctgctgtggggtgacgcaggcctcagcctggagctgcgggcccgcaccgtggtagagatgctgctgcacagacactactacctccagggcatgatcgactccaaagtgatgctgcaggccgtgcgctactccctatgctctgaggagtcccctgagatgaccagcttgccccccgccacgctggaggccatcttcgatgccgacgtcaaggcctcctgtttccccagcagcttctccaacgtgtggcacttgtatgctctcgcctctgtcctccagcggaacatctactccatctaccccatgcgcaacctcaagatccggccctacttcaaccgtgtcatccggccccgccgctgcgaccacgtgccctccacgctgcacatcatgtgggctggccagcccctcaccagccacttcttccgccaccagtactttgcccctgtggtggggctggaagaggtggaggctgaaggtgcccctggcgtggccccagctcttccagccctggccccactctcatcgccggccaagaccctggagctgctcaaccgtgaacctggcctcagctactctcacctctgtgagcgctacagcgtcaccaaaagcaccttctaccgctggcggcggcagtcccaggagcaccggcagaaggttgctgcccgcttctccgccaagcacttcctgcaggacagcttccaccgggggggcgtcgtgccacttcagcagttcctccagcggttcccggagatctcccgctcaacctactatgcctggaagcatgagctgctgggctctggcacctgcccggccttgccccccagggaggtgctgggcatggaggagctagagaagctgccggaggagcaggtggctgaggaggagctggagtgctccgcactggcggtgtcaagccctggaatggtcttaatgcagcgggccaagttgtacctggagcattgcatctccctgaacacactggtgccctatcgctgcttcaaacgcaggttccctggcatctcacggtccacttattataattggcggcgaaaggccctccggaggaaccccagcttcaagccggcaccagccctctctgctgctgggactccccagctagcatctgttggggaaggggctgtaattccttggaagagtgaggcggaagagggggcagggaatgccacaggtgaggaccctcccgcccccggggagctcctgccactaaggatgcccctgtcccgttggcagaggcgtctgcgcagggctgcccgcaggcaggtgctgagtgggcatctccctttctgccgcttccgcctccgctaccccagcctgtcaccttctgccttttgggtctggaagagtcttgctcggggttggcccagaggcctgtccaaacttcaggtgccggtccccaccttgggcaaaggggggcaggaggctgaggagaagcaggagaaggaggctggcagggatgtgacagctgtgatggccccacctgtgggggcttcttcagaagatgtagagggagggccttccagagagggggccctgcaggagggggccacagcccagggccagccccacagtgggcccttgctgagccaacctgtggtggcagcagcgggtggcagggatggccggatgctggtgatggacatgatcgctaccacgaagttcaaggcccaggccaagctgttcttgcagaagcgcttccagtccaagagctttccctcctacaaggagttcagtgccctctttcccctcactgcccgctccacatactacatgtggaagcgagccctctatgacggcctgaccctggtagatggctgacagggaggtacaaaaggggctgggaagaagggggaccagtttggagagggtcagggacctgagctgaccccaggcttggccaggatgtcctttgctctgggtcccacagtgtctaccctaagtccaagggtatatttgtgttattttctggctccaggacagagaatgccagaaatcagccatctggtctcccgtaggaaactgtgggaccagagatatcctctttcgttgtttgctggtcatatttttactgttatgatttagtttttggttttgatttgagtgggttggttggcccccttgctggagttggaagccgtatgtatgtcagggggtttagaggggggttggttagctagagctgctttcagcttttcctggagacaaaaggagtgttatagcatgatcatcggtcccactgggcagaacgttatcttcagtttcttttgggggttggcatcctctttactcagttgtttcccaaaggaacattaggctcgaatatgggggccaggtgtggtggcttatgcctgtaatcctagcgctttgggaggccaaggcaggaggatcacttgaggctaggagttagagaccaccctgggcaatgtagtgagacctcatctcttag

SEQ ID NO: 15197 - protein, 702 aa, Homo sapiens
MTSRNQLVQKVLQELQEAVECEGLEGLIGASLEAKQVLSSFTLPTCREGGPGLQVLEVDSVALSLYPEDAPRNMLPLVCKGEGSLLFEAASMLLWGDAGLSLELRARTVVEMLLHRHYYLQGMIDSKVMLQAVRYSLCSEESPEMTSLPPATLEAIFDADVKASCFPSSFSNVWHLYALASVLQRNIYSIYPMRNLKIRPYFNRVIRPRRCDHVPSTLHIMWAGQPLTSHFFRHQYFAPVVGLEEVEAEGAPGVAPALPALAPLSSPAKTLELLNREPGLSYSHLCERYSVTKSTFYRWRRQSQEHRQKVAARFSAKHFLQDSFHRGGVVPLQQFLQRFPEISRSTYYAWKHELLGSGTCPALPPREVLGMEELEKLPEEQVAEEELECSALAVSSPGMVLMQRAKLYLEHCISLNTLVPYRCFKRRFPGISRSTYYNWRRKALRRNPSFKPAPALSAAGTPQLASVGEGAVIPWKSEAEEGAGNATGEDPPAPGELLPLRMPLSRWQRRLRRAARRQVLSGHLPFCRFRLRYPSLSPSAFWVWKSLARGWPRGLSKLQVPVPTLGKGGQEAEEKQEKEAGRDVTAVMAPPVGASSEDVEGGPSREGALQEGATAQGQPHSGPLLSQPVVAAAGGRDGRMLVMDMIATTKFKAQAKLFLQKRFQSKSFPSYKEFSALFPLTARSTYYMWKRALYDGLTLVDG

SEQ ID NO: 15198 - DNA, 3015 bp, Homo sapiens
  CDS (61)..(2091)
catgttggacgtggtcagcacaggggccggcaccacggggttatcgaagcagctgtcaagatgctggggtccctggtgttgaggagaaaagcactggcgccacggctactcctccggctgctcaggtccccaacgctccggggccatggaggtgcttccggccggaatgtgactactgggagtctcggggagccgcagtggctgagggtagccaccggggggcgccctggaacatcgccggccttgttctccggacgtggggcagccaccggggggcgccagggaggacgcttcgataccaaatgcctcgcggctgccacttggggacgccttcctggtcccgaagaaacactcccaggacaggacagctggaacggggtccccagcagggccggactgggcatgtgcgccctggccgcagcgctggtggttcattgctacagcaagagtccgtccaacaaggatgcagccctgttggaagctgcccgtgccaacaatatgcaagaagtcagcaggctgttgtcagaaggtgcagatgtcaatgcaaagcacagacttggctggacagcactcatggtggcagccatcaaccgaaacaacagtgtggtacaggtcctgcttgctgctggggctgatccaaaccttggagatgatttcagcagtgtttacaagactgccaaggaacagggaatccattctttggaggtcctgatcacccgagaggatgacttcaacaacaggctgaacaaccgcgccagtttcaagggctgcacggccttgcactatgctgttcttgctgatgactaccgcactgtcaaggagctgcttgatggaggagccaaccccctgcagaggaatgaaatgggacacacacccttggattatgcccgagaaggggaagtgatgaagcttctgaggacttctgaagccaagtaccaagagaagcagcggaagcgtgaggctgaggagcggcgccgcttccccctggagcagcgactaaaggagcacatcattggccaggagagcgccatcgccacagtgggtgctgcgatccggaggaaggagaatggctggtacgatgaagaacaccctctggtcttcctcttcttgggatcatctggaataggaaaaacagagctggccaagcagacagccaaatatatgcacaaagatgctaaaaagggcttcatcaggctggacatgtccgagttccaggagcgacacgaggtggccaagtttattgggtctccaccaggctacgttggccatgaggagggtggccagctgaccaagaagttgaagcagtgccccaatgctgtggtgctctttgatgaagtagacaaggcccatccagatgtgctcaccatcatgctgcagctgtttgatgagggccggctgacagatggaaaagggaagaccattgattgcaaggacgccatcttcatcatgacctccaatgtggccagcgacgagatcgcacagcacgcgctgcagctgaggcaggaagctttggagatgagccgtaaccgtattgccgaaaacctgggggatgtccagataagtgacaagatcaccatctcaaagaacttcaaggagaatgtgattcgccctatcctgaaagctcacttccggagggatgagtttctgggacggatcaatgagatcgtctacttcctccccttctgccactcggagctcatccaactcgtcaacaaggaactaaacttctgggccaagagagccaagcaaaggcacaacatcacgctgctctgggaccgcgaggtggcagatgtgctggtcgacggctacaatgtgcactatggcgcccgctccatcaaacatgaggtagaacgccgtgtggtgaaccagctggcagcagcctatgagcaggacctgctgccagggggctgtactttgcgcatcacggtggaggactcagacaagcagctactcaaaagcccagaactgccctcaccccaggctgagaagcgcctccccaagctgcgtctggagatcatcgacaaggacagcaagactcgcagactggacatccgggcaccactgcaccctgagaaggtgtgcaacaccatctagcagccacctgcctgctcctatgtgccctcaccatccaataaaggccccttggctgtggcatggcaactgacttaccttcccctcatgccgctcccatctctacccagtctcaggcctgcttacctcctcacagcccatgaagaccccttctcagccccaaaacctgaaggaggaatttcgccctactctggtccctttgttgtgggcccataacctgctaacaagccttcaggagaggagctgcctttccacccccttcaaggcaaggagggatggaggtcccttatttccttcagaatgatccccatcccccatagtcgccagactttctcatgttcccaggaagctcagaagtatggcagctaagaacacagctggctggaagaagacagggaccagactgaactgccaccctctgctagtcctcatgcaactcagtccccagaatggctccactgggagtggaggaagagctcagaggcccaggtgcagatagttctgcaatttagtctgtagcctcctcgttccctaccctaaaattctaaggggaagggacccatagaggcttgcctgtttccgctactatattatgcccagtgttcctcctcaccccacgtcctggggtcaggccagaccatgtttcgtcagccttggggactaggccagtgttgggcacctccaggaggaggcctgactggttcattaccctcccctactcagactgagcagcagtcccagataaccaagcaagctcggctctgtgggggcctccttcaaaagaccaacatcgcagacattaggaagctgtaggaagagagatcatgggtttgacctctgcccacatggccatggagtcagcctcagccctgtctgtactgctcgtccagctaaacgagcctggaataaacatgcagtttattc

SEQ ID NO: 15199 - protein, 677 aa, Homo sapiens
MLGSLVLRRKALAPRLLLRLLRSPTLRGHGGASGRNVTTGSLGEPQWLRVATGGRPGTSPALFSGRGAATGGRQGGRFDTKCLAAATWGRLPGPEETLPGQDSWNGVPSRAGLGMCALAAALVVHCYSKSPSNKDAALLEAARANNMQEVSRLLSEGADVNAKHRLGWTALMVAAINRNNSVVQVLLAAGADPNLGDDFSSVYKTAKEQGIHSLEVLITREDDFNNRLNNRASFKGCTALHYAVLADDYRTVKELLDGGANPLQRNEMGHTPLDYAREGEVMKLLRTSEAKYQEKQRKREAEERRRFPLEQRLKEHIIGQESAIATVGAAIRRKENGWYDEEHPLVFLFLGSSGIGKTELAKQTAKYMHKDAKKGFIRLDMSEFQERHEVAKFIGSPPGYVGHEEGGQLTKKLKQCPNAVVLFDEVDKAHPDVLTIMLQLFDEGRLTDGKGKTIDCKDAIFIMTSNVASDEIAQHALQLRQEALEMSRNRIAENLGDVQISDKITISKNFKENVIRPILKAHFRRDEFLGRINEIVYFLPFCHSELIQLVNKELNFWAKRAKQRHNITLLWDREVADVLVDGYNVHYGARSIKHEVERRVVNQLAAAYEQDLLPGGCTLRITVEDSDKQLLKSPELPSPQAEKRLPKLRLEIIDKDSKTRRLDIRAPLHPEKVCNTI

SEQ ID NO: 15200 - DNA, 2363 bp, Homo sapiens
ttttgtacctgactccctgaccgatttgtattttttatatacaactagaaggaagtcacaagattgccttctacagtgtgccatttccaaatggatctgttgttggaggaaactggttgctagtcaatgttctatatttaatgaatgtgtgataaatcatcctgtaatcagtatggagtaacctgtttttgtagtttggatgaatatgtcctgagaaatttccatccactttggttcagcggacatcaaggtagtaataataatttttcctccacaggtccctccactcatatggcctctccctccccagctagtggaggggaagcagtctggacttagaaaggaaataggtggtctgtcataggggctttcattagagttaaacttcatagagtcaactgtttcatcatcatagtgagcccagagagccactgcccagcagcatgctcacaccacctaccctagtgtaggtaataggtctacgctaggaccccgtgctgggctctcagcccatcatgagattttggtggatttaatggcaggtaggaacttatttatagtggattgataattgctttataattccttggtaatgacagctcagggaaggtttcacaaggtcatgatcaggagacttgaattgttactggatgtaggaattgtttcactgctcttaacttgctcaaactggggcaggttccaggaacttgaactaaaaatatctatttaagcctctctctctttctctcctccccaacttttttctgaaagccttgatttctgtagacagaactatggtttttggcatgttgggtcaagacgtgtttctataggaaatgcttgcacgtggcactggcttggtgagtcaagcttcctgagcttcagaccgtttgtcctgtcatctgtcctgcccaacactgtatggtttttctctagcacggcttcaattttgttctctgcacaaagcctttggtggttctgccctctgccctccagctttacccaccagagtaaggaatcttttctttttagaaatcaagaatttggcttcacagatggcttctcacagatgccctcctgccagccaaaccggacttgttcttcctgcctctgtgccttctctcattctccttctctccctccataccccacttttgaggttctgtgggtaccatctttgtggactcttgtcttttttttcaacccacatggagtgccctgtgtgtacatactgaccttttttttttttttttttttttgcttgaactctggtcggtatgagctccttaaaagcaggtactgggctggctgtggtgactcatgcctgtaatcccagcactttgggaggctgaggtgggaggattgcttgagtccaggagtttgagaccagcctgggcaacatggcgagaccctgtttctacaaaaagaaaaagggaaaaaaaaagcagggactgtcattctcatcacctccctggggtatccacaggaatggacattcaaatggttgtagcctggtggggtagaaggcagagaagactacccagccagtgaagtgcagaggatagacataggaaaacattccaggcatttggagacagctgaaagtatccatgctgactttcatgatttagaagtctttaactgaattattaaaattgcctttttttttgtgctgtacaatgtctactgtactgtgggtcatttagatgagatgaaaaacttaattaaatctgaagtgtcagaggcgcttagtaagccttagtaaagttgtgattgaagaaacttaatacaaatgaactagaggtttgtaatcatgccactcactaacgattttatttctgtagcagaatcattttttctatgtaaggtgttaatgtgtgtgtatgtgctttggttgtaggaaaacttgaaaattccaaaatccttattttcctatttgagaggctggttcagcagggtgtgtgtgtgtgtgtgtgtgtgtgtgtgtatgaatggtatatttattacattattttgaaagagaattagtgtgttatgtggataatgttatatacagccaaagtggatgtttctatttggcaaggaaggtaggatttctgaaactcaggccttaaccaataggttggaagacaagaccaattgaagagttaggaaatgtgagtttttgttacttctgttattccagtcttggtttcattgtctcattctttatttttaaaatcttgtgcctaaaagtttttttgcttaattatgaagtagacatgcatgtttacatttatgtaaaatatttgctgtgtaaagtattttttgtttattctcttaaaagatcactatatttaaataaaagtgaaggtcagcaacac

SEQ ID NO: 15201 - DNA, 2437 bp, Homo sapiens
  CDS (385)..(1539)
gagaacatctctgttgacattcattgtggagaacctttacaaatagatcacttggtttttgtagtccatgggattggaccagcttgtgatctccgctttcgaagcattgtacagtgtgttaatgattttcgcagtgtttccttgaacttgctacagacacattttaagaaagcccaagaaaatcagcagattgggagggtagaatttcttccagtcaactggcacagtcctttgcattctactggtgtggatgtagatctgcagcgaataaccctgcccggcattaaccgcctcaggcacttcaccaatgacacaattctggatgtcttcttctacaatagtcccacctactgtcagactattgtggacacagttgcttctgaaatgaaccgaatatacacactttttctacagaggaaccctgatttcaaagggggtgtatccattgctggtcatagtttaggttcgcttatattgtttgatatcctaacaaatcagaaagattctttgggggatattgacagtgaaaaggattcgctaaatattgtaatggatcaaggagatacacctacactagaggaagatttgaagaaacttcagctctctgaattctttgatatctttgagaaggagaaagtagataaggaagctctggctttatgtacagaccgagatcttcaggaaataggaattcctttaggaccaagaaagaagatattaaactatttcagcaccagaaaaaactcaatgggtattaagagaccagccccgcagcctgcttcaggggcaaacatccccaaagaatctgagttctgcagtagcagtaatactagaaatggtgactatctggatgttggcattgggcaggtgtctgtgaaatacccccggctcatctataaaccagagatattctttgcctttggatctcccattggaatgttccttactgtccgaggactaaaaagaattgatcccaactacagatttccaacgtgcaaaggtttcttcaatatttatcacccttttgatcctgtggcctataggattgaaccaatggtggtcccaggagtggaatttgagccaatgctgatcccacatcataaaggcaggaagcggatgcacttagaactgagagagggcttgaccaggatgagtatggaccttaagaacaacttgctaggttcgctgcggatggcctggaagtcttttaccagagctccataccctgccttacaagcttcagaaacaccagaagaaactgaagcagaacctgaatcaacttcagagaagcctagtgatgttaacacagaagagacctctgtggcagttaaagaagaagtcctgcctatcaatgtggggatgctgaatggaggccaacgcattgactatgtgctacaggagaagcctattgaaagttttaatgagtatttatttgctttacaaagccatctatgctactgggagtctgaagatacagtattgctcgtcctcaaagagatctaccaaacccagggtatcttccttgatcagcctttacagtaaaaatgacccatctatggctgcttaatacggacattgagggatccttccccagaaaatccacctgtttgttgctgcaattttcctctcctcagctgcgtcatttcctgcatgttgcctgccacttactcaccactggggtctttggaagataatcttcctctttggaaatgaatggaaaagcaaaaggccctattacttttaaccactggcttcatataaacacttgccatttttttctgcatagctgggggtggtttgtgtctttaattctttgatgatagtttatagttgccacactttattgattagtacttgacagggtgtaaagcctattttgggtttgatttgttttgggtgtggtagacatgtttttaaggaacttattgcttatctttagaaaatgttctagtttggaaacagattcttgagattcagaaggcattttggagtacacttatctcttgtttgtgttgaactgaaggctaagtctcagtggacatggaaaagacttttgggtgatttatttttgaacctgcatttctttcttatgtgtagtgtatgaagaaagactagaatgtagctttaaaaaagtgttgtttactctcttagaactgacagacttattgccagaaatcactgatgttcattgtttttgcaactgtttgagctgctgtaagagtctaaagttgacaagttagttcatgttaggtgcatctttataaagcaaagatgttgtatatcctaggcctcccttttatatttgatagaagttatttgctaatagcttctattcttacgttgaaaatagttgtaaaagctgatgaacctgaaattgtgtagcctctacaggctgctgaggttctaaataaaaccttttagtggtgcctttatggtg

SEQ ID NO: 15202 - protein, 385 aa, Homo sapiens
MNRIYTLFLQRNPDFKGGVSIAGHSLGSLILFDILTNQKDSLGDIDSEKDSLNIVMDQGDTPTLEEDLKKLQLSEFFDIFEKEKVDKEALALCTDRDLQEIGIPLGPRKKILNYFSTRKNSMGIKRPAPQPASGANIPKESEFCSSSNTRNGDYLDVGIGQVSVKYPRLIYKPEIFFAFGSPIGMFLTVRGLKRIDPNYRFPTCKGFFNIYHPFDPVAYRIEPMVVPGVEFEPMLIPHHKGRKRMHLELREGLTRMSMDLKNNLLGSLRMAWKSFTRAPYPALQASETPEETEAEPESTSEKPSDVNTEETSVAVKEEVLPINVGMLNGGQRIDYVLQEKPIESFNEYLFALQSHLCYWESEDTVLLVLKEIYQTQGIFLDQPLQ

SEQ ID NO: 15203 - DNA, 2866 bp, Homo sapiens
  CDS (66)..(1025)
tatcatatactttatctcgggcccagactgtggtggttgaatatactcatgacagcaacaccgatatgtctcagattggccggtcgactgaaagccccattgattttgtagtaactgacacggttcctggaagtcaaagtaattctgatacacagtcagtacaaagcactatatcaagatttgcctgcagaatcatatgtgaacggaatcctccctttacagcacggatttatgctgcaggatttgactcatcaaaaaacatctttcttggggagaaggctgccaaatggaagacatcagatggacagatggatggcttgaccactaatggtgttcttgtgatgcatccacgcaatgggttcacagaagactccaagcctggaatatggagagaaatatcggtgtgtggaaatgtatttagcctacgtgaaaccagatcggctcagcagagaggaaaaatggtggaaattgaaaccaatcagttacaagatggctcgttaattgacctctgtggtgcaacattgttatggcgtactgcagaaggccttccccacactcctaccgtgaagcatttagaagctttaagacaggaaatcaatgcagcacgacctcagtgccctgtagggttcaacacactagcatttcctagtatgaagaggaaagacgttgtagatgaaaaacaaccatgggtatatctaaactgcggccatgtacatggctatcataactggggaaacaaagaagaacgtgatggaaaagatcgtgaatgtcctatgtgtaggtctgttggtccctatgttcctctgtggcttggatgtgaagctggattttatgtggacgccggccctccaacccatgcgtttagcccgtgtgggcatgtgtgttcagaaaagacaactgcctattggtcccagatcccacttcctcatggtactcatacttttcatgcagcctgtcccttttgtgcacatcagttggctggtgaacaaggctacatcagacttatttttcaaggacctctagactaacagaccattgtcttgcaggactacattataaatttataagctaagtgagttgggttttcgaacctgttgtccacgtcacagtttttctgctctggtcatttgcattaagatgaagaattttttaaaacatttataataaatagtagcaatttctgagcaaaaatctgggaaactcaagcaaaggaatttctgaaagtatcagtcttctgaattctgagttttgaaaatatattttgaggagaaaaagacatagtctaatttgatgccttccttttagtgtttttgaatcacctatcctcagtgctgaaattgttttgtataactgagggtactgttggttcaaactatgttagtttacagtttgttgcaaacattgtaaaatacagcgacatgtatattaacttttttctatttatctttattatagaaaataccttagaatgttcttgatagagtagcatggtaacgatggtgtcacacccttggtgtgaatggtagcttagtgagcaacctagctcaaggatttgcaaagttaggaagaaggacgagagagcctctctccccaccccaatctaaatatggaatttggtaaattagaatactttgtaatttgtaagaccaaattcatactaattacccgcgtgaaaggtgtttgtttttaacaacattgaagataatcaggaaagattttttcttaatgtttctctcgagcgtagtactataacaaacttaatgctaagaaacattttatatgctcctttggatatgcaatttaatctagattatctatttttctcccatgataactaatctgtttttagtatcagcagcatttggcaagtttattttttggatataaactgtggttcatctgttcactgtttctagaaaaaaatcattgccataagaaaaagtataaattagcaagaaaggagagtgacttgatttgcttttggaaaaagaaatgcttaattaattattctgtatttggccttattcgggcattaggaaatctagagatctaaagggttgaatgacaatagtgcccccgtttttagcagaccagccttaactctgggtttgaatcctaaggagattgccacagtgagacttaaggaaatgtttggttggcagatgagcaccaatgactgcagcgtggagtgacgcactgcatggtctgtttattctctaattccaatatgtcttttgcttccagaagcaagaaaagtttcttctctcccctccttcccacccttttttcaaaggcaccacaagtatagacagttgcactacatcaaatctttttttgacacttgtagaaaccagtacacttttagattagacagtatcttcttttaatattttgatttgttttcctttagtttgaaaagttgtataatacttaactgactgtagcaaagttttatatgtggtagcatacctttaatttatcctattacaaaactgttctgaattttcttttggtttttaaaaaacaaaacttgttgcttagaagccatgaattattttattttacttcaactgtcgaaacttccttgttttaaaaaatgatcatttgggttcactcaggaaatgcatgtcaggaaacttgtattataagtttattagttgtgatgtatcagtaactgctgttacccctttttcaaagaaatgtaattgattttgaagttttctagattgtcacatgctttgtgactaatgcaagaaagcaagtcctgtgttgtatttgttctagtcatttttattcaggctatatattgtagcttaatttttatttgcaattaatttatttaaactaagtaaatacttttcaaaat

SEQ ID NO: 15204 - protein, 320 aa, Homo sapiens [sequence omitted]

SEQ ID NO: 15205 - DNA, 2578 bp, Homo sapiens
  CDS (32)..(1723)
aaatattacactctggctgaaatacgcagaaatggaaatgaagaatcgccaagtcaaccatgctcgaaatatctgggaccgggccataacaacgctgcctcgagttaatcagttctggtacaagtacacgtacatggaggaaatgttgggaaacgttgccggtgcccggcaggtgtttgagcgctggatggagtggcagcctgaggagcaagcctggcactcctacatcaactttgagctgagatacaaagaggtggatcgggcccgcaccatttatgagcgatttgtcctcgtgcaccctgatgttaagaactggatcaagtatgcccgctttgaagaaaaacatgcttattttgcccatgcacggaaagtgtatgagagagctgtggaattctttggagatgaacatatggatgagcacctttatgttgcctttgccaagtttgaagaaaatcagaaagagtttgaaagggtacgagtgatttacaagtatgccctggacagaatttcaaaacaagatgcccaagaactctttaaaaattataccatctttgagaagaagtttggtgataggcggggtattgaagatatcattgtgagcaaacggaggttccagtacgaagaagaagtgaaggcgaatccacacaattatgatgcatggtttgattacttgcgcttggtagaaagtgacgcagaagctgaagccgtgagagaagtctatgaaagggccattgccaatgtcccacccattcaggagaagaggcactggaagcgctacatttatctttggatcaactatgcactctatgaagaattggaggcaaaggatcctgagaggacaagacaggtgtatcaagcctctttggaactaattcctcacaaaaagttcacatttgccaaaatgtggatactgtatgcacagtttgaaatacgacagaagaatctgtcattagccagaagagcattgggaacttccataggcaaatgtccaaagaacaaattatttaaagtttacatagaattggagctacagcttcgagaatttgacagatgccggaagctttatgaaaagttcctggaatttggacctgaaaattgtacctcatggattaaattcgctgaattagagacaatccttggtgatattgacagagcacgggcaatctatgaattagccatcagtcagccacgtttagacatgccagaggtgctttggaaatcatatattgattttgaaattgagcaggaagaaacagaaagaacacgaaacctttaccggcggttgcttcaacggacgcagcatgtcaaggtatggatcagctttgctcagtttgagttgtcttcaggaaaagaaggaagtttgactaaatgcagacaaatttatgaagaagctaacaaaaccatgcgaaactgtgaagaaaaggaagagagacttatgctgctggaatcttggcgaagttttgaagaagaatttggaacagcttcagataaggagagagtagacaaactcatgccagagaaagtcaagaagagaagaaaggtccagactgatgatgggtctgatgcaggctgggaagaatactttgattacatctttccagaagatgctgccaaccaacctaacctcaaactcctggccatggccaaactgtggaagaaacagcagcaggaaaaggaggatgctgagcaccatccagatgaggacgtcgatgagagtgaatcctgatctttttttcatagacaaatgttttgttatttttataaattaattgtttggaactcttgtgactcctggaagttcttatatatttcaccagtaagaaattgattggtatctttgatggctactttttaagttattttttaaatgctcttgggttagctaggggtagggattgcaagtaaaggacttttttaactgctggatttgtttttccaactgagtccaaacttttctaatgtctgtccacatcatgcattaggaaatgtaattaaggtaacattctacagttacttttcatgtcatacccataaagatagtttatgcattcatctgaaatgtgtaactttttcatgtcttcagagtcacagacttgagttcatttcccagctctgccactcatgattatataacttaattttcattttcctcattcacaaaatgggccaatagtttgacagctcattttgaagattacattataaaaggaatatacctggtgggtgcatagtaagtgctcagtaaattgtttgttctaagccacttttaaaaatggtttcattccttgtagaattgaatgcgagtggattaataatttaccttactttcttactagtgtccagttatattgttttttagaacaacacttggaaaataatttgcagtgattatatttctgaacaaggttcagaaaacattgtttactaagaatttagtctaataatttcagttaggcgctcatcagttctccagagtggttgagtttgtaataccttgtttaaagaataatggcttgttcacgtgtgtgctatgaaaaatgatgtcccatgttcacataaatttgggaaattctggact

SEQ ID NO: 15206 - protein, 564 aa, Homo sapiens; identical to SEQ ID NO: 14842

SEQ ID NO: 15207 - DNA, 2446 bp, Homo sapiens
  CDS (233)..(2254)
gtgtaataacaacatctccgagggcgaagggtatgtggagtctccagatctggggagccccgtcagccgcaccctggggctcctggactgcacttacagcatccatgtctaccctggctacggcattgagatccaggtgcagacgctgaacctgtcacaggaagaggagctcctggtgctggctggtgggggatccccaggcctggccccccgactcctggccaactcatccatgcttggagaaggacaagtccttcggagcccaaccaaccggctgcttctgcacttccagagcccacgggtcccaaggggcggtggcttcaggatccactatcaggcctacctcctgagctgtggcttccctccccggccggcccatggggacgtgagtgtgacggacctgcaccctgggggcactgccacctttcactgtgattcgggctaccagctgcagggagaggagaccctcatctgcctcaatggcacccggccatcctggaacggtgaaacccccagctgcatggcatcctgtggtggcaccatccacaatgccaccctgggccgcatcgtgtccccagagcctgggggagccgtagggcccaacctcacctgccgttgggtcattgaagcagctgaggggcgccggctgcacctgcactttgaaagggtctcgctggatgaggacaatgaccggctgatggtgcgctcagggggcagccccctatcccccgtgatctatgattcggacatggacgatgtccccgagcggggtctcatcagtgacgcccagtccctctacgtggagctgctgtcagagacacctgccaatcccctgctgttaagccttcgatttgaagcctttgaggaggatcgctgcttcgcccccttcctggcacatggaaatgtcactaccacggaccctgagtatcgcccaggggcactggcaaccttctcgtgcctcccaggatatgccctggagccccctgggccccccaatgccatcgaatgtgtggatcccacagaaccccactggaacgacacagagccggcctgcaaagccatgtgtggaggggagctgtcggaaccagctggcgtggtcctctctcccgactggccccagagctatagcccgggccaagactgcgtgtggggcgtgcacgtccaggaagagaagcgcatcttgctccaagttgagatattgaatgtgcgggaaggggacatgctgacgctgttcgacggggacggtcccagcgcccgagtcttggcccagctgcggggacctcagccgcgccgccgccttctctcctctgggcccgacctcacactgcagtttcaggcaccgcccgggcccccaaatccaggcctgggccagggcttcgtattgcacttcaaagaggtcccgaggaacgacacgtgccccgagctgccacctccggagtggggctggagaacggcatcccacggggacctgatccggggcacggtgctcacctaccagtgcgagcctggctacgagctgctaggctccgacattctcacttgccagtgggacctgtcttggagcgccgcgccgcccgcctgccaaaagatcatgacttgtgctgaccctggcgagattgccaacgggcaccgcaccgcctcggacgccggcttccccgttggctcccacgtccagtaccgctgcctgccagggtacagcctcgagggggcagccatgctcacctgctacagccgggacacaggcacacccaagtggagcgatagggtccccaaatgcgccttgaagtacgagccgtgcctgaacccgggggttcccgagaatggctaccagacgctgtacaagcaccactaccaggcgggcgagtctctgcgcttcttctgctatgagggctttgagcttatcggcgaggtcaccatcacctgtgtgcccggccacccctcccagtggaccagccagcccccactctgcaaagttgcctatgaggagctcctggacaaccgaaaactggaagtgacccagaccacagatccatcacggcagctggaaggggggaacctggccctggccatcctgctgcctctaggcttggtcattgtcctcggcagtggcgtttacatctactacaccaagcttcagggaaagtcccttttcggcttctcgggctcccactcctacagccccatcaccgtggagtcggacttcagcaacccgctgtatgaagctggggatacgcgggagtatgaagtttccatctgaaccccaagactacagctgcaggacccaggacgcccctcccctcctcattcgggcagagggaaatacgggacccggtctctgcctcctggctgccctcctccctggctgtgtaaatagtctccctatcccacgagggggctttgatggccctggagatcctacagtaaataaaccagcatcctgccgcct

SEQ ID NO: 15208 - protein, 674 aa, Homo sapiens
MLGEGQVLRSPTNRLLLHFQSPRVPRGGGFRIHYQAYLLSCGFPPRPAHGDVSVTDLHPGGTATFHCDSGYQLQGEETLICLNGTRPSWNGETPSCMASCGGTIHNATLGRIVSPEPGGAVGPNLTCRWVIEAAEGRRLHLHFERVSLDEDNDRLMVRSGGSPLSPVIYDSDMDDVPERGLISDAQSLYVELLSETPANPLLLSLRFEAFEEDRCFAPFLAHGNVTTTDPEYRPGALATFSCLPGYALEPPGPPNAIECVDPTEPHWNDTEPACKAMCGGELSEPAGVVLSPDWPQSYSPGQDCVWGVHVQEEKRILLQVEILNVREGDMLTLFDGDGPSARVLAQLRGPQPRRRLLSSGPDLTLQFQAPPGPPNPGLGQGFVLHFKEVPRNDTCPELPPPEWGWRTASHGDLIRGTVLTYQCEPGYELLGSDILTCQWDLSWSAAPPACQKIMTCADPGEIANGHRTASDAGFPVGSHVQYRCLPGYSLEGAAMLTCYSRDTGTPKWSDRVPKCALKYEPCLNPGVPENGYQTLYKHHYQAGESLRFFCYEGFELIGEVTITCVPGHPSQWTSQPPLCKVAYEELLDNRKLEVTQTTDPSRQLEGGNLALAILLPLGLVIVLGSGVYIYYTKLQGKSLFGFSGSHSYSPITVESDFSNPLYEAGDTREYEVSI

SEQ ID NO: 15209 - DNA, 2320 bp, Homo sapiens
  CDS (89)..(2020)
agagaaagataatggaaatattgaacttgaaaataaaaaattagaaaaagagagtaagaatgaacaagagagagaaaagaaggaaaacatggctaaagagaatcctcccatgaattctccttgccaaataaccgtgaaaggactcagtaatttgggaaacacatgtttcttcaatgcagttatgcagaacttgtcacaaacaccagtgcttagagaactactaaaagaagtgaaaatgtctggaacaattgtaaaaattgaaccacctgatttggcattaacagaaccattagaaataaaccttgagcctccaggccctcttactttagccatgagccagtttcttaatgagatgcaagagaccaaaaagggggttgtgacaccgaaagaactcttttctcaggtctgtaaaaaagcagtgcggtttaaaggctatcagcggcaagacagccaggagctgcttcgctacttattggatgggatgagagcagaagaacaccaaagagtgagtaaaggaatacttaaagcatttggtaattctactgaaaagttggatgaagaactaaaaaataaagttaaagattatgagaagaaaaaatcaatgccaagttttgttgaccgcatctttggtggtgaactaactagtatgatcatgtgtgatcaatgcagaactgtctccttggttcatgaatctttccttgatttgtccctcccagttttagatgatcagagtggtaagaaaagtgtaaatgataaaaatctgaaaaagacagtggaggatgaagatcaagatagtgaggaagaaaaagataacgacagttacataaaagagagaagtgatattccttctggaacaagtaagcacttacagaaaaaagcaaagaaacaagccaaaaagcaagccaagaaccaacgaagacaacaaaaaattcaaggaaaagttcttcatttaaatgatatttgtactattgaccatcctgaagacagtgaatatgaagctgaaatgtcacttcaaggagaagtaaatattaaatccaaccatatttcacaagagggtgttatgcataaagaatattgtgtcaaccagaaagatttgaatggccaagcaaaaatgatcgaaagtgtaactgacaatcaaaaatccacagaggaagtagatatgaaaaatatcaacatggataatgatctggaggttttaacatcttctcccactaggaatttaaatggtgcctacctaacggaagggagcaatggagaagtggacatttccaatggtttcaaaaacctaaatttgaatgctgctcttcatcctgatgaaataaatatagagattctgaatgatagtcatactcctggaacaaaggtgtatgaggttgtaaatgaagatccagaaactgctttctgtactcttgcaaacagggaagttttcaatactgatgagtgttcaatccaacattgtttatatcagttcacccgtaatgagaaacttcgagatgcgaataaactgctttgtgaagtatgcacacggagacagtgtaatggaccaaaggcaaatataaaaggtgaaaggaagcatgtttacaccaatgccaaaaagcagatgctaatttctcttgctcctcctgttcttactcttcatttaaagagatttcagcaggctggttttaacctacgcaaagttaacaaacacataaagtttccggaaatcttagatttggctcctttttgcacccttaaatgtaagaatgttgcagaagaaaatacaagggtactctattccttatatggagttgttgaacacagtggtactatgaggtcggggcattacactgcctatgccaaggcaagaaccgcaaatagtcatctctctaatcttgttcttcacggtgatattccacaagattttgaaatggaatcaaaagggcagtggtttcacatcagcgacacacatgtgcaagctgtgcctacaactaaagtactaaactcacaagcgtacctcctattttatgagagaatactgtaataatatcaaaagcactttttctggaaacacatttatggcttttataatggctgaaataacgataaaaaaagactaattaaaatcatgttcacttaacattaaatacatgccagaagaaatcatgtttatttaaatattgaagggaaaaatacctaaaaatgtacaaaggttttatattgtcatagtggtttttattcctgctttgtttctggaaaggaaatcctgaattacttaagtactttgtgtttaatatatctgggtgatggatcacaacacatcaataaactgacttaccct

SEQ ID NO: 15210 - protein, 644 aa, Homo sapiens [sequence omitted]

SEQ ID NO: 15211 - DNA, 2737 bp, Homo sapiens
  CDS (98)..(844)
agagtccgcgccctgcgtccgcgaccaggaggatcggaccttcgccttcgctgtcgccgccgccgccgcccgcggccgtcggggctattagtgaaagatggtggatcgcttggcaaacagtgaagcaaatactagacgtataagtatagtggaaaactgttttggagcagctggtcaacctttaactatacctggacgagttcttattggagaaggagtattgactaagttgtgcaggaaaaagcccaaagcaaggcagtttttcttgtttaatgatattcttgtatatggcaatattgtcatccagaagaaaaaatataacaaacaacatattattcccctggaaaatgtcactattgattccatcaaagatgagggagacttaaggaatggatggctaatcaagacaccaactaaatcttttgcagtttatgctgccactgctacggagaaatcagaatggatgaatcatataaataaatgtgttactgatttactctccaaaagtgggaagacacccagtaatgaacatgctgctgtctgggttcctgactctgaggcaactgtatgtatgcgttgtcagaaagcaaaattcacacctgttaatcgtcgccaccattgccgcaaatgtggttttgttgtctgtgggccctgctctgaaaagagatttcttcttcccagccagtcctctaagcctgtgcggatttgtgacttctgctatgacctgctttctgctggggacatggccacatgccagcctgctagatcagactcttacagccagtcattgaagtctcctttaaatgatatgtctgatgatgatgacgatgatgatagcagtgactaaggacacatttgggagtatttaatcaggtgtggctatctgagaaatcaactttgggggaaatgtaagattctgagctctctctctgttttgttctagccatgaatttgcctgagaaacttgtaacctatgtgcctcaatatattccatagaaagtaggtccccctgccttctcccactcctcacactcttctacagggataggcttttgcaaatatatcagataaattttttgtttcttgtttatttttaggttattttcttggaaggttgggaaaagatgtttgttttaacaggtcatgtactacgttgttgttttcatttctgttataagtaaaactaaaagcacagaatggtgggaaaggggctataatgtggttcattaataatgttagcagcttttttctaaccatcctgtctaatggttaagacaccagtaacaaaaacacatgatttggaaatactttggctttttcatatacctagtggtgccttatcataatagcactgttacatgaaataagcccctaccttcttactttctggtttgttgaaaaaatacactggtgctctttgaagtgataaaatgagtgtttatgaatgggtgtaattaggaaatacttctcatctgacagctacaaataactaagtttggaggtattttcactctatatgaataaatatttttccataaaatagttgtgattatatttttgttttatataggtcccaaattataattgtcaaatatatattttaaattaataaaagttgtcattcttaggaatttggtttgaaatttatcagttatacagaattgtcatactgcattagcttctacctttagtaagacatattttttaggtataaattcttatgctttaacattatttctggattgaaaatcttataaaacccttgaaaataaacagtctcttttttacaaagcctgtgttagagcacagatttacctaggcttgaagatttggaagaaataatatgtaagaatggcctcaaggcagaccactttaagtttggctagacttcatatcgtggaagtattgtctatttcagtgtgaaactatcttgaatttgcaaatatagtgttatattttataaagttttgtaaaatcccaaacaatatttctatttttgtaaaacaattgtatgtataatctgtatttgaaatcattttgcaatctatggaaatagagtagcaattgctatttctaaattgtgaactttaagtcaatctagatttattttgagaagtaattgttcactctttacttttgaggcagccattaggttgaaagtatatatttatcatataaaacttgatgcgttttgcactactctttccatttatatgctgcaaacaactacagtctttgaaatatggaaaatcagcagtctaaagtttgttttaaattctaaatttaaaaaatcttcaaatctgaatataccgcaaatgtcatgagaagtttgattcagtaacttgtgatggaggattctttggtatcttactgtttggttaaggcactaattttacttacctattagattttgaaagtatctgagatatacaaatctccctgtaggaaatgtgaaagaaaagcacaacaaaactagggttttttgttcatttgcttgcttttatgattttttttggtttgttttaatatcaggtggatttttgtttctaagcaatatatacataaaatcaaccaacatatctgaaaaggatcatgaaacctgagaaatgctaatggagatttgctggtacataggaatctagcaaattcaggaaccaaggggaaatgttgtgagataacatttacattgtcaacctttattgactttgtttttacaataaaaaatattttacaactt

SEQ ID NO: 15212 - protein, 249 aa, Homo sapiens
MVDRLANSEANTRRISIVENCFGAAGQPLTIPGRVLIGEGVLTKLCRKKPKARQFFLFNDILVYGNIVIQKKKYNKQHIIPLENVTIDSIKDEGDLRNGWLIKTPTKSFAVYAATATEKSEWMNHINKCVTDLLSKSGKTPSNEHAAVWVPDSEATVCMRCQKAKFTPVNRRHHCRKCGFVVCGPCSEKRFLLPSQSSKPVRICDFCYDLLSAGDMATCQPARSDSYSQSLKSPLNDMSDDDDDDDSSD

SEQ ID NO: 15213 - DNA, 2746 bp, Homo sapiens
  CDS (247)..(945)
gtcctaagatggctgctgggcgaccacttcctgacagctccagttaacgggactgccagcaggctagacatccttcgccggaatgtgcagcgcttagttctgtgcccgggaggggcttctctctcttttgggattggagtgtggcattgccgccagaaagcctgcagaattccgggttgtgcagccaagcaggaacggtgtacctttctagacccatcctcttgcaatcttggaccctaagaaaagatgtggagtgggctgctacctcctggcctaaatgaaagtgacgctgagtcaaactcggaagatgaagctacgttggagaactctggacttaacttacaggaagataaagaggatgagagcatcagaaaaacagaaatcatagatttctcaacagatgaaccaaaaactgaaacagagtcaaatgtaaatgcctatgaagagtgtccttctggaattcccatagatatgtggaataaatttcaagaattgcataaaaaacattctgaacagaaaagcacaacctcaagattcagagggaaaagaagaaaacgctccagaaaagataaattgaagaatgaaaaagaattacatagtgaaccgtcctcaaatgaaacccagtggaaagagcttactcagtattttggagtcaatgatagatttgacccgcctgttaaaaggaaaaaagttgagaagtcaggccttgaaaagaggatagaccaggctgtggaggagtggaatattgagaaggctgaggaactcagcaaccagctagctactcgagagcttggtgtaaaaattgccaaagcagttgcctgccacaactttgtaaaagccaaaaaggaggttgaaaattcacaggctgcccgaaaaaagaagaaacttgcatgggggtttgaagcaaagaagagatgggaaaccaaaagcaacatgggatacatgtaacttgccagagtgcttcaagacatttgtagactcaaatgctcaatttactgagaatgttttcctgcctatgttaatatgtcagaaaattgatagcactaaaacaaaaataagcataaaatttgggattttgattatcagctcttttcagtctttctttaaggactttgtcctattgaagtgaataaaatgaagcattctgttatttgtataagaaatgtaagaaaaaaaatatagaaagaagaggataggattttgttcatttgtatggatggacccttggtataaaatcacttttggcgctttccattcatttggtttagcacagccagtgagcttctcgtactttctttcttttttttttttttttgagacagagcctcgcttgctctgtcacccaggctagagtgcagtagcacgatcttggctcactgcaaccactgcttcctgggttcaagtgattctcatgcctcagcctcctgagtagctgggattatggacaaatgccaccacacccggctaatttttttttttttttttgtatttttagtagagacagagttttgctgtgttggtcaggctggtcttgaactcctggcctcatatgattcacctgcctctgcctcccaaagttctgggagtacagacatgagctaccatgctgcccttgtattttcttatctgtacccagtgtaactacacgtttactggaactgtgtttttaagactgacagttgtttataatggattagtcgtaagtgccaaaaagtctcagttgatattatctttacaaatgacttgaccttaatgttataaaagtagttactgttttttttttaattggaggcagacttgatatttcagagttgcatagtaaaagcaatttgttaatttttgtgtattttcagataaactattacaataaagaaaggagcagaatgtagtatttggaagatgatttaaattcagcaacgcctaaaaatgtcttcctaagtatttttctcagccatgtcattctttaaattatgagatggttcttagaagagaaaatggtgtaattgtattaaacagacaattataactcaagataatataactttgaaccttctaagaactgatttgtttggttttcctcccattccccattcctccttaaaagattgaatgaattaatgagcagaaagagaggattggtaacatgggaaatcgttttcattagatgtacatttcctggttctgacaggaaaggggctccggaaaatcataaaacaagcaggtgaacaagaccaggtgtgtcggcacctccctgctcagtgcccagcggaggtaaagaaccactcagcatggtttttgtcagttcacctcttctgtcgttgtcagaggtttcctacctgtctgatataaactttctctgggttgataatataaattcagaaacatgtaaaatgaatcatgattatattactgttatttttagacttaaaatagtaacaaaattttatttatggtggcacatttaatggctttttttttctgtgttctggaataagagaatacctagctactatttaagcatccaaaaatcatatcttgctttcatttagttgagaaaagccagcatagagaaagcaaagttttagaatattatgtgtcatactaattcagtatccagaccaaatgttggaaagtcttattttatgatttaatatcccttgttccattttacagatatgatcatgtaaaacttacctacaatattcatttcaaactgctaaattaggtaaatacagacttttagtat

SEQ ID NO: 15214 - protein, 233 aa, Homo sapiens
MWSGLLPPGLNESDAESNSEDEATLENSGLNLQEDKEDESIRKTEIIDFSTDEPKTETESNVNAYEECPSGIPIDMWNKFQELHKKHSEQKSTTSRFRGKRRKRSRKDKLKNEKELHSEPSSNETQWKELTQYFGVNDRFDPPVKRKKVEKSGLEKRIDQAVEEWNIEKAEELSNQLATRELGVKIAKAVACHNFVKAKKEVENSQAARKKKKLAWGFEAKKRWETKSNMGYM

SEQ ID NO: 15215 - DNA, 2614 bp, Homo sapiens
  CDS (32)..(733)
tgtgaattgggccagaagatcagagtgtaatatgtgtaatactccaaagtatgctaaattagaagaaagaacaggatatggtggtggttttaatgaaagagaaaatgttgaatatatagaaagagaagaatctgatggtgaatatgatgagtttggacgtaaaaagaaaaaatacagagggaaagcagttggtcctgcatctatattaaaggaagttgaagataaagaatcagagggagaagaagaggatgaggatgaagatctttctaaatataagttagatgaggatgaggatgaagatgacgctgatctctcaaaatataatcttgatgccagtgaagaagaagatagtaataaaaagaaatctaatagacgaagtcgctcaaagtctcgatcttcacattcacgatcttcatcacgctcatcctccccctcaagttcaaggtctaggtccaggtcccgttcaagaagttcttccagttcgcagtcaagatctcgttccagttccagagaacgttcgagatctcgtgggtcgaaatcaagatccagctccaggtcccacaggggctcttcttccccacgaaaaagatcttattcaagttcatcatcttctcctgagaggaacagaaagagaagtcgttctagatcttcttcatctggtgatcgcaaaaaaagacgaacaagatcacggtcacccgaaagccaggtgattggtgaaaacactaaacaaccctgagcccagggccaacccctacggaacaccactactttacccagacgccacaggtcatcatctggatcatcccattctggttcccgttcaagttcaaaaaagaaataatgtattaaatttacatcttaaaaaaatccagtacagtgcatgaagcatatttttaaagaagttggtgtcttacttggtcagaagtgctaaatctgctagtagaggtgcatgcctttcattgcttttcaaaacaatacagctgtgtttatttgtgaagttaaaagtaaatagcattttaagccataatgtcccaaaatagatgttctgtcattcattatttacaaccatttgcttcatttaaaaccatttcagctataacaaagtactttgcttcctaatttaaacccatttttgtcatttccaaatacatcctgtccattggctaagacaggattacctaggcttgcctgaactttgggcatggaagaaagactggaaactagttggaaacaacatacttatggaaaagaaagtcagcctttttatgctgttaacagatgtcagagtgattctcaccaaaaaaagttaaactatgttgtaagcagccaactgtaaatgtctattttgaaattccctatgctaagggtgccttagaatcattgtgtctcttttatccagctttacttttttgctccacatttaatgcaaaagaatcttgtgatgtctacaaggagagaagtgggatatattttcctttctgacacataatttggggcaaaaaagaaagtcttaagagtttatcttttctctgctgatacggttgcttgataaagacatctcaaaatgtttaccaatgttttaagaagctttgtgtgatattcttccaaatgtagttaccaaatataatatggtagaaaaggctaaatcatacttaatgagcaaattgaagtaagcttttaaagtatatttctcttttggtgaaaggccaatggagacattgtgaatttaagtgaacatttgcctcaagatgttaactataaacacactgcatacaattttcttctgaataacaaatgaatgcttattgctgcatgatgtaagcaaaagtcattatttttcctattcatttgaaataagttatggcttaaaatgcttttggagtttatttctcaaaattaaaatctggtcacatgagctttagtttgttttctggtttaaaaaataaaaaggtttctcttaacagtatttccagtgacaatgcaaggtaagtatatcaaaggaaatcaacagttgtgcttgggggctttttgttatgggatattgatttcttgttttttttccgtaacattgtctgctgcaatttaaataaaaattacgacattttaagatatttcatagacaaaccaaacaaaaatatatgtttttactttaaagtgaatgtttttctcttcagctgatctaaaaatgaaagcaaaatatcttatgtagaaatattttgataatatttttacagtgagctttcccatgtttttatgtcttaagtttctttgctgcgtttatgtaggttgcacaagaacttttactcacttgtaattgtgcctcagactttttgaaagtctaccttctaaattgccccgacgatctagattctacatgttaccattggtttattcttgtgctttctgtatttaaaactttggctgtactaagcaaatgcaaggttataatttagctaatagtagtttacagacaattctgatgattatgatttcatttggtttaactaagctgtactagttcatttcataaggaaatgatactgtagacaaatgtaaataaagcctgtgagtcaagcatcaagtggtgtttgttagaaataaactagagattttt

SEQ ID NO: 15216 - protein, 234 aa, Homo sapiens [sequence omitted]

SEQ ID NO: 15217 - DNA, 2340 bp, Homo sapiens
  CDS (122)..(1165)
gtcccgggtggaggcggcggagccggagccgggggagggggcagcggctgtctcacggaccacggcggcgcccgcagctcctcaccgaaacaaggagaccagtgctggtccagtggctgtgatgggaaaagattattacaagattcttgggatcccatcgggggccaacgaggatgagatcaagaaagcctaccggaagatggccttgaagtaccacccagacaagaataaagaacccaacgctgaggagaagtttaaggagattgcagaggcctatgatgtgctaagtgaccccaagaaacggggcctgtatgaccagtatggggaggaaggcctgaagaccggcggtggcacatcaggtggctccagtggctcctttcactacacctttcatggggacccccatgccacctttgcctccttctttggtggctccaaccccttcgatatcttctttgccagcagccgctccactcggcccttcagtggctttgacccagatgacatggatgtggatgaagatgaggacccatttggcgctttcggccgttttggcttcaatgggctgagtaggggtccaaggcgagccccagaaccactgtaccctcggcgcaaggtgcaggaccccccagtggtgcacgagctgcgggtgtccctggaggagatctaccatggctccaccaagcgcatgaagatcacaaggcgtcgcctcaaccctgatgggcgaactgtgcgcaccgaggacaagatcctgcacatagtcatcaagcgtggctggaaggaaggcaccaagatcaccttccccaaagaaggcgacgccacacctgacaacatccctgctgacatcgtctttgtgctcaaagacaagccccatgcacacttccgccgagatggcaccaacgtgctctacagtgccctgatcagcctcaaggaggcgctgtgtggctgcactgtgaacattcccactatcgacggccgagtgatccctttgccctgcaatgatgtcatcaagccaggcaccgtgaagagactccgtggggagggccttcccttccccaaagtgccaactcagcgaggagacctcattgttgagttcaaagttcgcttcccagacagattaacaccacagacaagacagatccttaagcagcacctaccctgttcctaggctctgccccagccagtccagagcctaccacagcaatacccccaacactcactccactcaatgtgcacccagcttgatgtccactggacactggcaactttttctaaaatgcaaaaaaaagccactggttttcaggaaaatgttcctgtccctgaccccttttagagctgggctgcctggggggagtgggagggaggtggggagagctagcccaggccaggggtcaatgttcatgtcactagctttcaatccagtttccactgcagtggctggagagtgacctgagtgctacttgaagatatgtagagattccttatccatgcctgtacatagcatgtcctcctcccctcagctttgctaataccagtcccctcccttccctttggcttcctgctgttgggggtggaaaagactagaaaggacattgctttctcagccccacccccaggtccacagtgtccaaggtaatggcacacatattcatgcacaagaagcactcacctagagctgtctgtgcctctctgggagaaaggagagaggataagaagggaaagttcacaacctgtgaacagggacttgagcacgagacacttttcatctggagcaggggggtgagctcctcagcagcctccgtaacagctgccctgcctacacctgcagagctggaggttctgtcctccctgctgctctcaggagtgttcaagggtggagggcagggaatggggcctgaggtattaaggctaagaggtgggggacagggcccatctaccagccttcatcaggaagggaaagggctttggggtcaggtggcagctattccccaccaagagattcagggtcacaggtttttccccacacctctgaactcagggcctagccacccccaaacttccaaatcccacttttgtgatatgtgaagctactcatttcttacccttggaggctgtgtggggaatttccagcccttttatgcctgtgtgatcccaccccacccccatagttgtataaaggtcatagtgaagaagctgggggaagactgcttcagccagatcctggggtggggtctttaggttttctcactttgacaacccccgaatgtttttatagtagtttttttgtatttttttgtaatgacagtattatgtaaaaaataaagtattttaaaaatatgg

SEQ ID NO: 15218 - protein, 348 aa, Homo sapiens
MGKDYYKILGIPSGANEDEIKKAYRKMALKYHPDKNKEPNAEEKFKEIAEAYDVLSDPKKRGLYDQYGEEGLKTGGGTSGGSSGSFHYTFHGDPHATFASFFGGSNPFDIFFASSRSTRPFSGFDPDDMDVDEDEDPFGAFGRFGFNGLSRGPRRAPEPLYPRRKVQDPPVVHELRVSLEEIYHGSTKRMKITRRRLNPDGRTVRTEDKILHIVIKRGWKEGTKITFPKEGDATPDNIPADIVFVLKDKPHAHFRRDGTNVLYSALISLKEALCGCTVNIPTIDGRVIPLPCNDVIKPGTVKRLRGEGLPFPKVPTQRGDLIVEFKVRFPDRLTPQTRQILKQHLPCS

SEQ ID NO: 15219 - DNA, 2687 bp, Homo sapiens
ttgtgtgacaactgagggcaaagaagggaaaacagaagcaaagaaaactgtttcaaaagccttggaattgctactgttaaaaggctgcggttcatttctgatttcctcatcttttgctacaaaggaaaaagaaatccaatgatgtgtctacctttggtgagaagaaaacacgagcaacagcagtgtagtttcgaaagtcattgtgcagagagggcaggagtgaattaaggccccggggaccgcggacgcctggccaggagaccgcctgaaatatgagccgaacctgttttgcagaaactgcaggctgttcagaatccaattctctggatattggcatgctacattcaatgtccagctacattaagtgtccatctatcaaaatactagatttcatggctggagcaggaaaagttatgagcttggaatatcttcagtgcctgaaagtgaggaagtgctcccaaaaatatgaaggcctgtcaaaagggagagaacaagaaggaggaggagctagaaaaagaaaaagcagtgggaactgtcatgggtgaatcccagaatgggcatcccagatgacatctgtctccattcctgccatctcttcctggctgccagccacttagcctccaggtgtttgtgtctaaggccaactctctttccagactagaagaaagtgaggcagctcaccttttcatttaggtttactttggaaagttctgtggttgaatatcaacatagtgactgatttgtggctgtaaagctgtagcagctcaggtagcacatgtaagagtgagactggatggagagactggatgaattatgccatcttaccaaggcattgattagttgattaaggcttgtttgagcaaaaaagtgagttatatcagatatagttatatcagatacactgatactcaaatcccaccagagaactcagcaggccaccgataacccattcacttttcttctcccgtgactttactcatcttattattaaacaaggaatgtcttggtccaccactgaaccaagtttaagagtcaactcaaatgccacttacttcttgaagcccctcatgatactgtcaaggataatggaaatatatgatttctccctttcatctatataaattacttccccatatatacattaacatgtcgtcaggaaacttaacagaaatatggtaactcttattaagtttcctttaagcatttttttctatacttgtgccttagaaaaattggaagaactagaaatggaaatattgcagagtgagaaacttatgggatgttcgttagagagagtatcatgaaggaaaacatgagattaaagacactgcaactatctgagaggcctgtgtaaaattgtgtaagcaaaataaggagtctaatattgaaatatgcaaataattttacttttaggaacttagactcctttgtagagcattaaattttatgctatattaagtagaggtaatgctgttttgtacataaaaactatctttggattatttacctttccttttctttccgaaattgttgtcttttcaactccgtctttagggacagacaaatgatcagctgagtggtataattaatagaagcaccagttttagaagctctacttctggaagtagaataaaaaggaggtgtaacccagagtttaagatatccactgataatgagagtatttgagtgatggtaaatggcaaggagaaagacttaaagatctatctagagacaaacccttatactctaggcatgctgccagataaagactaaaaacagcgtgtaagatggcaagggaaatgtgctgtttggtttcttcattgccataaaagccactgagaagggcttaaagagatatgccattcctaaatggtaacattagacttcttgttctatgacttgagtgaaaaattttgccattaggaaatggggacaaggaatgtcatcttcaacacagggtagctttttggtctatctactcgtggtcaacaaaaggtacagtaagtaaggtcacagaatggtcaccccactttggttcaatcctgttcttggacagatcagtaactcaacgacgctttgtttttcttttgtgaagcctcttcagccttgatcataatgatttcattagcagtgtgtgcttgatttttgcacacccacacaatgttttgtattacccaacaaacttacagaatgtagccacagcttcttgctccaggaaatgtctatcaatttaattattaaaactagtttaatgtttggtgccctgtgagcaggatctttaagatgaaatgagccaatccacattccattatttcactgacatttaacataatccttgcagctatcaagctatgcctcccaaatctaagacaatgagtaaatgttattagttgaatcagtgactaaatcagctaaaatggttgcttgactaaatgaacgagttacttgatacatcgtgaacacattgaaggaaattggaagaaatggaattctggctcctgggtccctaaaaattgctgagtgtgtttccttttttgtaaaataggtatattaatattttgcctagatgtgttacagtaaagattaaaaataagtcaagtaaaatatctagcatatagcagagaataaatggttgctgtaacttattatgattatttattaaaagttcaagttgctttgaagaaatt

SEQ ID NO: 15220 - DNA, 3576 bp, Homo sapiens
  CDS (301)..(807)
gaaaggtcacagcgcggcagcgggtctggctggcggcagcggcgggagggagccgagagacccgagtgcacgtgtggagaagcggcggcacaagcgcggcggcgggagacactcccgcccccaccagactcaagccctcactcgactctcgcggccttcgttgctcgcacagctccctgcccaggctaggaggccggcttgcggggttgagtggcccgagctaagggtgcggagacctaagggcggcgactacgacggcgttgatatcggtggtaacgacggcctcagcaggcggggaagatgaaaggtagccggatcgagctgggagatgtgacaccacacaatattaaacagttgaaaagattgaatcaggtcatctttccagtcagctacaatgacaagttctacaaggatgtgctggaggttggcgagctagcaaaacttgcctatttcaatgatattgctgtaggtgcagtatgctgtagggtggatcattcacagaatcagaagagactttacatcatgacactaggatgtctggcaccttaccgaaggctaggaataggaactaaaatgttaaatcatgtcttaaacatctgtgaaaaagatggtacttttgacaacatttatctgcatgtccagatcagcaatgagtcggcaattgacttctacaggaagtttggctttgagattattgagacaaagaagaactactataagaggatagagcccgcagatgctcatgtgctgcagaaaaacctcaaagttccttctggtcagaatgcagatgtgcaaaagacagacaactgaacaaattacaaatgaactttcttgcacttgcttgtcgccaaataaaagagaggcccattgattcctcccccaccccaacacttttcttttaaagcttttctccctccttgttcttgtttttctttcttcctttccttttctctgagagttttaatactttcaaggactttaaaaaaataatcatgtttgaattgttttctcttatttttgtgaggtggtttgaaggaaggacaaggtagatctgtttagttttgcagttgaagttagatggtcctaaacatttaattgtcaaataatttcaaatttaatgtcctgctttcacattgaagggcagagcctacaaaacattgtatatttcaaaagacaaaaagaagcagcagcagtatcttgttctctaattcatagacaagttgagtgtgtttgtggtactttgggtttttaaacactttgggatactaatccctagacattgccttcactccacctttagtccttctgagcactctctcgggagttggaacattgttatccttgtaagaaatactaagcttatgttgatttttaagtaattatatcttctcttcttgctggtgggtggggcagtttggtttagtgttatactttggtctaagtatttgagttaaactgcttttttgctaatgagtgggctggttgttagcaggtttgtttttcctgctgttgattgttactagtggcattaacttttagaatttgggctggtgagattaattttttttaatatcccagctagagatatggcctttaactgacctaaagaggtgtgttgtgatttaattttttcccgttcctttttcttcagtaaacccaacaatagtctaaccttaaaaattgagttgatgtccttataggtcactacccctaaataaacctgaagcaggtgttttctcttggacatactaaaaaatacctaaaaggaagcttagatgggctgtgacacaaaaaattcaattactgtcatctaatgccagctgttaaaagtgtggccactgagcatttgattttataggaaaaaatagtatttttgagaataacatagctgtgctattgcacatctgttggaggacatcccagatttgcttatactcagtgcctgtgatattgagtttaaggatttgaggcaggggtaattattaaacatattgcttctattcttggaaaaatagaagtgtaaaatgttaataatacaaatgtcactgtgacctcctccactgtgaggactggtttatgccagatcattttccggcacacacggagtggctttgacagattgataactttgtaagatgggagacatctgaaatattcatgttttccttttgtagtcccatctccactatttagaaatgttctcagactttaaaataatgcacagggcttgagctttctgtcatttgactttaaaaggaagtttcattcatatttatcctcttatgtaaaattgcggtataaagtctcatttccaaatatgttaaatgacaaaattattttataaaatgtttatgcacactttataaccttaagtttttatttgagaatgtgaaagtacaaagtgcagtagacttcaacaatcttgagtgccaagaataatacagaaaaagaagacagttgatgaatgagtttatagggttctaatcttaagatggtaaaaatgtagaaagaccttgctggttttttgggggtattcgtttcttaaacaatccaaatctaagcttagaagaaaagtttagcgttaagcacctttatcttcatgaataagcttcagcttgctcttggcaagagaagagtgcttgagttacagaaggcataagtagtttgaagaatgcagcagcctttttgtaaacttcccagatatcaaaatagactttgatatataaatggttttctgagatgacactgcctctatttctataaccatttcacctggactatctaaccagtcctatgaatgtatccctaaatgtggttattgaaaacctaatagctgcctcatgacaagtacatgttatttaaggaggaaaaaatattaaattttgaattgagtgtgtaggctccctatcattatatatagagtttctttttccacggtagtcagtgacttaacctgaattgtaaatgtttgtaaagggttaattgtcctacatcaaacttagttaaataattccatccacttatggaggaggaggagaatgtggaagaggtaaaaagctgggcacaagttcatatgcctatgagtcagtaaagactgaagtaatgtcctatgttgagctggttattttgatatatgataataattatctttgaagtagaacaattctgttaactggaaaatcacaggatatatccatcatatttttcaggacagatagtttttactgtggggcaaataggttaaaattacactatgttagttgcatttaggttttaaagcaaagaatctgtagagaaatctatgcaatatatagtttgtccagattagctttcatttggggaatgaagttctgaaatatctaaagcagtttactcatcaattgaaaagtcctccaaaaagagaactattgggaaaccatggtgtggtggtggaaaagaaaagctccctcagttttttggagggaataacttaaaaaaatacttaaatggctaagtttacttggtgcagttaagaattaaacttgtcaattttaacattgctgttacatctgaaataaacttatgtgatgttctggt

SEQ ID NO: 15221 - protein, 169 aa, Homo sapiens; identical to SEQ ID NO: 15030

SEQ ID NO: 15222 - DNA, 2147 bp, Homo sapiens
  CDS (253)..(702)
ggcctactgagggtcacaagggagatgtccgcccccagtcgtagcctcggacggtttctgagcgttggtgtttggcacgcgccaccctctcttgctttggttccgccatgccgatgtaccaggtaaaaccttatcacgggcgcggcgcgcctctccgtgtggagcttcccacctgcatgtaccggctctctaacgtgcaaggcaggagcggcggcccagcgcccggcgttggccacctacagtctttggtagatgagtggctggatagctacaagcaagaccaggatgcaggatttctggagcttgttaactttttcatctgatcttgtggatgtaaaggactcgggggactatcctctgacagctccaggtctatcctggaagaagttccagggcagcttctgtgagtttgtggggacattggtctgtcggtgccagtacatcctcctccatgatgacttccctatggacaacctcatctccctgctcactggcttctcagactcacaagtctgcgccttctgtcacactagcaccctggctgctatgaaactgatgacctccctggtaagagttgccctccaactgagtctgcaccaagatatcaatcagcgtcagtatgaggctgaaagaaacaaggggccagggcagagggcacctgagcggctggagagcctgttggagaaacacaaagagctgcattaatactacattgtcaaagacaaagacgaacatgagacatgcgatatgagttttaaaaggagagaagagcaaaaaaacaatacagctatccaaggagcaagtgctgagcttgtgaaaaaacagcttctattttattaaataatagtgttcctgcagggatgtctgaagtactctgcaaggctaattaggacagatcaatgtacacttacctctccagaaggctgaaaggtgtgtagtgactatgtgtcattaaaaatttacttgaccatgggcaacagatgtccatgaaagaatgaccctggtgagtgctctaagttttcattttactcatgtcatcctcaatgcatcataaatgccatagacaccattactatcacgtaggctcatagcagctgatgtgctgtatatgcttgagagggtggtatcaattaactatattatctataaagccatacttgcaattactaccacttcacaatttatcattaacgcatttggcagatttttttttctccaaagtaacatttatttaaaggtttatcaaaattcttagtacagcatttattataatgtgatttttgataattgactaaatcagtggctcttaaaaacaccctcatctcagtcccgctcagtatacaccacagtgccatttggggaaaagaaatacatattagaaatgttcatttcagacctcgtcatggaagatcatatattaatgtaatcaggtggtacgtttacatgctcattagtaatccatcattagtccaaatgctcactattaggaataaatgtacaacgagttattcagaatacccagaaagagtatttcttatttaaacattcaggacaagctgactgaaataagtgcacaccttgaatttgaactttcaaggcacatcactaaagtcaatcagttatgtcaggacactcttctataataatctcaattataaaattcctgcctctccctaacacaggagttggagggagttccaatatctgaatctttctaattcactgtaactgcaaaaaaatcttgatgaagtgtgtatttaaatttcatgccttaatacatagcatgccactaaaaccacattagttatgctttatgctgcttaatcatacgtcaaaatctgtaaaatctgctcttgcatgctaaggtaatttaactgcaattaatcaattaagaaaaataaaatgtaataaatgccaaataatgtaacttcttttaaacagaccactatctacacatttattccccaaatacttattagctgacaccatataaggaaaacataataaaaagtagacttcactgagcctttctcccattggtagcttgctctaaacttacaaatgttttagagaattctttggcatgatctgactttccaactaaaatgtgagcaacttgaaaaaaaaaaaaaaaaaaggccacatgt

SEQ ID NO: 15223 - protein, 150 aa, Homo sapiens
MSGWIATSKTRMQDFWSLLTFSSDLVDVKDSGDYPLTAPGLSWKKFQGSFCEFVGTLVCRCQYILLHDDFPMDNLISLLTGFSDSQVCAFCHTSTLAAMKLMTSLVRVALQLSLHQDINQRQYEAERNKGPGQRAPERLESLLEKHKELH

SEQ ID NO: 15224 - DNA, 3692 bp, Homo sapiens
  CDS (386)..(2287)
ggtgaatgggctggtggtgctcgctgctgctgctgagaggaggaggaggatgaagagttgggcttgtttgtctcctcctcctcctgcttcccctgctcagagttcctgcctccagctgccaggggggacagccagccagcagcaggaggggggctagagagctgaaggagagccagtttccccaaaattggacttctcagaacctttaatatgctaatgtgcattgtgaatctccaagagggggatatgatatgcagcattcttgaatacttctaatgacagggagcccactacctcataagctgcagtgagaagaggagtttgttactttaaacagaggctgaagaaactatagaattagcagagaaagtggagaaggtagaggatggagttgcagactctacaggaggctcttaaagtggaaattcaggttcaccagaaactggttgctcaaatgaagcaggatccacagaatgctgacttaaagaaacagcttcatgaactccaagccaaaatcacagctttgagtgagaaacagaaaagagtagttgaacagctacggaagaacctgatagtaaagcaagaacaaccggacaagttccaaatacagccattgccacaatctgaaaacaaactacaaacagcacagcagcaaccactacagcaactacaacaacagcagcagtaccaccaccaccacgcccagcagtcagctgcagcctctcccaacctgactgcttcacagaagactgtaactacagcttctatgattaccacaaagacactacctctcgtcttgaaagcagcaactgcgaccatgcctgcctctgtggtgggccagagacctaccattgctatggtgaccgccatcaacagtcagaaggctgtgctcagcactgatgtgcagaacacaccagtcaacctccagacgtctagtaaggtcactgggcctggggcagaggctgtccaaattgtggcaaaaaacacagtcactctgcaggttcaggcaacacctcctcagcccatcaaagtaccacagtttatcccccctcctagactcactccacgtccaaactttcttccacaggttcgacccaagcctgtggcccagaataacattcctattgccccagcaccacctcccatgctcgcagctcctcagcttatccagaggcccgtcatgctgaccaagttcacccccacaacccttcccacatcccagaattccatccaccccgtccgtgtcgtcaatgggcagactgcaaccatagccaaaacgttccccatggcccagctcaccagcattgtgatagctactccagggaccagactcgctggacctcaaactgtacagcttagcaagccaagtcttgaaaaacagacagttaaatctcacacagaaacagatgagaaacaaacagagagccacaccatcaccccacctgctgcacccaaaccaaaacgggaggagaaccctcagaaacttgccttcatggtgtctctagggttggtaacacatgaccatctagaagaaatccaaagcaagaggcaagagcgaaaaagaagaacaacagcaaatccggtctacagtggagcagtctttgagccagagcgtaagaagagtgcagtgacatacctaaacagcacaatgcaccctgggacccggaagagagccaatgaggaacactggccaaagggtgatattcatgaggatttttgcagcgtttgcagaaaaagtggccagttactgatgtgcgacacgtgttcccgtgtatatcatttggactgcttagacccccctctgaaaacaattcccaagggcatgtggatctgtcccagatgtcaggaccagatgctgaagaaggaagaagcaattccatggcctggaactttagcaattgttcattcctatattgcctacaaagcagcaaaagaagaagagaaacagaagttacttaaatggagttcagatttaaaacaagaacgagaacaactagagcaaaaggtgaaacagctcagcaattccataagtaaatgcatggaaatgaagaacaccatcctggcccggcagaaggagatgcacagctccctggagaaggtaaaacagctgattcgcctcatccacggcatcgacctctccaaacctgtagactctgaggccactgtgggggccatctccaatggcccggactgcaccccccctgccaatgccgccacctccacgccggccccttccccctcctcccagagctgcacagcgaactgtaaccagggggaagagactaaataacagagcccctctaggagaagccacgggatcccggcggcaaggagaacagaacactgaagactctagaaaagcaaagccggatttctggaaagtgcagaattcttttggttctttggttccagagagagagaagatgcttgtgccaggtggcaccagagtttgccaattgatccttcttattctgtgtgtacatgcaaagattggaccatgttacatgaaatagtgccagctggaggttctttgccagcaccatgccaagtgaaataatatatttactctctctattatacaccagtgtgtgcctgcagcagcctccacagccacgatgggtttgtttctgttttcttgggtggggagcagggacgggcggagggaggagagcaggtttcagatccttacttgccgagccgtttgtttaggtagagaagacaagtccaaagagtgtgtgggctttcctgtttctaaactttcgctactataaaaccaaaaaaaggaattgagatttcaccaaccccagtgcccagaagagggaaggggagtggctggagggagcagggggtgggacagtgtatcaaataagcagtatttaatcacctctggcgggggcctcgtgcaaggggagactgacaccaagaacagccagtaggttcttctcccctgcactctgctccctgcgcggtaaccccaccactcctgaagcctgcccagtctccttccttccctgcttggtgagtcgcgcatctccgtggttatcccgctgtctcctctccaagaacaagcagagcccgggccactggcccttgcccaaggcagggaagaaggatgtgtgtgtccaggaaggaaaaaaaggtggatcagtgattttacttgaaaacaagctccatcccttttctatatttataagaagagaagatcttgagtgaagcagcacgcgacccaggtgtgtgtgaattgaatggagacgtttcttttctctttctttaatttttgtttttgttctttttttctttaaggaaagttttattttactgttcattttactttcttggtaacaaaaactaaaataaggaatagaaaagctgtttttcaggctgacagtccaattaagggtagccaagaccttgcatggtagagtaggaatcatagtgtcagtgaggtcccgtgagtctttgtgagtccttgtgtcatcgttcgggcactgtttttttatgcaagggcaaaaatctttgtatctggggaaaaaaaacttttttttaaattaaaaaggaaaataaaagatattgaggtcttcctagtgttacttaaattaagatcaaggtaagaaacattgtaaaaaaaaattacaaaagtgctatttgtttcctaaaaacagtgatttctattaaaaaggtgtcagaactgg

SEQ ID NO: 15225 - protein, 634 aa, Homo sapiens
MELQTLQEALKVEIQVHQKLVAQMKQDPQNADLKKQLHELQAKITALSEKQKRVVEQLRKNLIVKQEQPDKFQIQPLPQSENKLQTAQQQPLQQLQQQQQYHHHHAQQSAAASPNLTASQKTVTTASMITTKTLPLVLKAATATMPASVVGQRPTIAMVTAINSQKAVLSTDVQNTPVNLQTSSKVTGPGAEAVQIVAKNTVTLQVQATPPQPIKVPQFIPPPRLTPRPNFLPQVRPKPVAQNNIPIAPAPPPMLAAPQLIQRPVMLTKFTPTTLPTSQNSIHPVRVVNGQTATIAKTFPMAQLTSIVIATPGTRLAGPQTVQLSKPSLEKQTVKSHTETDEKQTESHTITPPAAPKPKREENPQKLAFMVSLGLVTHDHLEEIQSKRQERKRRTTANPVYSGAVFEPERKKSAVTYLNSTMHPGTRKRANEEHWPKGDIHEDFCSVCRKSGQLLMCDTCSRVYHLDCLDPPLKTIPKGMWICPRCQDQMLKKEEAIPWPGTLAIVHSYIAYKAAKEEEKQKLLKWSSDLKQEREQLEQKVKQLSNSISKCMEMKNTILARQKEMHSSLEKVKQLIRLIHGIDLSKPVDSEATVGAISNGPDCTPPANAATSTPAPSPSSQSCTANCNQGEETK

SEQ ID NO: 15226 - DNA, 2368 bp, Homo sapiens
  CDS (93)..(497)
agccgccacactttcccaagcccgcaggcgccccccccaacaccagcgctgcacccccgacccattccccgcggccccctccaggagaaaaaatgaaaccagactggccgaggaggggggcggcagggaccagggtgcggagcagaggtgagggagacgggacttactttgcgaggcgcggtgcagggcgccgccgacgagaaataaaggccccgatacgggctgcctggagccccccgagcgcagcaatgtcagggctccagtccgggcggcgttggcggccgcaggggacggggacgggcgcgcgtgcggcgggcgctctcgctgcgctccggctcgggccccggctccgcgcggctccgctcctggctcccctctggctcctggcaccaactccggacagtcacatgacgccggcgccgctcgctctgcgagcctcccggggctggcgggagaataacttgtctgactaccagtattcttggatgcagaagtgctgaagatgagcacacacacgtacggagaatttctggagaattcagctgctcagaacaagaactgagatccagagagatgatgactttgcccatagaccaaacaaagaaatacatgtttcagtcctgtgtcctcctgctatgtgtgtccggaattggtgggttcttggtctcactgactccaagaatgaagctgcggaccctcgcggaccgtgtgtgaatgcctgctctgtgagccctcagaatctactggctgaatgagtgcgtggaggaaatgtgctcagagctgctgtgtgtcatcctgtgtttgaagtgctcctgcagctatcattcatccagttaagaatttgaagaagtgtgtgcacaaagacggagtctcactctgttgcccaggctggagtgcagtggcacaatctcggctcactgcaacctctacctcctggattcaagcggttttcctgcctcagcctccagagtaacagggattacaggcatactccaccttgccctgctgattttgtatttttagtagagacaagagtttcaccatgttggccaggctggtcttgaactcctgacctcaagtgatccactgcctcagcctcccaaagtgctgggattataggcgtgagccactgcgcctggccaaatgctctactttttaatcaatgttttccaaaatagggatttttgctatgtgctttagaaattagagaacaaacggtgataatatatgctaaacttaaaattagtatgcctccttttatagacaacaagaactttgtcacttcccagtttgtcttgtcattcaggaggctcagagctacgatctgtgcccactcgtgctgcctcttcttaactttgatttcctgaagcagcgatttcatctccgtttcccctcatcacctgttcttttaactgtttaaaaacagcattacatgttgttgcaagtggcctcaaattctttttggtagaagggaaattgtaatccatgagaagaaaaaaattttcctaactattctcaggtgtgtttaagggctgcattccatgatgctatcagtgccttctttcagctcacaggatatcggccatgttaatgagtctgatgttgctagtatcacaggcaccggaaaatatgcacattatgctggagcattagaatgcaacagaaagagccctgggcttggagtatgcagaactggttcttgttacaactcctcttactagtgggctctggaagaaaacacattgaattcatgatcatggttaacctttggagagagagaggagaccaggatgaaggagccagtcgaagatcctgttcaagtgtacactgagccagcaggttcaccagaaagctattgagcgtttgctggaacacattatgcagggtgaatttcttctggaatgttgccaaggattttttatgcttctgtggcaggcatttcttgaacattgtcatttagccaagcaaagaagattttcttaaaggatagaaagtgtttaaaaatttttgtttgtttgaagataggttaaatggctatatgatctcaggataagacagagaaaatcacttatttctctaagtgatctgattaggttagtgatgttttgcctttaaacagattcatcattattcctaaagtattgctgtattaatactgtcttctagaaagtatccaccagtgcctacttttcttcgatatcattagctgtttttcgaaactgaatttgctcttcagagatttctcatatgtttgcgtataaggaactactggtaatagccaagaaaatttggaggtgcagagaacatgctgaaacagaatttttcactttcaattctagaactatgccataaaaaaaaaggaaaatgt

SEQ ID NO: 15227 - protein, 135 aa, Homo sapiens
MKPDWPRRGAAGTRVRSRGEGDGTYFARRGAGRRRREIKAPIRAAWSPPSAAMSGLQSGRRWRPQGTGTGARAAGALAALRLGPRLRAAPLLAPLWLLAPTPDSHMTPAPLALRASRGWRENNLSDYQYSWMQKC

SEQ ID NO: 15228 - DNA, 2951 bp, Homo sapiens
  CDS (359)..(1426)
agggagggaaggaaggaagagagggaggcgggcaagcaggcgggcgcgggggtcggggactgaggcagtagagggaggcgagagcccggcagccgcttcgcgctgtttgctgcgcgggcttttggagggggcggccgtttagtcggctgaggagaagcggacaccagcggcgttggtgatagcgcctgggggagggggactggagaggcgagaaggggggtcgctgcggtggttctctcgctgtcgctctctctttgcctcgctcccggctcggcgggctcctcccggcgtctctctcgcctccggggtcccgctccccgccccccgcggtatgtcttgatcccgagcagcgggtttcatggggctcctcaggattatgatgccgtccaagttgcagctgctggcggtggtggccttcgcggtggcgatgctcttcttggaaaaccagatccagaaactggaggagtcccgctcgaagctagaaagggctattgcaagacacgaagtccgagaaattgagcagcgacatacaatggatggccctcggcaagatgccactttagatgaggaagaggacatggtgatcatttataacagagttcccaaaacggcaagcacttcatttaccaatatcgcctatgacctgtgtgcaaagaataaataccatgtccttcatatcaacactaccaaaaataatccagtgatgtcattgcaagatcaggtgcgctttgtaaagaatataacttcctggaaagagatgaaaccaggattttatcatggacacgtttcttacttggattttgcaaaatttggtgtgaagaagaaaccaatttacattaatgtcataagggatcctattgagaggctagtttcttattattactttctgagatttggagatgattataggccagggttacggagacgaaaacaaggagacaaaaagacctttgatgaatgtgtagcagaaggcggctcagactgtgctccagagaagctctggcttcaaatcccgttcttctgtggccatagctccgaatgctggaatgtgggaagcaggtgggctatggatcaagccaagtataacctaattaatgaatattttctggtgggagttactgaagaacttgaagattttatcatgttattggaggcagcattgccccggtttttcaggggtgctactgaactctatcgcacaggaaagaaatctcatcttaggaaaaccacagagaagaaactccccactaaacaaaccattgcaaaactacagcaatctgatatttggaaaatggagaatgagttctatgaatttgcactagagcagttccaattcatcagagcccatgccgttcgagaaaaagatggagacctctacatcctcgcacaaaactttttctatgaaaagatttaccctaagtcgaactgagtataaggtgtgactattagattcttgaactaaaatttgaccctgtcttcacctttgttctcagctccacagtctggattgctgacagtaggtgtatatgacaatttgtattgagccaaattaggaaacagacagtaacgtcaaggaagtagatactggctggcattgtcagtgttctaagtttcaggcatttttatttttcctggctaaacgttggtgaaagttataacctcctgcctgggagaaaatatacatcacctaaaatgaacttatggcaggtctaatcaaaaggctaaatacaatttcagaaaaggttctgatactcttgtttttgataaagcattttttcaactaaccatgaattaagatgagtccatttgcctcttctgccttcactgagggtttgggttatacacctctactgaattgtgttaataactgtttggcagtgtgtactttgtttttgtgagtcatgtctcatgaaatttattggaatgtttaatcatatttgctaagaaatgtttctgctgtagttggatttgcccatatttatgtaggtggttttaattttttaaatggtgattagtgttaaaaatcaatttaaatcatgactaatatggtaaaaagataaagcatcaaagcagtatttctcattcctgcctcctcaatatctaatactgggaagatacttcaaagaatattgagattgtctgaagttttagttaagattttcacacattaatatcaaaaaagtaagtttagtatttgtttctccatgggttatttgtaaagctgtaaactgagatatcggtgactccgtattatgactccattagtgagctgtggtatgggtaggattttcctacttcttctgtacttttacctgtagactatttttactaaggtgctttataatgtgttttaaagcattgcatttacaaaacaaggaaaatgctgtaaatattgcatattttatgtatttggaccaaaaggttacaagtaattagacaaaagtggttttgcaccaattttatgtcaagtaaaaccatcagacctactgttcttgtatttctcatttaactttactgttaagacatcactgaaatgaacttcagtaagctttcaattttgatacacagttcattattcataacttgaggcagtaattacagtggaatgagtactggacaaggagtcaaaaaacttgatttcaggtcctagctctagcacttacagctgtgtgatcttgggcaagtcacttaacctctctttgcctcaatttcctcatcttgaaatgaggataataatacctgctgtacctacctcacagggctgttgtgaggattaaatgagatggcatgtgaaagcactttgaaaattgtaaagcgctatgtaaatgtaaggtattatagaaacatctttaacatatagtttcataccattcattttttaacaaagaaagggaaaagtctgcttgtaagctggttgaaaaagttaatcttgatataaatttgtgtttgat

SEQ ID NO: 15229 - protein, 356 aa, Homo sapiens [sequence omitted]

SEQ ID NO: 15230 - DNA, 2425 bp, Homo sapiens
  CDS (32)..(1174)
atatttatgtcaatctggctacttttctagtatgttcagtggttcttggaaagaatccagcatgaatattattgaactggagattcctgaccagaacattgatgtagtagcactgcaggttgcatttggttcactgtatcgagatgatgtcttgataaagcccagtcgagttgttgccattttggcagcagcttgtttgctgcagttggacggtttaatacagcagtgtggtgagacaatgaaggaaacagttaatgtgaaaactgtatgtggctattacacatcagcagggacctatggattagattctgtaaagaaaaagtgccttgaatggcttctaaacaatttgatgactcaccagaatgttgaactttttaaagaactcagtataaatgtcatgaaacagctcattggttcatctaacttatttgtgatgcaagtggagatggatatatacactgctctaaaaaagtggatgttccttcaacttgtgccttcttggaatggatctttaaaacagcttttgacagaaacagatgtctggttttctaaacagaggaaagattttgaaggtatggcctttcttgaaactgaacaaggaaatccatttgtgtcagtattcagacatttaaggttacaatatattatcagtgatctggcttctgcaagaattattgaacaagatgctgtagtaccttcagaatggctctcttctgtgtataaacagcagtggtttgctatgctgcgggcagaacaggacagtgaggtggggcctcaagaaatcaataaagaagaactagagggaaacagcatgaggtgtggtagaaagcttgccaaagatggtgaatactgctggcgttggacaggttttaacttcggcttcgacctacttgtaacttacaccaatcgatacatcattttcaaacgcaatacactgaatcagccatgtagcggatctgtcagtttacagcctcgaaggagcatagcatttagattacgtttggcttcttttgatagtagtggaaaactaatatgtagtagaacaactggctatcaaatacttacacttgaaaaggatcaggaacaagtggtgatgaacttggacagcaggcttctgatcttccctttatatatctgctgtaacttcttgtatatatcaccagaaaaaaagaattgaaaataatcgtcacccagaaaatccagaaaactgaagatttcatcagttggaaacagtagcactttgaaaactttttaggccagctttaatttaatggccctactgatattcacatcgaaggtgactaacaatgacaaaggccttatgaactgtacagacaatacagaagattattcttatcctcattgcatttctatgcatatgcgtaagaacattttaaagccaagaaaatatctgtcaaaccatttctgttagaacgatgtcaattcatgcttttaatttagcatcaatagaaaattgctgtaggtaaatctcacatttatctgcaacaaaatatagatttaatttttagcttaaactttgtttctaccttatgttagtggacctcagttatccatctgtaaatttctttttatttggctaaaataatctaaaagaataatttggttggccaattagaaatgcctttttcagttggtgtattgaaagctttcctttaacattttcacctgctcattgtgattcctccttttagtctaatatctttccaggtcatacttgtttttaatcattaaatattttcttcctggttttggagactaagctgataaactttttttaaaacttaagcattgtcattgctattttttttaatttgactttcctaggagtttaagaacagtgaaagttagctttgcaccttcaaatgatcttgaatgagggaaaaatcagtttgattccaaggatatttcttgccttacatggtcttttctttgacagtctgtacacctttattattaggttttgaattatttatgtaccagatattatagttttaaacattttaatattctctgatctttagaattatttatgttcaaattttagttgggaactttgtttcctacttaagctcaggactttttaccctctgaattgagtgcctttgagtgacacatgctaatagaaatttgatagtaaatgtaaataaggtcagaggatgtaatatggagcctgatgatgaagcattaatgtaaaaatggaacttatttttgtcaaaaatgagatgtacacttgtcatgatttatgtatgttgaccttttgtgtttattactgttttgaaaatagccatgttcattttctttccagttagagtaagtacttctgtggttaatgtatatttttattatggtttttaaaatgggaatcatttttatgtatctgtgcaaataataaatgcccatttgg

SEQ ID NO: 15231 - protein, 381 aa, Homo sapiens
MFSGSWKESSMNIIELEIPDQNIDVVALQVAFGSLYRDDVLIKPSRVVAILAAACLLQLDGLIQQCGETMKETVNVKTVCGYYTSAGTYGLDSVKKKCLEWLLNNLMTHQNVELFKELSINVMKQLIGSSNLFVMQVEMDIYTALKKWMFLQLVPSWNGSLKQLLTETDVWFSKQRKDFEGMAFLETEQGNPFVSVFRHLRLQYIISDLASARIIEQDAVVPSEWLSSVYKQQWFAMLRAEQDSEVGPQEINKEELEGNSMRCGRKLAKDGEYCWRWTGFNFGFDLLVTYTNRYIIFKRNTLNQPCSGSVSLQPRRSIAFRLRLASFDSSGKLICSRTTGYQILTLEKDQEQVVMNLDSRLLIFPLYICCNFLYISPEKKN

SEQ ID NO: 15232 - DNA, 2897 bp, Homo sapiens
  CDS (335)..(1855)
gcggcttccggcggcgtgacctgaccgcaagaggccaatggagtgtgggagctgaaagggtcttcgctggcggccggtaactggcggcggttgggaacggccgagtgtggctcttctggtgtttcagcttggggagagaggggtggccttcctcttgcagttgaggccggcgccgagccggacttcaggcggatctcgtggcggagcccatcttgctccctctcccaggcctttacccgctccctaggattcccgggccctgtaggtgggagttgggagacgacagtactgcttttaaagagacagtgttagggatcttggaagcacagccaacatgtgtgacattgaagaagccactaaccaactcctagatgtgaaccttcatgagaaccagaagtctgtacaagtgacagaaagtgacctcggaagtgaatctgagcttctagtcactattggagccactgtacctactggctttgagcaaacagctgcagatgaagtcagagagaaacttgggtcatcatgcaaaatcagcagagaccgtggcaagatatattttgtcatttcagtggaaagtctggcacaggttcattgtctgagatcagttgataacttatttgtggtggttcaggagtttcaagattaccagttcaaacaaacaaaggaagaagttctaaaggattttgaagacttggctggaaaactcccatggtcaaaccccttaaaagtgtggaaaattaatgccagttttaaaaagaaaaaagcaaagcgcaaaaagataaatcagaattcaagtaaagagaagattaataatggacaagaagtcaaaatcgatcagagaaatgttaaaaaagagttcactagccatgctttagattctcatatcttagattattatgaaaatccagccatcaaagaggatgtatcaacattaataggtgatgatttggcatcttgcaaagatgagactgatgaaagctcaaaagaagaaactgagcctcaagtgctgaagtttagagtcacatgcaacagggcaggagagaaacattgctttacctcaaatgaggctgcaagagattttgggggtgctgttcaagattattttaagtggaaggccgacatgaccaactttgatgtggaggttcttttgaacatccatgataatgaagtcattgtgggcattgcattgactgaagagagtctccaccgaagaaatataacacattttggacctacaactcttagatcaactcttgcctatgggatgctcaggctctgtgatcctctaccttatgatataatagtcgatccaatgtgtggaactggggcaataccaatagagggggccactgaatggtctgactgtttccatattgctggtgataataatccactggctgtgaatagagcagcaaataacattgcatctttattgaccaagagccaaattaaagaaggcaaaccctcctggggcttgcccatagatgctgttcagtgggatatctgcaatctgccgttgagaactggctctgtggatattattgtaacagatttgccatttggaaaaaggatgggatccaagaagagaaactggaacctttatccagcttgcctacgcgagatgagccgtgtctgcacacctaccacaggccgagctgtactacttactcaagacacaaaatgctttaccaaggcgttatctggaatgcaacacgtatggcgaaaggtggatacagtctgggtgaacgttggtggtcttcgtgctgcagtttacgttctgatacgtacacctcaagcttttgttcatccttcagaacaagacggagaaagaggaactctttggcaatgcaaagaatgaagatgactaatagtacttgtacttcccaccactggaaatgttagcataaaagaacttggagaggaaaaaagtattaacaaaactgcagtctgcactctttaaacctgtttaaggctcttcatcctggttagcaaaaggtgtgaatgtaatgtgatggaatttaaaagttttatgagaccaggcacagtggctcacgactgtaattccagcagtttaggaagccgaagtgtgcagatcacctgaggtccggagaccagcctggccaacatggtgaaaccctgtctctactagaaatacaaaaattagccaggtgtggtggcgggcgcctgtaatcccaactactcaggaggctgaggctagagaatcacttgaacccagcaggcggaggttgcggtgagtcgagatcacgccattgcactccagcctgtgcgacaagagcgaaactctgtctcaaaaagattttataagaaagcagagcttttccttgaagctcttttgaagtggtagcttaattagtattttgttgaaaatactttaaagatgcctagtgaaaagcctactaaagtgctgtgagattggggtttagaacattttattttcaggctttatggcctattttccattgtgtcaagtgcaaaactaccctggcccaaaggaagggcagagaacataattacatcttaggccacatttcattctttgcagctttgctaatccagttgctcaagttctttacctcaacctgaaggaatgaagcattattacattttgtgaatggtgttcagcctataagacgaagtctcacaagacctataggaaagtttaccatctgcctaaatattaaaatatccatctgttattcacattaatacacagaatgaaaatagaggtctaggaattatcaaaggtactgcaaaaatactgtatagaacttatttgtaaatagcacatacattgatagatggggtgtgggaccaacaaaccaaattaaaagaaattgtttttctttcagtacactaaggtgtgtgttttcaaaacc

SEQ ID NO: 15233 - protein, 507 aa, Homo sapiens
MCDIEEATNQLLDVNLHENQKSVQVTESDLGSESELLVTIGATVPTGFEQTAADEVREKLGSSCKISRDRGKIYFVISVESLAQVHCLRSVDNLFVVVQEFQDYQFKQTKEEVLKDFEDLAGKLPWSNPLKVWKINASFKKKKAKRKKINQNSSKEKINNGQEVKIDQRNVKKEFTSHALDSHILDYYENPAIKEDVSTLIGDDLASCKDETDESSKEETEPQVLKFRVTCNRAGEKHCFTSNEAARDFGGAVQDYFKWKADMTNFDVEVLLNIHDNEVIVGIALTEESLHRRNITHFGPTTLRSTLAYGMLRLCDPLPYDIIVDPMCGTGAIPIEGATEWSDCFHIAGDNNPLAVNRAANNIASLLTKSQIKEGKPSWGLPIDAVQWDICNLPLRTGSVDIIVTDLPFGKRMGSKKRNWNLYPACLREMSRVCTPTTGRAVLLTQDTKCFTKALSGMQHVWRKVDTVWVNVGGLRAAVYVLIRTPQAFVHPSEQDGERGTLWQCKE

SEQ ID NO: 15234 - DNA, 1923 bp, Homo sapiens
  CDS (166)..(1623)
aaaaaatgcagacgggataggggtgtgtgtgtgaggggagggggcctgtatggcaactgctcttgccccagcgtccccaaaagtgcagaggcagcggctgcagcatccagccagcttggatgtctggcctacttccaggactctgaagaaacagttacaagcaggatgcttttcccaacctctgcgcaagaatcttcccgtggcctcccagatgcaaatgacttgtgccttggcctgcagtccctcagtttgacaggctgggaccgaccctggagcacccaggactcagattcctcagcccagagcagcacacactcggtactgagcatgctccataacccactgggaaatgtcctaggaaaaccccccttgagcttcctgcctctggatccccttgggtctgacttggtggacaagtttccagcaccctcagttagaggatcacgcctggacacccggcccatcctggactctcgatctagcagcccctctgactcagacaccagtggcttcagctctggatcagatcatctctcagatttgatttcaagccttcgcatttctccacctctgcccttcctgtctctgtcagggggtggtcccagagaccctttaaagatgggggtagggtctcggatggaccaagagcaagctgctcttgctgcagtcactccctccccaaccagtgcttcaaagagatggccaggagcttctgtgtggccatcctgggacctcctcgaagctcccaaagaccccttcagcatagagagagaggccaggctgcaccgacaagctgcagctgtgaatgaagccacctgtacctggagtggccagcttcctccccggaactataagaaccccatctactcttgcaaggtgtttctaggaggtgttccttgggatattacagaagctggattagttaacaccttccgtgtttttggctctttgagtgtggagtggcctggtaaggatggcaagcatccccggtgtcctcccaaagggtatgtgtatctggtcttcgaactagagaagtctgtccgatccttgcttcaggcttgctctcatgacccgctgagcccagatggcctgagtgaatattatttcaagatgtccagccgaaggatgcgctgcaaggaggtgcaggtgatcccctgggtattagccgacagtaactttgtccggagcccatctcagaggcttgaccccagcaggacggtgtttgtcggtgctctgcatggaatgctaaatgctgaggcccaggcagccatcttgaacgacctatttggtggagtggtgtatgccgggattgacacagataagcacaagtatcccattggttctggtcgtgtgactttcaataaccaacggagttacctgaaagcagtcagcgctgcttttgtggagatcaaaaccaccaagttcacaaagaaggttcagattgacccctacctggaagattctctgtgtcatatctgcagttctcagcctggtcctttcttctgtcgagatcaggtctgcttcaaatacttctgccggagctgctggcactggcggcacagcatggagggcctgcgccaccacagccccctgatgcggaaccagaagaaccgagattccagctagaggagctggccttgcccagtggcctgtggcgcccaaagctggcaggtcaggcaagcagcctgcaccaccctgccactggcgaccagggagctggcttcccaaggacaagggaaaattgtagtcacctttgcacttgctgaatctgtctttgtttctgcactaattaatgcacattgagttttgtcaggttttgttttcagggggtgtaccaagggcaaggaccctctggcttaccctccaagcgactctgtagttttcccagattttagttcctcattttgcagatgaaaagcgggg

SEQ ID NO: 15235 - protein, 486 aa, Homo sapiens
MLFPTSAQESSRGLPDANDLCLGLQSLSLTGWDRPWSTQDSDSSAQSSTHSVLSMLHNPLGNVLGKPPLSFLPLDPLGSDLVDKFPAPSVRGSRLDTRPILDSRSSSPSDSDTSGFSSGSDHLSDLISSLRISPPLPFLSLSGGGPRDPLKMGVGSRMDQEQAALAAVTPSPTSASKRWPGASVWPSWDLLEAPKDPFSIEREARLHRQAAAVNEATCTWSGQLPPRNYKNPIYSCKVFLGGVPWDITEAGLVNTFRVFGSLSVEWPGKDGKHPRCPPKGYVYLVFELEKSVRSLLQACSHDPLSPDGLSEYYFKMSSRRMRCKEVQVIPWVLADSNFVRSPSQRLDPSRTVFVGALHGMLNAEAQAAILNDLFGGVVYAGIDTDKHKYPIGSGRVTFNNQRSYLKAVSAAFVEIKTTKFTKKVQIDPYLEDSLCHICSSQPGPFFCRDQVCFKYFCRSCWHWRHSMEGLRHHSPLMRNQKNRDSS

SEQ ID NO: 15236 - DNA, 2532 bp, Homo sapiens
  CDS (426)..(1073)
gtgcatgagggggctgctccggagcgacggcggctgcagctggagccaggcgctcgcccgtccgccggttggctcgccgggacctcgcgcaccggcggcagagtcccttgcgtggattggcaagcgacgccccacctgccccgagctcaccattttctttcgcgctggctgcagctgacccggcgaagggagccgaccgggccctgggctggaggtaaaaccccacggaaagaacatgaggttcccttggaaatcattcaagaggaagatggaaggggctgtttagaagagcttaaaagctacaggctgtaagactggggcctgagtgctggcagtggaaaacactgttgggctgtgatctctccctgaaaagttccaggtgcctttttgcttcctgcaaaagaaaggaagcgaaagagaagaccatgtccatagccctgaagcaggtattcaacaaggacaagaccttccgacccaagaggaaatttgaacctggcacacagaggtttgagctgcacaaacgggctcaggcatccctcaactcgggtgtggacctgaaggcggctgtgcagttgcccagtggggaggaccagaatgactgggtggcagtacatgtggtggacttcttcaatcggatcaacctcatctatggcaccatctgtgagttctgcaccgagcggacctgtcctgtgatgtcagggggccccaaatatgagtatcggtggcaggatgatctcaagtataagaagccaacagcgctgccagctccccagtacatgaaccttcttatggattggattgaggttcagatcaacaacgaggaaatatttccaacatgcgtgggtgttcccttcccaaagaacttccttcagatctgcaagaagatcctgtgccgccttttccgggtctttgtccacgtctatatccaccacttcgaccgggtcattgtgatgggtgcagaggcccatgtcaacacctgctacaaacacttctattactttgtcacagagatgaacctcatagaccgcaaggagctagagcctttgaaagaaatgacgagcaggatgtgtcactaatgctccacctcaccctttggaagaaaggaaagctgtttcctcctggtgccctgagcgggcaggaggtggaccaccctggctgaaatgacacacctactcccaggaacagcagaggtggaggcaagcagtgactcctgagagacattccccactcactttgtgtgctcttaaccttctgagtgctgctagcccagacctgtggacgaggcagaccacaacgtgaaagaaggaccagccccttgaccgttctggctggggaattgtccacgaggaagcctctgcgcttccacacatggcacagttctgcctgtgacctgccgcctaagctttactggaattcaggttttgagactgagatgcgtgttcgtatttttccacttatctgtcttgtcagctggccgacttctctgtgattggttttttaagtgccgggtgaattttggacctctggatgtgcagcaagtttttatgcaataagccttcctttcaggtctctaaaagctcctgctctgatctgtggtttaacactgtgcagggctgtggagctctgagagacctgaacccctacccatcccctgcacctccctactctccctgccgaggcgtccatagcatttccctaataaatagttttatcagggacactccatggggtggcttgtctctgccccaaacagggtcttcacgttctaactgcagggaagagactggttactagcgtaaagctgacaagttaccagttcacctgatcagaatgtattttttataaccaccatcattccttgtctcttcagtggaagatattctttcctgtttcccagaagagagaaataaaagtcctaaataactaagaatgatcagcgggagcgttgggcatgattactgcagtgtttgttctttattaaagacagggagtcgtggctgtctctacataatactaacatttcagtgaaaaaagtacagttggttatttggtacgtgtagatttaacacccagacggctgacttgtaaccctccccactagccttctgagcatttaaacccagccgtcattctctccccactccacgctccccactcctctgccacgttatgttacggcacaaaattaatttctgcccctgtgattgggccacggttgccaaggtaacagtggagctggagctaacttccttctttcatcctttccaatttttctattccagaagacagtcagaataatgcattctgtactacatcctgccttttgaaacctaaatgagttttcgttgatgaaatgttgccttctctgattcattcacaaaactgtggtggttctgaccacctgtgacgaggggggtcataatacttccagtgatccttttaatttagcaaaatatttgtcggtggagggaagtagataagaatgtattagtgtattttaaagtaataatgattaaagaataactaaatgac

SEQ ID NO: 15237 - protein, 216 aa, Homo sapiens
MSIALKQVFNKDKTFRPKRKFEPGTQRFELHKRAQASLNSGVDLKAAVQLPSGEDQNDWVAVHVVDFFNRINLIYGTICEFCTERTCPVMSGGPKYEYRWQDDLKYKKPTALPAPQYMNLLMDWIEVQINNEEIFPTCVGVPFPKNFLQICKKILCRLFRVFVHVYIHHFDRVIVMGAEAHVNTCYKHFYYFVTEMNLIDRKELEPLKEMTSRMCH

SEQ ID NO: 15238 - DNA, 2424 bp, Homo sapiens
  CDS (29)..(2422)
agagtgctgatttagaagaatacaaatcatggctgaaaatagtgtattaacatccactactgggaggactagcttggcagactcttccatttttgattctaaagttactgagatttccaaggaaaacttacttattggatctacttcatatgtagaagaagagatgcctcagattgaaacaagagtgatattggttcaagaagctggaaaacaagaagaacttacaaaagccttaaaggacattaaagtgggctttgtaaagatggagtcagtggaagaatttgaaggtttggattctccggaatttgaaaatgtatttgtagtcacggactttcaggattctgtctttaatgacctctacaaggctgattgtagagttattggaccaccagttgtattaaattgttcacaaaaaggagagcctttgccattttcatgtcgcccgttgtattgtacaagtatgatgaatctagtactatgctttactggatttaggaaaaaagaagaactagtcaggttggtgacattggtccatcacatgggtggagttattcgaaaagactttaattcaaaagttacacatttggtggcaaattgtacacaaggagaaaaattcagggttgctgtgagtctaggtactccaattatgaagccagaatggatttataaagcttgggaaaggcggaatgaacaggatttctatgcagcagttgatgactttagaaatgaatttaaagttcctccatttcaagattgtatttttagtttcctgggattttcagatgaagagaaaaccaatatggaagaaatgactgaaatgcaaggaggtaaatatttaccgcttggagatgaaagatgcactcaccttgtagttgaagagaatatagtaaaagatcttccctttgaaccttcaaagaaactttatgttgtcaagcaagagtggttctggggaagcattcaaatggatgcccgagctggagaaactatgtatttatatgaaaaggcaaatactcctgagctcaagaaatcagtgtcaatgctttctctaaatacccctaacagcaatcgcaaacgacgtcgtttaaaagaaacacttgctcagctttcaagagatacagacgtgtcaccatttccaccccgtaagcgcccatcagctgagcattccctttccatagggtcactcctagatatctccaacacaccagagtctagcattaactatggagacaccccaaagtcttgtactaagtcttctaaaagctccactccagttccttcaaagcagtcagcaaggtggcaagttgcaaaagagctttatcaaactgaaagtaattatgttaatatattggcaacaattattcagttatttcaagtaccattggaagaggaaggacaacgtggtggacctatccttgcaccagaggagattaagactatttttggtagcatcccagatatctttgatgtacacactaagataaaggatgatcttgaagaccttatagttaattgggatgagagcaaaagcattggtgacatttttctgaaatattcaaaagatttggtaaaaacctaccctccctttgtaaacttctttgaaatgagcaaggaaacaattattaaatgtgaaaaacagaaaccaagatttcatgcttttctcaagataaaccaagcaaaaccagaatgtggacggcagagccttgttgaacttcttatccgaccagtacagaggttacccagtgttgcattacttttaaatgatcttaagaagcatacagctgatgaaaatccagacaaaagcactttagaaaaagctattggatcactgaaggaagtaatgacgcatattaatgaggataagagaaaaacagaagctcaaaagcaaatttttgatgttgtttatgaagtagatggatgcccagctaatcttttatcttctcaccgaagcttagtacagcgggttgaaacaatttctctaggtgagcacccctgtgacagaggagaacaagtaactctcttcctcttcaatgattgcctagagatagcaagaaaacggcacaaggttattggcacttttaggagtcctcatggccaaacccgacccccagcttctcttaagcatattcacctaatgcctctttctcagattaagaaggtattggacataagagagacagaagattgccataatgcttttgccttgcttgtgaggccaccaacagagcaggcaaatgtgctactcagtttccagatgacatcagatgaacttccaaaagaaaactggctaaagatgctgtgtcgacatgtagctaacaccatttgtaaagcagatgctgagaatcttatttatactgctgatccagaatcctttgaagtaaatacaaaagatatggacagtacattgagtagagcatcaagagcaat

SEQ ID NO: 15239 - protein, 798 aa, Homo sapiens
MAENSVLTSTTGRTSLADSSIFDSKVTEISKENLLIGSTSYVEEEMPQIETRVILVQEAGKQEELTKALKDIKVGFVKMESVEEFEGLDSPEFENVFVVTDFQDSVFNDLYKADCRVIGPPVVLNCSQKGEPLPFSCRPLYCTSMMNLVLCFTGFRKKEELVRLVTLVHHMGGVIRKDFNSKVTHLVANCTQGEKFRVAVSLGTPIMKPEWIYKAWERRNEQDFYAAVDDFRNEFKVPPFQDCIFSFLGFSDEEKTNMEEMTEMQGGKYLPLGDERCTHLVVEENIVKDLPFEPSKKLYVVKQEWFWGSIQMDARAGETMYLYEKANTPELKKSVSMLSLNTPNSNRKRRRLKETLAQLSRDTDVSPFPPRKRPSAEHSLSIGSLLDISNTPESSINYGDTPKSCTKSSKSSTPVPSKQSARWQVAKELYQTESNYVNILATIIQLFQVPLEEEGQRGGPILAPEEIKTIFGSIPDIFDVHTKIKDDLEDLIVNWDESKSIGDIFLKYSKDLVKTYPPFVNFFEMSKETIIKCEKQKPRFHAFLKINQAKPECGRQSLVELLIRPVQRLPSVALLLNDLKKHTADENPDKSTLEKAIGSLKEVMTHINEDKRKTEAQKQIFDVVYEVDGCPANLLSSHRSLVQRVETISLGEHPCDRGEQVTLFLFNDCLEIARKRHKVIGTFRSPHGQTRPPASLKHIHLMPLSQIKKVLDIRETEDCHNAFALLVRPPTEQANVLLSFQMTSDELPKENWLKMLCRHVANTICKADAENLIYTADPESFEVNTKDMDSTLSRASRA

SEQ ID NO: 15240 - DNA, 3999 bp, Homo sapiens
  CDS (67)..(1626)
ctaaaaatcaagcatggcgatttgttgttcctgtttccctcgagccttgctgggccctcatctgaaatggagacgtcagttccaccgggcttcaaagtctttggcgctcccaacgtggtggaggatgagattgatcagtacctcagcaaacaggacgggaagatttacagaagccgagacccacagctatgccgccacggccctttggggaaatgcgtgcactgcgtccctctagagccattcgatgaggactatctaaaccatctcgagcctcccgtgaagcacatgtccttccacgcctacatccggaagctgactggaggggctgacaaggggaagtttgttgccctggagaacatcagctgcaagattaagtcagggtgcgaggggcacctcccgtggccgaatggcatctgtactaagtgccagccgagcgccatcacgctgaacagacagaagtacaggcatgtggacaatatcatgtttgagaatcacaccgtcgctgaccgctttcttgacttctggagaaagacagggagccagcattttgggtacttatacggacggtacacggagcacaaagacattccccttggcatcagggctgaagtggctgcgatttatgagccacctcagattggtacacagaacagcttggagcttcttgaggatccaaaagctgaagtggtcgatgaaattgctgccaaacttggcctgcggaaggttggctggatatttacagacctcgtctcagaagatacccgaaagggtaccgtccgctacagtcgaaataaggacacctatttcctaagttcagaagagtgcatcactgcaggagacttccagaacaagcatcccaacatgtgccggctctctccagacggacattttggatccaagtttgttactgcagtggctacaggtggtcctgacaaccaagtccactttgaagggtaccaggtgtccaatcagtgtatggcactggtccgtgatgagtgtttgctgccatgcaaggacgccccggagcttggctacgccaaggagtctagcagtgagcagtacgtgcctgatgtgttttataaggacgtagacaagtttggcaacgagatcacccagctggcccggcccctgcctgtggagtatctcatcatagacatcacaacaactttccccaaggatccagtttacactttttctatttcgcaaaatccatttcctattgaaaaccgggatgtattgggtgagacacaggacttccatagcttggccacctatttgtctcagaatacctcatctgtgttcttggataccatctcagatttccacctcttgctgttcctggtcaccaatgaagttatgcctctgcaggacagcatcagcttgctgctggaggccgtgcggaccagaaatgaggagctcgcccagacatggaagaggtctgagcagtgggccaccatcgagcagctgtgcagcacagttggcgggcagctcccaggtctccatgagtacggcgccgtcgggggctccacacacacggccactgcagccatgtgggcctgtcagcactgcacgttcgtgaaccagccaggcacaggccactgcgagatgtgcagcctccccaggacctagggcgcctgccctctgctggctaggaccgggcccagcccagcccttcctgaagccagaagcgttgctgagtgtgttccctgtaactgccccatagtgggcagccctggaggaacaaggggctggctgtcctgggctccctgacccactgaagcttctcagcacgttcctccctggagagcgggcgccacggctggtattctgcaggctgaatgcagtctccagactggaaacgcagagcggctcctcacgcctaatcctgttgacaagtcccccgccgtgttggaaagacctctcgcctctacgtggcacctggaattggggcgcacagggaggggccgatgctgccaccacccagccttctctttattttcagtgctttttgtttggcctccctgcccccatgtttttctggctgggagctcctggttacccccttgtctgactgcttggtggcaggcaccctgcctgtgagggccactttcctcttctagtagctgttgtctggtggggacgcagtggccctggacacggctcccctctgcaggtctgcaggtcggtttgctgcctgccctcctcctctcacccgatgtccaggtgggattttaaagtctgcattggttataataacagttatcagtaattcctgcccagaagacttttatttatttttttttaagataaaaactgcacaaaaggggagtgagagagactagtttccacatcctttcctcctttagtgaagcccccgaggttgtgtccagggtgatgagtgtggacgggggcaccagtcagttctcccttgaagtaaacctcagtgcctgagacttttctaccaagccacacagctgcagcaactgcagatactgcgggctgagcaggagcagtggtggcgcctgccctgaggctgccctgcgatggcctgggtgggagagctgggtcaccggtgccgatgctctggccctccccaatacgctgcttcgtcccactgcaccgcctggctgagggcgttaggggctgtgcctcttgtgagggccatttgggacctccctggggcactgcacaattgatagtgtaccaatagagggagactgggcgatctggaacagcacgtggtggggtcctgcttgtgtgctctgcgttcctctgtggcgtggccaggccggggcctggctcttacccggggagtggtgggcatctcgatgcttctttgccttaatgatggccacatctgggctgctctgcacccacgggagaggctggcccagctgcagactgcttagggacttctgtgtccatcctggggggtaagcccacgtgacccacattcttggcactatgaacagagaacatttgcctgttggcttctgaagtggtcagggccatggctgacacctccaggtccgcctggcatgggacaccaagtggaaggcccaagcagctcatctgctcttgggaccaggggccagttgggttgggtctggtcacggcagagcttttgtggagggtcaggaagggtggagaggagctgggttgaagcggactgctgcggatgcaactcccagcttgcccaccgcgggctgtctgctctccctcctagcagctgtcacactgaagttttgtcctctgctgtctcctctggtcctgagatgagctgtgagcctaggtggccaaggcttcctgcattgcttccctgtgagtccaaggccttcccccaccactgggcagaggctggacagcacggacttctagagagagccgcgttgccagttcctctcccactcgctcgtccttatccaccacgctattatagtttccgttgtcctccaccagcatttcccttactctgaagttccggcattcacatcattcatgttttcttttgtcttttagctaaaggaaaagcattggcgatttgtctgattctggttttgagttactctttgttcagtaatgcactttattttattgtccaaagagagtcagagctaagcatacaggcttgggggtgagccctgctgtgagagttcaggccctgggaggctcagccacctcctcttgtgggaaggaggtctcagccccacctcgcatcttcacctgcccttggtgtggacacaccctctcatgctaccagcaccataatccagtgggggtgactgggtgcacacctgcccaggtgaacacagcggctgccagtctcctggtcccgagaggaggtggggcctggccctggctccctccaaccagctgctcctgggacacaggtgctcctgcttcggctctgtttcggctcacaggtgtgcatcactgggcttggatttgcattacattgaccccagccctgcagtggaacctaataaaagcgcctgaagc

SEQ ID NO: 15241 - protein, 520 aa, Homo sapiens [sequence omitted]

SEQ ID NO: 15242 - DNA, 2728 bp, Homo sapiens
  CDS (10)..(1302)
ttcaaaaatatgcttcggttaaaagaactgggaatcaacaatatgggcgagctcgtttctgtcgaccgctatgccctggataacttgcctgaactcacaaagctggaagccaccaataaccctaaactctcttacatccaccgcttggctttccgaagtgtccctgctctggaaagcttgatgctgaacaacaatgccttgaatgccatttaccaaaagacagtcgaatccctccccaatctgcgtgagatcagtatccatagcaatcccctcaggtgtgactgtgtgatccactggattaactccaacaaaaccaacatccgcttcatggagcccctgtccatgttctgtgccatgccgcccgaatataaagggcaccaggtgaaggaagttttaatccaggattcgagtgaacagtgcctcccaatgatatctcacgacagcttcccaaatcgtttaaacgtggatatcggcacgacggttttcctagactgtcgagccatggctgagccagaacctgaaatttactgggtcactcccattggaaataagataactgtggaaaccctttcagataaatacaagctaagtagcgaaggtaccttggaaatatctaacatacaaattgaagactcaggaagatacacatgtgttgcccagaatgtccaaggggcagacactcgggtggcaacaattaaggttaacgggacccttctggatggtacccaggtgctaaaaatatacgtcaagcagacagaatcccattccatcttagtgtcctggaaagttaattccaatgtcatgacgtcaaacttaaaatggtcgtctgccaccatgaagattgataaccctcacataacatatactgccagggtcccagtcgatgtccatgaatacaacctaacgcatctgcagccttccacagattatgaagtgtgtctcacagtgtccaatattcatcagcagactcaaaagtcatgcgtaaatgtcacaaccaaaaatgccgccttcgcagtggacatctctgatcaagaaaccagtacagcccttgctgcagtaatggggtctatgtttgccgtcattagccttgcgtccattgctgtgtactttgccaaaagatttaagagaaaaaactaccaccactcattaaaaaagtatatgcaaaaaacctcttcaatcccactaaatgagctgtacccaccactcattaacctctgggaaggtgacagcgagaaagacaaagatggttctgcagacaccaagccaacccaggtcgacacatccagaagctattacatgtggtaactcagaggatattttgctcctggtagtaaggagcacaaagacgtttttgctttattctgcaaaagtgaacaagttgaagacttttgtatttttgactttgctagtttgtggcagagtggagaggacgggtggatatttcaaatttttttagtatagcgtatcgcaagggtttgacacggctgccagcgactctaggcttccagtctgtgtttggtttttattcttatcattattatgattgttattatattattattttattttagttgttgtgctaaactcaataatgctgttctaactacagtgctcaataaaatgattaatgacaggatggggttcccctgtgcttttaccagtagcatgaccccttctgaagccatccgtagaaagtactttgtcctccaaaaagctaacatacggttttgaagcagcattgaaacttttgtagcaatctggtctatagacttttaactcaagaagctaaggctagacttgttaccttcgttgaatgatgttagttgactgtactgtaatgttgtatcaactgaattgaatgtttgcctttaaacaatgaattttctttttctttccttttttttttttgttgtaatagttaaagaggcttagaacaagctaacaggcaatagaaatatgtatatcagattttttaatgtaacaaactacatgttaattgttatcttattctttttatctttagtagacacttttaaaagaaaagacaattttgttgtgtttaactcaccaacacgtggtgtataatgaagacagaactataataaattagttttgttctgattttttagaacacttgcaataatgtatcatttatagttcttgctagttgcagtggtaatatttttcacatccataaaaacaactaccaaaataaatcagctgtagcatgttgctttttaaagctaggccctaaaaggttttaattctttttctaagggaagaaatgtctattttaattaagatattttaatgaacaggatttctgtattttaaatagtactgactagcacctaatgggcagtgggagggtggttcatatgaagaaaaaaaaggtgtattgttgtatcccatgcataaataaaggtaaatatatatatacaccaatatattcatatatactcacacacatcccaacctgtcacacacaatgcgtgtgtatatatatatgaatatattggatatgtcatttctgtaagagttttgttaaaacctgattttcttttgtagtatccacattcttcatcaaagtacaaaaacgtctgtggagtgtcacaaactgtatgacatgttatttctttttaacagttgtctatatgcttagacccgtgttagtctctatatctgtgtggcaatatctgctgagacaagtaaatgattaatagaaaac

SEQ ID NO: 15243 - protein, 431 aa, Homo sapiens
MLRLKELGINNMGELVSVDRYALDNLPELTKLEATNNPKLSYIHRLAFRSVPALESLMLNNNALNAIYQKTVESLPNLREISIHSNPLRCDCVIHWINSNKTNIRFMEPLSMFCAMPPEYKGHQVKEVLIQDSSEQCLPMISHDSFPNRLNVDIGTTVFLDCRAMAEPEPEIYWVTPIGNKITVETLSDKYKLSSEGTLEISNIQIEDSGRYTCVAQNVQGADTRVATIKVNGTLLDGTQVLKIYVKQTESHSILVSWKVNSNVMTSNLKWSSATMKIDNPHITYTARVPVDVHEYNLTHLQPSTDYEVCLTVSNIHQQTQKSCVNVTTKNAAFAVDISDQETSTALAAVMGSMFAVISLASIAVYFAKRFKRKNYHHSLKKYMQKTSSIPLNELYPPLINLWEGDSEKDKDGSADTKPTQVDTSRSYYMW

SEQ ID NO: 15244 - DNA, 3666 bp, Homo sapiens
  CDS (163)..(1671)
agtggggcccccgcagctctcgtcccggccgccgctggtgaccactcgccgcccctccggaggcttcacccgcgccctcccccaggacgcgccagcggagctccggctccttcgccctggacgcggaggccgcggtgtgcggggcgacggcgaggccggaagatggcctgggtgctcaagatggacgaggtgatcgagtccgggctggtgcacgacttcgacgccagcctctcgggcatcgggcaggaactgggcgccggcgcttacagcatgagtgatgtcttggcattgcccattttcaagcaggaagattccagccttccattggatggtgaaacagagcacccaccctttcagtatgtgatgtgtgctgcaacgtcaccagcagtaaaactgcatgatgaaacgcttacttatttgaaccaaggtcagtcatatgatcggatgctggataatcggaaaatgggtgatatgcctgagatcaatggaaaattagtaaagagcatcataagggttgtattccatgacagacggctacaatacacagagcatcagcaacttgaaggatggaagtggaatcgcccaggagacagacttcttgatttagatattccaatgtctgtgggaataattgacacaaggacgaatccaagccagttaaatgcggttgaatttctgtgggacccagcaaaacgcacctctgctttcattcaggtacactgcatcagcacagaatttactccacggaagcacggaggtgaaaagggagtgccctttaggatccaggttgacacctttaagcagaatgaaaatggagaatacacagatcatctacactcagctagctgccaaatcaaagtttttaagcctaaaggtgcagacaggaaacaaaaaactgaccgagagaagatggagaagagaacagctcatgaaaaagaaaagtatcagccgtcctatgataccacaatcctcacagagtgttctccgtggcccgatgcccccacagcctatgtgaataacagcccttccccagcgcccactttcacctccccacagcagagcacttgcagtgtcccagacagcaattcttcttccccaaatcatcagggagatggagcttcacagacctctggtgaacaaattcagccttcagctacgatccaggaaacacagcaatggctgctcaaaaacagattctcttcctacacaagactgttctctaatttttcaggtgccgacttattaaaactgacaaaggaggatttagttcaaatttgtggtgcagccgatggaattcggctctataattcactgaagtcaaggtcggttagaccccgtttaaccatctatgtctgccgggagcagccaagcagcacagtgctgcaagggcagcagcaagctgcaagcagtgcaagcgagaatggcagtggggcaccctatgtttatcatgcaatctacttggaagaaatgattgcctcagaagttgctcgaaaacttgcgctggtgtttaatatccctctccaccaaattaatcaggtttacagacagggtcccaccggtattcacattcttgttagtgatcagatggttcagaattttcaagatgagagttgttttttattctccacagtaaaagctgaaagtagtgatggcatccacataattttgaagtgatgtcttatatagactgaactgtattcagtaccaaatagtcacgcttaaaagtgtgtgaagactgaatccaagaagtcttgggattggattttaccatatgaaatgtttcatattgaaaacacaagatgacctttctaatgagctgtatgagaggtgaatctcctcactgtcactgccatagccaagcatcctcatgagagtgagcacatcggcacagcatgcatccagctctggaggccacggtgcaggcatagctgcctgctgctctggcagaggccagtaaatacagttcctagaagcagcctttgctgtctttttacactgtatgcggtttggaaatgaatgtagaaacttactgtgggcatttacctttctgtgccagtttggcttttattgcctgaaccttatgctgacctggagaggagatgggggacagtgctgttgtggggccagcagtgaatctgtatgcggagagttgtgttgtgctgatgtggccgttggtggtcaggtaagaggctcggcaccttcttggaagaaatcatgtctgagggtgtacgtttgatatgatcatgccagattggagaagatccaagccaggaagatgggcttgaagcaaactgcattatcaggagtaccttggtgagaggatcagtgtaaatcctaataggtacaaagacttttgtgttttggctttgtcacagatttattgaaaaacttttttgcttctgcttccatttttagcattttagtttctggttttcatttttggagattccttgccttttaaactcgtggtttttctctcattttcttccctctctccctccatctctgaccacccccaccctaaccccccacccccaccatcctattaaacatttttaaagccctaccccagacattggaaataggcgacccaagtagggggagaaagtattattgttgatagcttctgactaggtgttaagggatcttcattatgaacaagatgaatttttttctggaaacactagatgttatcaatcaaacactaaaatgtaccatacaaatcccttaagcctctcaaatattgagctttagtacaatcatggatagacattctggtgatgatttaggggctttttatacaccacatactagcttctttctctataagagtgcctctttcataaaaccaaatgcttgtctgctagcatacttttcaaagggaatccactgttttctcactttcctcccatatctccgtccttcatccaaaaccttcccagaatccatcagcaagcatgtttgaggcctgtggtgtaggggactgaattttttttttaacttctattccattttaattgtaggatatctttgtccatatacccaggtgtcctgatttgaatgtactatttgatcctcattgtgttcaggcaaaaaataggaaatgagtaattttgagtttgaaatctctcccagaagacaaactacttcagtgagtaaaagctttgacattttatgttttattcataaagggggttaattatttgctacaaagaagcacgatctattttcatcatcgatttgaaaatatctgtaactcctatagatcctataggcagagagttttcctttctgactttttccctttgctttcgtgtgaccacatgttttctgtaccagtcactggggaaagaagtgagtttatctcgtttgttttaaaagttttgcttgtctatttagcattcctttttgggtctcaagatttatggaacaataaatgtcatttaatgccgtgtgcttattttgaattcctcatcaggttttagaagcggagtaaaaatacttagatgcttatcagacttgaaattatactgagtggcattgaacgtgagtttgtcccagtgaaacaggctaaataaattttggcaccagcaaatttgctactttgtttttttaatagtaggatgtacacatttcagtataataaatgttttctgattgttttgc

SEQ ID NO: 15245 - protein, 503 aa, Homo sapiens [sequence omitted]

SEQ ID NO: 15246 - DNA, 2019 bp, Homo sapiens
  CDS (366)..(2018)
aacttcatgccctctttactcttgcccaagctgaggattctgtccttgttatagtgaataaagaaaaaccagatatatttcagctggtttcagtgaaactgccaaaatcctcaagccaggaagtagaagccaaggagctgtcctttgttttggattacataaaccagtcacccaagtgcattgcctttggaaacgagggagtatatgttgctgcagtacgggaattttacttgtctgtttattttttcaaaaagaaaacaacatcaaggtttactttatcatcatcaagaaataagaagcatgctaaaaacaattttacatgtgtagcatgtcacccaacggaagactgcatcgcatctggtcacatggatggcaaaattcgtctttggaggaatttttatgatgataagaaatatacgtacacatgtttacattggcaccatgatatggttatggatttggctttttcagtgacaggcaccagtctgctgagtggcggtcgtgaatctgtacttgtagagtggcgcgatgcaatagagaagaataaggagtttctcccgcgtttaggagctactattgaacatatctcagtctcgcctgcaggagatttattctgcacttctcactctgataataagataataattattcaccgaaaccttgaagcatccgcagtaattcaaggcctagtgaaagataggagtatcttcactggtttgatgattgatccaagaactaaagctttggttttgaatggaaaacctggccacctgcagttttattctctccagagtgataaacagttatacaatttagatattatacagcaagaatatattaatgattatggtctgatccaaattgaactaacaaaggctgcatttggctgctttggtaactggcttgcaacagtggaacagcggcaagaaaaggaaactgagcttgaattgcaaatgaaactgtggatgtataataagaaaacacaagggtttattcttaacactaaaattaacatgccacacgaagactgcattacagctctctgtttctgtaatgcagaaaaatctgaacagcccaccttggttacagctagcaaagatggttacttcaaagtatggatattaacagatgactctgacatatacaaaaaagctgttggctggacctgtgactttgttggtagttatcacaagtatcaagcaactaactgttgtttctccgaagatggttctttactagcagttagttttgaggaaatagtcacaatatgggattctgtaacatgggaacttaaatgtacattttgccaacgagctgggaaaataaggcacctttgctttgggagattgacgtgttcaaagtatctacttggtgctactgaaaatggcattctttgctgttggaatctgctgagctgtgcattggagtggaatgcaaaattaaatgttagagttatggaacccgatcctaattcagagaatattgctgcaatctctcagtcttcagtgggttcagacttgtttgtatttaaacctagtgagccaaggccattgtatattcaaaagggtatctccagagagaaagtccagtggggagtgtttgttccacgagatgtccctgaatccttcacctcagaagcttaccagtggctaaatagatcccagttttacttcctaacaaaatcacagagtttattgacattcagtacaaagtctccagaagaaaaactcacaccaacaagcaaacagctgctagcagaagaaagtcttcccacaaccccattttatttcatattgggaaaacacaggcaacagcaggatgaaaaactaaacgaaactttagagaatgagctggtacaactacccttaacagaaaacatacccgcaattagtgagcttcttcacactccagcccatgtcctgccatctgctgctttcctgtgctccatgtttgtaaattcattgctgctgtctaaagagactaagagtgctaaggaaattcctgaagatgtagatatgg

SEQ ID NO: 15247 - protein, 551 aa, Homo sapiens
MDGKIRLWRNFYDDKKYTYTCLHWHHDMVMDLAFSVTGTSLLSGGRESVLVEWRDAIEKNKEFLPRLGATIEHISVSPAGDLFCTSHSDNKIIIIHRNLEASAVIQGLVKDRSIFTGLMIDPRTKALVLNGKPGHLQFYSLQSDKQLYNLDIIQQEYINDYGLIQIELTKAAFGCFGNWLATVEQRQEKETELELQMKLWMYNKKTQGFILNTKINMPHEDCITALCFCNAEKSEQPTLVTASKDGYFKVWILTDDSDIYKKAVGWTCDFVGSYHKYQATNCCFSEDGSLLAVSFEEIVTIWDSVTWELKCTFCQRAGKIRHLCFGRLTCSKYLLGATENGILCCWNLLSCALEWNAKLNVRVMEPDPNSENIAAISQSSVGSDLFVFKPSEPRPLYIQKGISREKVQWGVFVPRDVPESFTSEAYQWLNRSQFYFLTKSQSLLTFSTKSPEEKLTPTSKQLLAEESLPTTPFYFILGKHRQQQDEKLNETLENELVQLPLTENIPAISELLHTPAHVLPSAAFLCSMFVNSLLLSKETKSAKEIPEDVDM

SEQ ID NO: 15248 - DNA, 2680 bp, Homo sapiens
  CDS (125)..(2002)
aacctcagtcaggaccgcctgcaccgcagtccggggatcgggtcgaggggagaagaaaaaggggtgctcgggagcagcccccggctacctcccctggaggcacagagggcgggggccttggcgaatggctttcttgctggccacttgcggaggtttggattcaggatttgttcctagtgtccaagattttgataagaaacttacagaagctgatgcttacctacaaatcttgattgaacaattaaagctttttgatgacaagcttcaaaactgcaaagaagatgaacagagaaagaaaattgaaactctcaaagagacaacaaatagcatggtagaatcaattaaacactgcattgtgttgctgcagattgccaaaagtactattaatcccgtagatgcaatatatcaacctagtcctttggaacctgtgatcagcacaatgccttcccagactgtgttacctccagaacctgttcagttgtgtaagtcagagcagcgtccatcttccctaccagttggacctgtgttggctaccttgggacatcatcagactcctacaccaaatagtacaggcagtggccattcaccaccgagtagcagtctcacttctccaagccacgtgaacttgtctccaaatacagtcccagagttctcttactccagcagtgaagatgaattttatgatgctgatgaattccatcaaagtggctcatccccaaagcgcttaatagattcttctggatctgcctcagtcctgacacacagcagctcgggaaatagtctaaaacgcccagataccacagaatcacttaattcttccttgtccaatggaacaagtgatgctgacctgtttgattcacatgatgacagagatgatgatgcggaggcagggtctgtggaggagcacaagagcgttatcatgcatctcttgtcgcaggttagacttggaatggatcttactaaggtagttcttccaacgtttattcttgaaagaagatctcttttagaaatgtatgcagacttttttgcacatccggacctgtttgtgagcattagtgaccagaaggatcccaaggatcgaatggttcaggttgtgaaatggtacctctcagcctttcatgctggaaggaaaggatcagttgccaaaaagccatacaatcccattttgggcgagatttttcagtgtcattggacattaccaaatgatactgaagagaacacagaactagtttcagaaggaccagttccctgggtttccaaaaacagtgtaacatttgtggctgagcaggtttcccatcatccacccatttcagccttttatgctgagtgttttaacaagaagatacaattcaatgctcatatctggaccaaatcaaaattccttgggatgtcaattggggtgcacaacatagggcagggctgtgtctcatgtctagactatgatgaacattacattctcacattccccaatggctatggaaggtctatcctcacagtgccctgggtggaattaggaggagaatgcaatattaattgttccaaaacaggctatagtgcaaatatcatcttccacactaaacccttctatgggggcaagaagcacagaattactgccgagattttttctccaaatgacaagaagtctttttgctcaattgaaggggaatggaatggtgtgatgtatgcaaaatatgcaacaggggaaaatacagtctttgtagataccaagaagttgcctataatcaagaagaaagtgaggaagttggaagatcagaacgagtatgaatcccgcagcctttggaaggatgtcactttcaacttaaaaatcagagacattgatgcagcaactgaagcaaagcacaggcttgaagaaagacaaagagcagaagcccgagaaaggaaggagaaggaaattcagtgggagacaaggttatttcatgaagatggagaatgctgggtttatgatgaaccattactgaaacgtcttggtgctgccaggcattaggttggaagatgcaaagtttatacctgatgatcagggcagtaggcataattcagcaacaaacaatcttcctttgggagaaacctgttcattccaatcttctaattacagtggttcctatctcagggatactggactttctgacgcagatgaacaattaaggggaaaagcttcccttttccctctgtggcagttacgattttgacttcagtcctgagaaaaacttcaggttttgaaaatcagatgatgtcttctccttttccaaacaccacacgttgaaagcatttataaatccaagtctgaaactctgcgctctagtactgctgttaagatacacaacttgtttcttagttcatataatctcgggatacacacacacacacacatatatatacacacacatacgtatacacacacatacatatatataaatatacctgatgccagatttttttcataaatattctgcctactgtaaatatgggttcctctgagttgttttagaaaattagcgcaatgtattaaaatcaagcgttaggaaatttcatggtcttacctacaataacttttattttggaattgaactattattaaattgtatctaatcctggattacagtttaattaattattcttagtgcttaaggcttcataaagtaatttttccaacctttttttt

SEQ ID NO: 15249 - protein, 626 aa, Homo sapiens [sequence omitted]

SEQ ID NO: 15250 - DNA, 3324 bp, Homo sapiens
  CDS (34)..(1716)
aaggcgcgagcctgcgttttccggccagaggacatgatgcagggggaggcacaccctagtgcttcccttattgacagaaccatcaagatgagaaaagaaacagaggctaggaaagtggtcttagcctggggactcctaaatgtatctatggctggaatgatatatactgaaatgactggaaaattgattagttcatactacaatgtgacatactggcccctctggtatattgagcttgcccttgcatctctcttcagccttaatgccttatttgatttttggagatatttcaaatatactgtggcaccaacaagtctggttgttagtcctggacagcaaacacttttagggttgaaaacagctgttgtacagactacgcctccacatgatctggcagcaacccaaatccctcccgctccaccttccccttcaattcagggtcagagtgtgttgagttatagcccttctcgttcgcccagtaccagtcccaagttcaccaccagctgtatgactggttacagccctcagctgcaaggtctgtcctcaggtggcagtggttcttatagccctggagtgacctactcgcccgtcagtggttataataagttggcgagctttagcccctctcctccttctccgtaccctaccactgttggaccagtggagagcagtggattgagatctcgctaccgttcttcacctaccgtctacaactcacctactgacaaagaagactacatgaccgacctacgaactttggatacttttctcagaagtgaagaggagaaacagcatagggttaagctggggagcccagattctacctctccttccagcagtcctactttctggaactatagtcgttctatgggggattatgcacaaactttaaagaagtttcagtatcagcttgcctgtaggtctcaggccccatgtgctaacaaagatgaagccgatctcagctctaaacaagccgcagaagaggtctgggcaagagtggctatgaatagacaacttcttgatcatatggattcatggacagctaaatttagaaattggatcaatgagacaatattagtgccacttgttcaagagattgagtctgtcagcacacagatgagacgaatgggttgtccagagctacagataggagaggctagtattactagcttgaaacaagctgccctggttaaagcgcctctcattccgactttggacacaatcgttcagtatctagaccttactccaaatcaggaatacttgtttgaaaggatcaaagaactatctcagggaggttgtatgagctcatttcgatggaacagaggtggcgacttcaaaggacgaaagtgggatacagacctgcccaccgattctgctatcatcatgcatgtattttgcacctaccttgattccagattacctccacatccgaagtatcccgacggaaaaacttttacttctcagcactttgttcagacaccaaataaaccagatgttacaaatgagaatgttttttgcatttatcagagtgctatcaaccctccccattatgagctcatctaccagcgtcatgtatacaacctgccaaagggcagaaataatatgtttcatacattgttgatgtttctctacatcataaagaccaaagagtcaggaatgcttgggagagttaatcttggtctatctggtgtgaatatattgtggatctttggcgagtagcaagtcatatatttaattctgacatttagactatttcactgaaccagaagtcgaaactaaacatctctgagccactgactcttctgaaataaaatacacatgggtgtatgttacagactctttagatttaacagaaaatgtagctgttatgaaatgtaattgtaaaaatatgtcccgtatcttctatatcgagacattgcctttaattttatatcgcttttcagaaatttcagttgactacaaaactgcaacccttcggatttttattgactcaaaatagtgccattccccttaatgaaatagattttgagtctttttttcattgtaacccccaaatgagaatcatctacctgattcttgtaccaaaaaaaaatttttttcagtcttttttttttttagagagggtctctgtcaacgcagactggagtgcagtggcacgatcttagctcactacaacttctgcctcccaggctcaagcaattctcctgcctcagcctcctgagtagctgggattataggtgcgagccactgcgcccagcctcagttattttatttaacagtgtaagtacttagaaagtaagaaaattgctgatttagttttttttttttttttttttttaatgtttccccagcattctgcaagttaggccaaagcccacattcaaagaaatgagattaactcttaagtaatgtattaagtttatgtatattttaaaatattattaaaggaggtttgaaagtattgacatttaaaaagtcaacacttagattaaatttagctggtagttttaatttgggttttagttaagagtgtgaggacatcaggaaaactgtttactactttggttttagcagctcagttttactattccataatgtgttatttttaaagttctctttttaagatcacagtgatatcctatcttcaaattttttaaatatgttcaaaatatctggagggtgagaagttaccaagtttgtatgttttgtttgactcaccatctttattttctgtatatgtagtagctggcaattgcatatattttcttgattaacatattagagactgcttccatcatcttatgtaaacctggaaacagctgaaactagtcttttctgaagaaccgtgtatcagtgttagatgtgcatcccgttttgtcattccctcagactttgaatacagtcattactctctggaagagaaatgtaagtatattttttgttatctgcagtatggtttaacatgtattaataatacacatatgcagactcactaaagtatccccagtaattagtaaattccaaatttaagtcagtacagttctgtatttgtaaattctgtctttcaaaaagttgttcgtgtttttaaaagttgatgtccaaaggaaaggagcttcttttaagtacttttggtgtatgttgaatatttatttgctatgatattctagaagaaaatatcaaacatgttaaatataagaacatgttaaaatttaaatttgctatttcaaaagttactgaggatgtcttggaataacaattgtcatgctgttaaactagttgcatatacttcattaaaagcaccatggagaaacattttaacaatgc

SEQ ID NO: 15251 - protein, 561 aa, Homo sapiens
MMQGEAHPSASLIDRTIKMRKETEARKVVLAWGLLNVSMAGMIYTEMTGKLISSYYNVTYWPLWYIELALASLFSLNALFDFWRYFKYTVAPTSLVVSPGQQTLLGLKTAVVQTTPPHDLAATQIPPAPPSPSIQGQSVLSYSPSRSPSTSPKFTTSCMTGYSPQLQGLSSGGSGSYSPGVTYSPVSGYNKLASFSPSPPSPYPTTVGPVESSGLRSRYRSSPTVYNSPTDKEDYMTDLRTLDTFLRSEEEKQHRVKLGSPDSTSPSSSPTFWNYSRSMGDYAQTLKKFQYQLACRSQAPCANKDEADLSSKQAAEEVWARVAMNRQLLDHMDSWTAKFRNWINETILVPLVQEIESVSTQMRRMGCPELQIGEASITSLKQAALVKAPLIPTLDTIVQYLDLTPNQEYLFERIKELSQGGCMSSFRWNRGGDFKGRKWDTDLPTDSAIIMHVFCTYLDSRLPPHPKYPDGKTFTSQHFVQTPNKPDVTNENVFCIYQSAINPPHYELIYQRHVYNLPKGRNNMFHTLLMFLYIIKTKESGMLGRVNLGLSGVNILWIFGE

SEQ ID NO: 15252 - DNA, 2948 bp, Homo sapiens
  CDS (191)..(952)
ctgcatcagcacagaatttactccacggaagcacggaggtgaaaagggagtgccctttaggatccaggttgacacctttaagcagaatgaaaatggagaatacacagatcatctacactcagctagctgccaaatcaaagtttttaagcctaaaggtgcagacaggaaacaaaaaactgaccgagagaagatggagaagagaacagctcatgaaaaagaaaagtatcagccgtcctatgataccacaatcctcacagagtgttctccgtggcccgatgcctccacagcctatgtgaataacagcccttccccagcgcccactttcacctccccacagcagagcacttgcagtgtcccagacagcaattcttcttccccaaatcatcagggagatggagcttcacagacctctggtgaacaaattcagccttcagctacgatccaggaaacacagcaatggctgctcaaaaacagattctcttcctacacaagactgttctctaatctttcaggtgccgacttattaaaactgacaaaggaggatttagctcaaatttgtggtgcagccgatggaattcggctctataattcactgaagtcaaggtcggttagaccccgtttaaccatctatgtctgccgggagcagccaagcagcacagtgctgcaagggcagcagcaagctgcaagcagtgcaagcgagaatggcagtggggcaccctatgtttatcatgcaatctacttggaagaaatgattgcctcagaagttgctcgaaaacttgcgctggtgtttaatatccctctccaccaaattaatcaggtttacagacagggtcccaccggtattcacattcttgttagtgatcagatggttcagaattttcaagatgagagttgttttttattctccacagtaaaagctgaaagtagtgatggcatccacataattttgaagtgatgtcttatatagactgaactgtattcagtaccaaatagtcacgcttaaaagtgtgtgaagactgaatccaagaagtcttgggattggattttaccatatgaaatgtttcatattgaaaacacaagatgacctttctaatgagctgtatgagaggtgaatctcctcactgtcactgccatagccaagcatcctcatgagagtgagcacatcggcacagcatgcatccagctctggaggccacggtgcaggcatagctgcctgctgctctggcagaggccagtaaatacagttcctagaagcagcctttgctgtctttttacactgtatgcggtttggaaatgaatgtagaaacttactgtgggcatttacctttctgtgccagtttggcttttattgcctgaaccttatgctgacctggagaggagatgggggacagtgctgttgtggggccagcagtgaatctgtatgcggagagttgtgttgtgctgatgtggccgttggtggtcaggtaagaggctcggcaccttcttggaagaaatcatgtctgagggtgtacgtttgatatgatcatgccagattggagaagatccaagccaggaagatgggcttgaagcaaactgcattatcaggagtaccttggtgagaggatcagtgtaaatcctaataggtacaaagacttttgtgttttggctttgtcacagatttattgaaaaacttttttgcttctgcttccatttttagcattttagtttctggttttcatttttggagattccttgccttttaaactcgtggtttttctctcattttcttccctctctccctccatctctgaccacccccaccctaaccccccacccccaccatcctattaaacatttttaaagccctaccccagacattggaaataggtgacccaagtagggggagaaagtattattgttgatagcttctgactaggtgttaagggatcttcattatgaacaagatgaatttttttctggaaacactagatgttatcaatcaaacactaaaatgtaccatacaaatcccttaagcctctcaaatattgagctttagtacaatcatggatagacattctggtgatgatttaggggctttttatacaccacatactagcttctttctctataagagtgcctctttcataaaaccaaatgcttgtctgctagcatacttttcaaagggaatccactgttttctcactttcctcccatatctccgtccttcatccaaaaccttcccagaatccatcagcaagcatgtttgaggcctgtggtgtaggggactgaattttttttttaacttctattccattttaattgtaggatatctttgtccatatacccaggtgtcctgatttgaatgtactatttgatcctcattgtgttcaggcaaaaaaataggaaatgagtaattttgagtttgaaatctctcccagaagacaaactacttcagtgagtaaaagctttgacattttatgttttattcataaagggggttaattatttgctacaaagaagcacgatctattttcatcatcgatttgaaaatatctgtaactcctatagatcctataggcagagagttttcctttctgactttttccctttgctttcgtgtgaccacatgttttctgtaccagtcactggggaaagaagtgagtttatctcgtttgttttaaaagttttgcttgtctatttagcattcctttttgggtctcaagatttatggaacaataaatgtcatttaatgctgtgtgcttattttgaattcctcatcaggttttagaagcggggtaaaaatacttagatgcttatcagacttgaaattatactgagtggcattgaacgtgagtttgtcccagtgaaacaggctaaataaattttggcaccagcaaatttgttactttgtttttttaatagtaggatgtacacatttcagtataataaatgttttctgattgttttgc

SEQ ID NO: 15253 - protein, 254 aa, Homo sapiens [sequence omitted]

SEQ ID NO: 15254 - DNA, 3217 bp, Homo sapiens
  CDS (1130)..(2866)
agctcacgtgacaaagctcccggaggtgggagccctgggccaaaatggcggcctacctgcagtggcggcgcttcgttttcttcgacaaggagctggtgaaggagccgctgagcaatgatggggccgctcccggggccacacctgcttctggatccgctgcttccaagttcctttgcctccctcctggcatcactgtctgcgactcaggccgagggagcctggtctttggagatatggaaggccagatctggttcttgccacgttccctacagcttacaggcttccaagcctacaaactacgggtgacacacctgtaccaactgaagcagcacaatattctggcatctgttggagaagatgaagagggcatcaaccccttggttaagatctggaacctggagaagagagatggtggcaatccactctgcactcgaatcttccctgctattccaggaacagagccaactgttgtatcttgtttgactgtccatgaaaatctcaactttatggccattggtttcacagatgggagtgttacattgaacaaaggagacatcacccgggaccggcatagcagacccagattttgcacaagggcaactatcctgtaactggattggcctttcgccaagcaggaaagaccactcacttgtttgttgtgacaacagagaacgtccagtcctatatagtttctggaaaagactaccctcgcgtggagttggacacccatggttgtggcctgcgctgctcagccctaagtgacccttctcaggacctgcagttcattgtggccggggatgagtgtgtctacttgtaccagcctgatgaacgtgggccctgcttcgcctttgagggccataagctcattgcccactggtttagaggctaccttatcattgtctcccgtgaccggaaggtttctcccaagtcagagtttaccagcagggattcacagagctccgacaagcagattctaaacatctatgacctgtgcaacaagttcatagcctatagcaccgtctttgaggatgtagtggatgtgcttgctgagtggggctccctgtacgtgctgacgcgggatgggcgggtccacgcactgcaggagaaggacacacagaccaaactggagatgctgtttaagaagaacctatttgagatggcgattaaccttgccaagagccagcatctggacagtgatgggctggcccagattttcatgcagtatggagaccatctctacagcaagggcaaccacgatggggctgtccagcaatatatccgaaccattggaaagctggagccatcctacgtgatccgcaagtttctggatgcccagcgcattcacaacctgactgcctacctgcagaccctgcaccgacaatccctggccaatgccgaccataccaccctgctcctcaactgctataccaagctcaaggacagctcgaagctggaggagttcatcaagaaaaagagtgagagtgaagtccactttgatgtggagacagccatcaaggtcctccggcaggctggctactactcccatgccctgtatctggcggagaaccatgcacatcatgagtggtacctgaagatccagctagaagacattaagaattatcaggaagcccttcgatacatcggcaagctgccttttgagcaggcagagagcaacatgaagcgctacggcaagatcctcatgcaccacataccagagcagacaactcagttgctgaagggactttgtactgattatcggcccagcctcgaaggccgcagcgatagggaggccccaggctgcagggccaactctgaggagttcatccccatctttgccaataacccgcgagagctgaaagccttcctagagcacatgagtgaagtgcagccagactcaccccaggggatctacgacacactccttgagctgcgactgcagaactgggcccacgagaaggatccacaggtcaaagagaagcttcacgcagaggccatttccctgctgaagagtggtcgcttctgtgacgtctttgacaaggccctggtcctgtgccagatgcacgacttccaggatggtgtcctttacctttatgagcaggggaagctgttccagcagatcatgcactaccacatgcagcacgagcagtaccggcaggtcatcagcgtgtgtgagcgccatggggagcaggacccctccttgtgggagcaggccctcagctacttcgctcgcaaggaggaggactgcaaggagtatgtggcagctgtcctcaagcatatcgagaacaagaacctcatgccacctcttctagtggtgcagaccctggcccacaactccacagccacactctccgtcatcagggactacctggtccaaaaactacagaaacagagccagcagattgcacaggatgagctgcgggtgcggcggtaccgagaggagaccacccgtatccgccaggagatccaagagctcaaggccagtcctaagattttccaaaagaccaagtgcagcatctgtaacagtgccttggagttgccctcagtccacttcctgtgtggccactccttccaccaacactgctttgagagttactcggaaagtgatgctgactgccccacctgcctccctgaaaaccggaaggtcatggatatgatccgggcccaggaacagaaacgagatctccatgatcaattccagcatcagctcaggtgctccaatgacagcttttctgtgattgctgactactttggcagaggtgttttcaacaaattgactctgccgaccgaccctcccacagccagactgacctccagcctggaggctgggctgcaacgcgacctactcatgcactccaggaggggcacttaagcagcctggaggaagatgtgggcaacagtggaggaccgagagaacagacacaatgggacctgggcgggcgttacacagaaggctggctgacatgcccagggctccactctcatctaatgtcacagccctcagaactaaagcggactttctttccctgccttcttatttagtcagcttgccatccctcctcttcactagcagtgtagatcattccagatcagtgggggagggcacctcagcaacctctgagtgtggacaatagctgctttcttctctatccaagagcaccaggctgtgcttgggtccttgctctcagagtctataaataaaagaatataatgatttggg

SEQ ID NO: 15255 - protein, 579 aa, Homo sapiens
MLFKKNLFEMAINLAKSQHLDSDGLAQIFMQYGDHLYSKGNHDGAVQQYIRTIGKLEPSYVIRKFLDAQRIHNLTAYLQTLHRQSLANADHTTLLLNCYTKLKDSSKLEEFIKKKSESEVHFDVETAIKVLRQAGYYSHALYLAENHAHHEWYLKIQLEDIKNYQEALRYIGKLPFEQAESNMKRYGKILMHHIPEQTTQLLKGLCTDYRPSLEGRSDREAPGCRANSEEFIPIFANNPRELKAFLEHMSEVQPDSPQGIYDTLLELRLQNWAHEKDPQVKEKLHAEAISLLKSGRFCDVFDKALVLCQMHDFQDGVLYLYEQGKLFQQIMHYHMQHEQYRQVISVCERHGEQDPSLWEQALSYFARKEEDCKEYVAAVLKHIENKNLMPPLLVVQTLAHNSTATLSVIRDYLVQKLQKQSQQIAQDELRVRRYREETTRIRQEIQELKASPKIFQKTKCSICNSALELPSVHFLCGHSFHQHCFESYSESDADCPTCLPENRKVMDMIRAQEQKRDLHDQFQHQLRCSNDSFSVIADYFGRGVFNKLTLPTDPPTARLTSSLEAGLQRDLLMHSRRGT

SEQ ID NO: 15256 - DNA, 2020 bp, Homo sapiens
  CDS (160)..(921)
ttctttctttcattccttccttcctctgtttctttctttcttcctttcatttttttttcttttttaagagcgagcggctctgcggtggcggtttggggtgggcgccgccgaggtgaggtcgtctcgcctcccgcgcgccggtagattggttgtttcattatggatggaggggatgatggtaaccttattatcaaaaagaggtttgtgtctgaggcagaactagatgaacggcgcaaaaggaggcaagaagaatgggagaaagttcgaaaacctgaagatccagaagaatgtccagaggaggtttatgaccctcgatctctatatgaaaggctacaggaacagaaggacaggaagcagcaggagtacgaggaacagttcaaattcaaaaacatggtaagaggcttagatgaagatgagaccaacttccttgatgaggtttctcgacagcaggaactaatagaaaagcaacgaagagaagaagaactgaaagaactgaaggaatacagaaataacctcaagaaggttggaatttctcaagagaacaagaaggaagtggaaaagaaactgactgtgaagcctatagaaaccaagaacaagttctcccaggcgaagctgttggcaggagctgtgaagcataagagctcagagagtggcaacagtgtgaaaagactgaaaccggaccctgagccagatgacaagaatcaagagccctcatcctgcaagtctctcggaaacacctccctgagtggcccctccatccactgcccctctgctgcagtatgtatcggcatcctcccaggcctgggtgcctactctgggagcagcgactccgagtccagctcagacagcgaaggcaccatcaatgccaccggaaagattgtctcctccatcttccgaactaacaccttcctcgaggccccctagtttctccgtccctacacagggagctcctccccaagggtagatcggaccgttcatgctgcctataggcattatgtccctcaaaaaaaaactcctttgcctgcatcctgtgtacaacatgacatttttaaccaatccaatctaaaaatgtgccagaatccacctgtggcccgaatcgtgtttggttcctctttctactccactgcagatgaccaaacctgtcccgctgccactttcctcactgatattgggaggagggcaaggcccagccgaagttccactaaaaatgccccaggagaataggcaccggctggcttgccaaagggtttgggttttattgctttctgtttttttcttttcccgacagcacaaagaagtaagggcagttattggacaggtgttatttaaacattctattgtaaatgaatgtgttgtttggttctactgcattgtggagcatgcgggggaagagaactgacccaggtaatgaaatggagcccttccctggaactaaccagtccttgatgttgtgtgactaagtaaagatgataaaccccatctgctgggggtgtcacttcacactcggcatgcattgtgatgccggcaggcagagcagctactgactttgaacatgggcagagaggcccctggatctcatccagcccactccttttccccttccagtacagtgacactctggtgcccattggcagatggcgacttccctgcacccataactgatgctctgtgaattcttcctccttttcagaactactctgtgctaattgttctgccagtatgggcgcatcagctccatcctgacaaacaagacatttaggtaaaactttgtaggcaccttctgcttctctgcttcattgttcctgtgatagtcctgttgttattacagcatgtgcccaaaacagcctcacattgttacaggaggcaggccaggacatcaaagtcatcatctttatgtggcatgactcttaagaggccattactgtatctcatggcctcttgatgtggaaagaagttgacagagggttgcagggtttaaaaacatccattaacatgaaagctaataaacctgtcagagaac

SEQ ID NO: 15257 - protein, 254 aa, Homo sapiens
MDGGDDGNLIIKKRFVSEAELDERRKRRQEEWEKVRKPEDPEECPEEVYDPRSLYERLQEQKDRKQQEYEEQFKFKNMVRGLDEDETNFLDEVSRQQELIEKQRREEELKELKEYRNNLKKVGISQENKKEVEKKLTVKPIETKNKFSQAKLLAGAVKHKSSESGNSVKRLKPDPEPDDKNQEPSSCKSLGNTSLSGPSIHCPSAAVCIGILPGLGAYSGSSDSESSSDSEGTINATGKIVSSIFRTNTFLEAP

SEQ ID NO: 15258 - DNA, 1520 bp, Homo sapiens
aaagagctttttctttctcaaataagaacctgttaacctctaaatccacttatcttcaatagcgccttagggaggtgatggagagagttctggctggggcaccttccttgctccccctgagtagcactaagtaatctcacaggacaggcaaggcctttctgaagaggtcttagagtgcagggaattgcatgacaggtgctgttagccaccttggaagaactgcaggccttgcgtggtgccaccttgtttgcgggaagcccagccctgtccattcccctggccctagcatctgtttatctaatagcagtaccaatttttattgttaggataagttgtaggagaaattagcaaaggttaactgactgctgtgggtagacagtacaattcttcttcagtttctgacttaggagtgtttccgaaaagttaagtgaaaacaaaagtttgaagtgtttcccttttagttacataacagacactcattacggaattgaacagttttagacccataaataattaagttaaaagcataacaaaatcctgttaggaaactgatgaaaaatttgtttctaaaacactttagattttaaacttgaacacgtagtgaaatgtcttttaaaacaatgaagatgggtgcagtgttcacaggcctctccactaagcagatgtctactgagaacacagtattaggggatgtgggtggtagaaagatgcagtggccaagcctcaccctgggcgagctggggcaggctcgctctctcaggcacagtgaggaaggcacactgaagggggttgccctgactgccagcatgccaggtatacatggtgactgaagctgccacaggtcttctattgaccacactacaaggactcttcttggtcactgatgacagctgttgtctgtctgccattggccacactatccagttctcactggccaagcaggtgggcggggcccagccaggacttgagaatcccactgggaaaggacagagcctgggttcaggctaggtccctcttctgggcctgggcagcttccagatgtgaaggatatgagtctctcccgctctcaggaatcattctctcatctcatttggatggctatctcctattttaaatttgaatcatggaatttgaatttgtaatttggttttagccttagtttccttctggttcgcacctaagcaagataattttaagacacttaggtcaataactgtgcctataagaatttcctttgggccaggcatggtggctcacgcctgtaatcccagcactttgggaggccaaggcgggcagatcacctgaggtcacaagttcgagaccagcctggccaacgtggcaaaaccctgtctctactaaaaatacaaaaattagccggggtggtggtacatgcctgtagtcccagctactcaggaagctaaggcacgagaatcatttgaacactggaggcagaagttgcagtgagctgagatcgtgccactgcactccagcctgggtgacagagtgagactctgtcttgg

SEQ ID NO: 15259 - DNA, 2371 bp, Homo sapiens
  CDS (519)..(2369)
cagatgttgaagaggatatcgcaggacctaaacttgtgatcgtttgggggaggtcacacacgtttctgagtgggaatggatgggcgtgaatgacgtgccctcttaaaaagcacaacagtcctttaagaggagcaaaattgagttttcccattttggccaagattttgaagacagttcaatgtattctacatttgacataagatgagaactttctaaagtattctctccaagagcgtaaacgatgactaccccagccctgctgcccctctctggacgtaggataccacctctgaacctggggccgccttccttcccacatcacagggctaccttgagactttctgagaagtttattcttctccttattcttagtgccttcatcactctgtgttttggggcattctttttccttccagactcttcaaaacacaaacgctttgatttgggtttagaagatgtgttaattccacatgtagatgccggtaaaggggctaaaaaccccggagtcttcctgatccatggacccgatgaacatagacacaggaagttcacaaatgggtgctaccatagtagatgctttggataccctttatatcatgggacttcatgatgaattcctagatgggcaaagatggattgaagacaaccttgatttcagtgtgaattcagaggtgtctgtgtttgaagtcaacattcgatttattggaggcctacttgcagcatattacctatcaggagaggagatattcaagattaaagcagtgcaattggctgagaaactccttcctgcctttaacacacctactgggattccttgggcaatggtgaatttgaaaagtggagtagggcgaaactggggctgggcatctgcaggtagcagcattctggctgaatttggtacactacatatggagttcatccacctcagctacttgacaggggacctgacttactacaaaaaggttatgcacattcggaaactacttcagaaaatggatcgtccaaatggtctttatccaaattatttgaaccccagaacagggcgctggggtcagtatcatacatctgtcggtggcctgggagacagtttttatgaatacttactgaaagcatggttgatgtcagataaaacagaccatgaggcaagaaagatgtatgatgatgctattgaggctatagaaaaacatcttattaagaagtctcgtggaggtcttacctttattggagaatggaagaatgggcacttggaaaaaaagatggggcatttggcctgctttgctgggggaatgtttgcactaggagcagatggttccagagcagataaagctggtcattatttagagctaggggcagaaattgcacgtacttgtcatgagtcatatgacagaactgcattaaagctaggtcctgaatcattgcggagtatgcagtcccaggcttttcgaattagtcaaaacactggccccccaccaattgaccgtcaaaagagattatcttacccaccagttcagagcatcccaacaggaaatggtattccatcaagggacagtgaaaatacttgtcaccaaagtttcatgcagagcttacttgcccctcacctcagtgatcaggtcattgggagccagaggtcactctcagaacatcagaggaatacacagtgtggtccatcctctgcaattgaatataattgtcccccaactcatgaaaatgtccatattagaagagagagtgagagtcagaatagggaaagttgtgacatgtcgttaggtgcaattaacaccaggaacagcaccttgaatattcctttttcaagttcctcttcctcaggagatattcaaggtcgaaacacaagccccaatgtttctgtacagaaatccaatcccatgaggattactgagagtcatgccaccaagggccacatgaaccctccagtcacaaccaacatgcatggggttgcaaggccagcgttgccacatccatctgtgtctcatggaaatggcgatcaaggccctgctgtacgtcaagctaattcttcagttccccagagatcaaggcatcccctgcaagacagcagtggttccaaaattcgtcagcctgaaaggaatcgttctggaaaccaaaggcaaagtactgtctttgatccaagtcttccccatctttctctctctactggtggcagtatgattcttggacgtcaacaacctgccacagagaagagaggaagtattgttcgtttcatgcctgatagcccacaagtacctaatgataattcaggtcctgaccagcatacactatcacaaaattttggtttttcttttattcctgagggtggcatgaatccaccaataaatgctaatgcttctttcattcc

SEQ ID NO: 15260 - protein, 617 aa, Homo sapiens
MDPMNIDTGSSQMGATIVDALDTLYIMGLHDEFLDGQRWIEDNLDFSVNSEVSVFEVNIRFIGGLLAAYYLSGEEIFKIKAVQLAEKLLPAFNTPTGIPWAMVNLKSGVGRNWGWASAGSSILAEFGTLHMEFIHLSYLTGDLTYYKKVMHIRKLLQKMDRPNGLYPNYLNPRTGRWGQYHTSVGGLGDSFYEYLLKAWLMSDKTDHEARKMYDDAIEAIEKHLIKKSRGGLTFIGEWKNGHLEKKMGHLACFAGGMFALGADGSRADKAGHYLELGAEIARTCHESYDRTALKLGPESLRSMQSQAFRISQNTGPPPIDRQKRLSYPPVQSIPTGNGIPSRDSENTCHQSFMQSLLAPHLSDQVIGSQRSLSEHQRNTQCGPSSAIEYNCPPTHENVHIRRESESQNRESCDMSLGAINTRNSTLNIPFSSSSSSGDIQGRNTSPNVSVQKSNPMRITESHATKGHMNPPVTTNMHGVARPALPHPSVSHGNGDQGPAVRQANSSVPQRSRHPLQDSSGSKIRQPERNRSGNQRQSTVFDPSLPHLSLSTGGSMILGRQQPATEKRGSIVRFMPDSPQVPNDNSGPDQHTLSQNFGFSFIPEGGMNPPINANASFI

SEQ ID NO: 15261 - DNA, 1693 bp, Homo sapiens
  CDS (28)..(603)
ttggcgggggccgtgccgggcgccatcatggacgaggactactacgggagcgcggccgagtggggcgacgaggctgacggcggccagcaggaggatgattctggagaaggagaggatgatgcggaggttcagcaagaatgcctgcataaattttccacccgggattatatcatggaaccctccatcttcaacactctgaagaggtattttcaggcaggagggtctccagagaatgttatccagctcttatctgaaaactacaccgctgtggcccagactgtgaacctgctggccgagtggctcattcagacaggtgttgagccagtgcaggttcaggaaactgtggaaaatcacttgaagagtttgctgatcaaacattttgacccccgcaaagcagattctatttttactgaagaaggagagaccccagcgtggctggaacagatgattgcacataccacgtggcgggaccttttttataaactggctgaagcccatccagactgtttgatgctgaacttcaccgttaaggtaggaagagttctagagttaaggagaaaagtgtttatgaatgtttatttttggttgttggtctgtttcctttgacagttcatatttgctttttttccataaaggtctttattgttttattttcataagccttacactgagaaagaaaagtgtaaaatttgtatctgtttttgggtcagtgttgactgtgttttaggatttagcagggatacaagaattctcttgtggttggagaggagctttaggcgtgcctgcttgatcttcctcttgcatatgaagaaacgatggagaggtggtcagcccagggcacacacctaggtgatagcagggtgagggcggagtgaaggcctgagacccacgaccagcgcacacttactccacctcaccatgaacactgacaagccagcttcccgtggaggtgcggtcactgcatgcctcccctctgacttcttgttttgtgtcctagcttatttctgacgcagggtaccagggggagatcaccagtgtgtccacagcatgccagcagctagaagtgttctcgagagtgctccggacctctctagctacaattttagatggaggagaagaaaaccttgaaaaaaatctccctgagtttgccaagatggtgtgccacggggagcacacgtacctgtttgcccaggccatgatgtccgtgctggcccaggaggagcaggggggctccgctgtgcgcaggatcgcccaggaagtgcagcgctttgcccaggagaagtgagaggccctgtttctgctcagcccttccttcctagtgctccccacaaaacccttcccatggcccgtgttccacagccaaagctgctagctccttctgttcaacgtagaggtaaacttgcttttggctgggcgtggtggctcacgcctgtaatcccagcactttgggaggccgaggcggatggatcacctaaggtcaggagtttgagaccagcttgaccaacatggagaaaccccatctctggtaaacaaaaatacaaaattagccgggtgtggcggcacatgcctgtaatcccagctacttgggaggctgaggcaggagaatcgcttgaacctgggaggtggaggttgtggtcagccaagattgcaccattgcactccagcctgggcaacaagagcaaaactctgtctc

SEQ ID NO: 15262 - protein, 192 aa, Homo sapiens
MDEDYYGSAAEWGDEADGGQQEDDSGEGEDDAEVQQECLHKFSTRDYIMEPSIFNTLKRYFQAGGSPENVIQLLSENYTAVAQTVNLLAEWLIQTGVEPVQVQETVENHLKSLLIKHFDPRKADSIFTEEGETPAWLEQMIAHTTWRDLFYKLAEAHPDCLMLNFTVKVGRVLELRRKVFMNVYFWLLVCFL

SEQ ID NO: 15263 - DNA, 1893 bp, Homo sapiens
  CDS (263)..(697)
atgacgcgagaccccgcccccgcagcgcccgcttccaagatggcggcagcgatgcctgcccggctgttggggtggcggtgacgacaggcagcaaaagaccagctggtcccagattcgctgctggagtgctggatggagcctttctctgccctctgtgacatttccaattttagataatgcctcacatctctgtccccccgggaccccctggagcccccatgatccctaagaagacagcttgaacctagatctcacccccaggatgttgcggaggctgctggagcggccttgcacgctggccctgcttgtgggctcccagctggctgtcatgatgtacctgtcactggggggcttccgaagtctcagtgccctatttggccgagatcagggaccgacatttgactattctcaccctcgtgatgtctacagtaacctcagtcacctgcctggggccccagggggtcctccagctcctcaaggtctgccctactgtccagaacgatctcctctcttagtgggtcctgtgtcggtgtcctttagcccagtgccatcactggcagagattgtggagcggaatccccgggtagaaccagggggccggtaccgccctgctgctctaccacctgcaccccttcttgcagcgccagcagcttgcttatggcatctatgtcatccaccaggctggaaatggaacatttaacagggcaaaactgttgaacgttggggtgcgagaggccctgcgtgatgaagagtgggactgcctgttcttgcacgatgtggacctcttgccagaaaatgaccacaatctgtatgtgtgtgacccccggggaccccgccatgttgccgttgctatgaacaagtttggatacagcctcccgtacccccagtacttcggaggagtctcagcacttactcctgaccagtacctgaagatgaatggcttccccaatgaatactggggctggggtggtgaggatgacgacattgctaccagggtgcgcctggctgggatgaagatctctcggccccccacatctgtaggacactataagatggtgaagcaccgaggagataagggcaatgaggaaaatccccacagaattcctggacgcaagatgggatgaactcactgacataccagttgctggctcgagagctggggcctctttataccaacatcacagcagacattgggactgaccctcggggtcctcgggctccttctgggccacgttacccacctggttcctcccaagccttccgtcaagagatgctgcaacgccggcccccagccaggcctgggcctctatctactgccaaccacacagccctccgaggttcacactgactcctccttcctgtctaccttaatcatgaaaccgaattcatggggttgtattctccccaccctcagctcctcactgttctcagagggatgtgagggaactgaactctggtgccgtgctagggggtaggggcctctccctcactgctggactggagctgggctcctgtagacctgaggggtccctctctctagggtcccctgtagggcttatgactgtgaatccttgatgtcatgattttatgtgacgattcctaggagtccctgcccctagagtaggagcagggctggaccccaagcccctccctcttccatggagagaagagtgatctggcttctcctcggacctctgtgaatatttattctatttatggttcccgggaagtcgtttggtgaaggaagcccctccctgggcattttctgcctatgctggaatagctccctcttctggtcctggctcagggggctgggattttgatatattttctaataaaggactttgtctcgcaaaaaaaaaaaaaaaaaaaaaaaaaaaaaaaaaaaaaatt

SEQ ID NO: 15264 - protein, 145 aa, Homo sapiens
MLRRLLERPCTLALLVGSQLAVMMYLSLGGFRSLSALFGRDQGPTFDYSHPRDVYSNLSHLPGAPGGPPAPQGLPYCPERSPLLVGPVSVSFSPVPSLAEIVERNPRVEPGGRYRPAALPPAPLLAAPAACLWHLCHPPGWKWNI

SEQ ID NO: 15265 - DNA, 1621 bp, Homo sapiens
  CDS (34)..(1230)
agggggtggcgctctccgttcggcggcgctcccatggcgcacattaccattaaccagtacctgcagcaggtgtacgaagccatcgacagcagagatggagcatcttgtgcagagttggtgtcttttaaacatcctcatgttgcaaacccacgacttcaaatggcctctccagaggagaagtgtcaacaagtcttggaacccccttatgatgaaatgtttgcagctcatttaaggtgcacttatgcagtggggaatcatgacttcatagaggcatacaagtgccagaccgtgatagtccaatcattcttgcgagcattccaggcccacaaagaagaaaactgggctctgcctgtcatgtatgcagtagcgcttgaccttcgagtgtttgccaataatgcagatcaacagttggtaaagaaaggaaaaagcaaagttggggacatgttggaaaaagcagcagagttactgatgagctgtttccgggtctgtgccagcgacacccgtgctggtatagaggactctaagaagtggggcatgctgtttctggtgaaccagctgtttaaaatctacttcaagatcaacaaactccatttatgtaaacccctaattagagcaattgacagctcaaacctgaaagacgattacagcactgcacagagagtaacatacaaatactacgttggacgcaaggctatgtttgacagcgattttaagcaagctgaggagtacctgtcatttgcctttgagcattgtcaccgttctagtcagaagaacaaaaggatgattctgatctatttgcttccagtaaaaatgctattgggtcacatgcccactgtggagctcctgaaaaagtatcacctgatgcagtttgcggaagtaaccagagctgtgagcgagggcaacctgctgctgctgcacgaggcgctggcgaagcacgaggccttcttcattcgctgcggaatcttcctcatcctggagaagctgaagatcatcacctacaggaacctctttaagaaagtgtatttgttactgaaaacacaccagctgtctctggatgcttttctggttgccttgaagttcatgcaggtggaggacgtggacattgacgaagttcagtgtattctggctaacttgatatacatgggacacgtcaaaggctacatatcgcatcagcatcagaagctggtggtcagcaagcagaacccatttcctcccctgtccacggtgtgttgaaagtacacggagccccgaggacggactcggctggttctggagtctttgtgagacttctttgaaggaggctttgcgtgaaggctgctcggctcacttttcctaagtgtggttcctgaaggctgtctttgtaactttttgtagttctttgtgtaaaaagcgtattctgaatttgtacacatggcatgttcttcattatatcttccaggatacatctatttttatatattaaatttgaatgtgttatcaaaatgcttggttaacttaaggcacctttttaaaagcagaatttaatttgatttaaattttccagattttatagcttgcctgtatggatgctcctcaatttatgatggggttacatcccaataaacttattttatttgccttt

SEQ ID NO: 15266 - protein, 399 aa, Homo sapiens; identical to SEQ ID NO: 11089

SEQ ID NO: 15267 - DNA, 2008 bp, Homo sapiens
  CDS (29)..(646)
aaaggccggaccagaatatggccaagggatgaaccctattagccgcctggcgcaaattcaacaggccaaaaaggaaaaggagccggattatgttttgctttcagaaagaggaatgcctcgacgtcgagaatttgtgatgcaggtgaaggtaggcaatgaagttgctacaggaacaggacctaataaaaagatagccaaaaaaaatgctgcagaagcaatgctgttacaacttggttataaagcatccactaatcttcaggatcaacttgagaagacaggggaaaacaaaggatggagtggtccaaagcctgggtttcctgaaccaacaaataatactccaaaaggaattcttcatttgtctcctgatgtttatcaagagatggaagccagccgccacaaagtaatctctggcactactctaggctatttgtcacccaaagatatgaaccaaccttcaagctctttcttcagtatatctcccacatcgaatagttcagctacaattgccagggaactccttatgaatggaacatcttctacagctgaagccataggtttaaaaggaagttctcctactcccccttgttctccagtacaaccttcaaaacaactggaatatttagcaaggattcaaggctttcaggtatgaattaaaagcaaaaacaaaaaacaaaacaattcattagcctcagattcttcatctgtatacatcacaaggctcattcttgcctgctagtatggcctacatgccacttacgttttaagttatttaggaacacaaaggacagacaaaaaagccatatgcacatgcctcattttctcttatttttgatctatctagtaattcttttgctgcctgtctcttctccattttccttcttcttttttaagcatttttcatattcttcactgtcttctatttggtcttgattaggtgcatctatctcttcgctctgtcttccacaaacaaaaattctgccttcagacatttggtgttagtatttcacactcagttctccctttttttacataaggattgagtttctttttatgatgattttacctttatagcaattttgaattttgcattctattgctagtattgattcaggtacaccattaagatacaacattctagaagtctattaccttaggagttaattaaacatgatatttgaagaataatgaaatgctttatagttgtttgaggcataacaatgtgtatttgttttactggatcatgttttgaactgactagggagggtagcacctgcctcagatagtaccaacaattctgtttcactgggtagtctaaaactagcttatagtttaacttaacttgttgtgtatgtgaatttagggatggaaactttttttcccctatttattctttgtttccttctgggaaaaaaccccacaaaaatcagcactcctttatggatacattggagcttttgaaagaattgtaaactctaggaaggggaaatatctgtgtcttgatttcttagttgccttgaaaatcatgtactgaactgtaaccgctaacttgactggatgaactagtttgcttgtgtgtagagagtgtattgcttcctcagatttcactgttttcatctccttttccatcttagtctttattccttaagaccaaaaactataatatcctttagaaatgctctagaagatctgtattgtgtagaatgatcatgtatttataaatattttacaagtttagattataaaatgaaaaagaaggtcatgtgttttggggggtattttgcatgttcggatttttttttcacttcaccgaacccttctgattctttcaaactattgccaggtagttgttagtgtttctaattggactcttaatatgaacttcaagaagctgttaccagttatcggctctgtcatctgaaattttaaccacttaatttaaagttacaattttagaatttgtttttgttgttttaccttaagaaacacaataaatcactgtttaaaaaag

SEQ ID NO: 15268 - protein, 206 aa, Homo sapiens; identical to SEQ ID NO: 11935

SEQ ID NO: 15269 - DNA, 1286 bp, Homo sapiens
  CDS (32)..(1171)
gcttcctcgttgcccccgccgcgggcgcgagatggattccgggtgctggttgttcggcggcgagttcgaggactcggtgttcgaggagaggccggagcggcggtcaggaccgcccgcgtcctactgcgccaagctctgcgagccgcagtggttttatgaagaaacagaaagcagtgatgatgttgaagtgctgactctcaagaaattcaaaggagacctggcctacagacgacaagagtatcagaaagcactgcaggagtattccagtatctctgaaaaattgtcatcaaccaattttgccatgaaaagggatgtccaggaaggtcaggctcggtgtctggctcacctgggtaggcatatggaggcgctggagattgctgcaaacttggaaaataaagcaaccaacacagaccatttaaccacggtactctacctccagcttgctatttgttcaagtttgcagaacttggagaaaacaattttctgcctgcagaaactgatttctttgcatccttttaatccttggaactggggcaaattggcagaggcttacctgaatctggggccagctctttcagcagcacttgcgtcatctcagaaacagcacagtttcacctcaagtgacaaaactatcaaatccttctttccacactcaggaaaagactgtcttttgtgttttcctgaaaccttgcctgagagctctttattttctgtggaagcgaatagcagtaatagccagaaaaatgagaaagctctgacaaatatccaaaactgtatggcagaaaagagagaaacagtgttgatagagactcagctgaaagcatgtgcctcttttatacgaaccaggcttctgcttcagtttacccaacctcagcaaacatcgtttgctttggagaggaacttaaggactcagcaggaaattgaagataaaatgaaagggttcagcttcaaagaagacactttgctgttgatagctgaggttatgggagaagatatcccagaaaaaataaaagatgaagttcacccagaggtgaagtgtgttggctccgtagccctgactgccttggtgactgtatcctcagaagaatttgaagacaagtggttcagaaagatcaaagaccatttctgtccatttgaaaatcagttccatacagagatacaaatcttggcttagtgggttataaaaaacaaaaccacaaatatcttgtactgtattaattgtccttgtttacttcagacaggatccattgctaatcatggagtataaatgattatttatgttttat

SEQ ID NO: 15270 - protein, 380 aa, Homo sapiens
MDSGCWLFGGEFEDSVFEERPERRSGPPASYCAKLCEPQWFYEETESSDDVEVLTLKKFKGDLAYRRQEYQKALQEYSSISEKLSSTNFAMKRDVQEGQARCLAHLGRHMEALEIAANLENKATNTDHLTTVLYLQLAICSSLQNLEKTIFCLQKLISLHPFNPWNWGKLAEAYLNLGPALSAALASSQKQHSFTSSDKTIKSFFPHSGKDCLLCFPETLPESSLFSVEANSSNSQKNEKALTNIQNCMAEKRETVLIETQLKACASFIRTRLLLQFTQPQQTSFALERNLRTQQEIEDKMKGFSFKEDTLLLIAEVMGEDIPEKIKDEVHPEVKCVGSVALTALVTVSSEEFEDKWFRKIKDHFCPFENQFHTEIQILA

SEQ ID NO: 15271 - DNA, 1951 bp, Homo sapiens
tattatagaccataatatgcctgtcataagcagactgtttttgttgactttcttgaccttctggggtaggtagtgccacctccttggaagaaagatccttttcgtgatgccagggcaatgattaacacatggaaaattggagcaaatgaaactgcaattaatactgctcaaacagattgcagagtatgatgaagaacttggatgtcattttattgcagcctctcctggggacaccattattttatcacctttgacttttggatgtatagctccatttgacatctcttgtcttttcctgctttctttctttattcttcccagtgggagttagatgaagaatgtctggcttgcagaagccagacttggccattctgggagatgtgcagactttcagattggctttgacagtcttacagagctgttcccaggatatgaagcacagctgcaaagcaggcagttcggctttgccttctcttactttcaagatgtgtgatgggaggcggggaacatacaacccccagctgcttagactcttctttatccagaattccccttcctttatctttggaggcttcagatatcactcagttgactgattaaatatcaggtgataggaatctatctctatggtggaatatatgaggagatagttttgagcagggacgccttcgagttcttgcttgctctagtttagtgcttctcaaaaggtggtccatccacagatgttgtcaatatcatcttggaacttgttagaaatgcgaatgccccacctcagacgtacccagactatccagggggagcccagaatctattttcacaagctctttggataattcttacccatactacattttgctctagccaatacttttctaagcttccttcagcttaaaccctcctgtcctttacttcctagcttatctgctgcaggcagtagaatccattagatgtaagctccatgaagacagtgatcgcatatgtactgttcactgctcttgtcctcatcataaccaggcacagaagagctgatcactaagtagtcattaaataaacaagtgattggcataagcatttgaacaaggtgaagagaccacactgtctgtttacaaagttgaagaagtcaatgctgtcttagtctttcttggccctgaggcagtattgcatgtggccatggacctagacactactagccatttataggctgtcagttactatgtagccaggaggatccccccagtgtcatctcttaccctttaaactacacgaaaaagctttgaaatgaagtccttgagccagaaaaggataccagccccactgttaagtgatgattgtgtgctaaagcagcctaagagttctatcctaacacaagagcctagaaagtaacttcttaggcagtgtccaaagaatgccagtagtccttggggacttttcagaggtgcttggcttgaatcaatttctagatcccaaagcagagtcttcatgcacattttgcggctgtagtgtacagcaaatggctcttggctaggtttagaatgctgcttttaccattctctgtacctgacccagtttgagtctccttatgacacttggcttcctccagatggaaattttgaagcctttttggacttttattgtacttattcttgattgccacgtctcatttggattccccagactctgattagaggcactgccaccaggagagattttatctaaccaatagtacttccaggaagatcctcacccttgtactttcaagaagcacttgtaattaatgttcagcttcctgaacactgagtggtacttgaaaatctctgtggtttatagccttacagaagctactctggaggctgaggcaggagaatcgcttgaacctgggaggcagaggttgcagtgagccgagatcacgccgttgcactccagcctgggcgacagagtgagactccatttc

SEQ ID NO: 15272 - DNA, 1773 bp, Homo sapiens
  CDS (103)..(1530)
aaaaaaaaaaaaaaaaaggtttgtctccgctgtttcatctctatggctgtcagaggtgggcggctttgaccgagaggctgctggagctcgtgtttggacgcgatgtttcgtctgaactcactttctgctttggcagaactggctgtgggttctcgatggtaccatggaggatcacagcccatccagatccggcgaagactaatgatggtggctttcctgggagcatctgcagtaactgcaagtactggtcttttgtggaagagggcccatgcagaatctccaccatgtgtagacaacctaaaaagtgacatcggtgataaagggaagaataaagatgaaggggatgtttgtaaccatgagaaaaagactgcagatcttgcccctcacccagaagagaaaaagaagaaacgttctggattcagagacagaaaagtgatggaatatgagaataggattcgagcctactccacgccagacaaaatcttccgatattttgccaccttgaaagtcatcagtgagcctggtgaagcagaagtgtttatgacaccagaagattttgtgcgatccataacacccaatgaaaaacaaccagaacacttgggtctggatcaatatataataaaacgctttgatggaaagaaaatttcccaggaacgaggaaaatttgctgatgaaggcagtatattttacacccttggagaatgtgggctcatatccttttcagactacattttcctcacaactgttctttccactcctcagagaaattttgaaattgccttcaagatgtttgatttgaatggagatggagaagtagatatggaagaatttgaacaggttcagagcatcattcgctcccaaaccagtatgggtatgcgccacagagatcgtccaactactggcaacaccctcaagtctggcttgtgttcagccctcacaacctacttttttggagctgatctgaagggaaagctgacaatcaaaaacttcctcgaatttcagcgtaaactgcagcatgatgttctgaagcttgagtttgaacgccatgaccctgtggatgggagaattactgagaggcagtttggtggcatgctacttgcctacagtggggtgcagtccaagaagctgaccgccatgcagaggcagctcaagaagcacttcaaagaaggaaagggtctgacatttcaggaggtggagaacttctttactttcctaaagaacattaatgatgtggacactgcattgagtttttaccatatggctggagcatctcttgataaagtgaccatgcagcaggtggccaggacagtggctaaagtggagctctcagaccacgtgtgtgatgtggtgtttgcactctttgactgtgatggcaatggcgaactgagcaataaggaatttgtttccatcatgaagcaacggctgatgagaggcctggaaaagcccaaagacatgggtttcactcgcctcatgcaggccatgtggaaatgtgcacaggaaactgcctgggacttcgctttacccaaacagtaaccccacactgcaagaggggacccctccacccccagtaccctggaccccctccgcagagtctcggcagagccctttgtgctgctgcttctggaagtagtctcccttcctcccgggatgacctcaggactctgtcggtttcccctctttacccttccccgtccccgtgttctgctgggctctgattctgcccaatgagtatccccataggttctcaaaaacatgaacaagtctgtaaagctc

SEQ ID NO: 15273 - protein, 476 aa, Homo sapiens [sequence omitted]

SEQ ID NO: 15274 - DNA, 2309 bp, Homo sapiens
  CDS (63)..(578)
aattagaactggaaagaaatcggaagcgactagagactctgcagagtgtcaggccatgttttatggatgagtatgagaagactgaggaagaattacaaaagcagtatgacacttatctggagaaatttcaaaatctgacttatctggaacaacagcttgaagaccatcataggatggagcaagaaaggtttgaggaagctaaaaacactctctgcctgatacagaacaagctcaaggaggaagagaagcgcctgctcaagagtggaagtaacgatgactcggacatagacatccaggaggacgatgaatccgacagtgagttggaagaaaggcggctgcccaagccacagacagccatggagatgctcatgcaaggaagacctggcaaacgcattgtgggcacgatgcaaggtggagactccgatgacaatgaggactcggaggagagtgaaattgacatggaagatgatgatgacgaggatgacgatttggaagacgagagcatttctctctcaccaaccaagcccaatcgaagggtccggaaatctgaacccctggatgagagtgacaatgacttctgacccttttgccaagggaccctggcagattaaaaccctcagacttgtaggtaaatgggaacttagaaggttaggaaggtaacccctgttttgtttactaagctggctggactcatgatcactgaagcaatacttatttctgctttagcctcctatgtttgcattccatgaagcttaaataagaattgaagcaaatccctaagatttatttttttccaccttatttatcttctaaaacttgaggaatgcatgtgttcttagtgattcacatccacgggacaaaaactcaagaagaaataagagctgacgccacacaagtcttggctgcttttgttactatacattttctctgagactccagcagagttggggctggaacttggcactggggactcatgtttggaatcgtaggggaacatctggctgttaatcacttgcacagttgagaacatttcctatacatcggcttttaattctagctcttatttcattttgtaatcttattttctttcgtctgcatgttcacaataccaagcattaaatgtattttaataactaaacttttctgaaagaaggttagctaaagttaaatgaaaacttggtttctttgaaaatcaggcaatagagacaggctccagatgaggaatcctccattttctgtccgaagctgacattcctctggcagtccagttcaccttggattacagccaccttcatgtttccacggttggtactaaatctggaaactctggtgacctgggctgccctctcagaaactccagactcccatggcaatgacagccgggacacttttcttccctccagccagggtttctctaaaggagctttgttttgtctaaagtgtggcaagacatagtgcacaacacagggacaaaggcaggtttcctgcagctcgctacctaagtgtttctgtaggggaaggagccaattaagaaaaagtgttggtacagattcatgtttctgatttaaaaaaacaacaacacaggattgaattaagtagagtaatagcactagaagaatttttctgttgtgaaattagaagtggagttggtttttttctttttttcttcttctttttttttaatatgaaaagtacttagctgggagtggtggcaagcgcccttgggtccagctactcaggaggccaaggtgggaggatcacttgagcccaggagttttagactagcctggacaactaagtgagactccatctctacaaaaaattaaaaaattagccaggtgtggaggggcatgcctgtggtctcagctattcaggaggctgaggcaggagaatcacttgagaccaggaagttgaggctgcaatgagccgtgatcatgccactgcactccagcctgggtgacagagtgagaccctgtctttaaaaaaaagaaaaagaaaagcacgctgcttgtaaaaagcgtacagtgggtcaggcgtggtggctcatgcctgtaatcctagcactttgagaggctgaggtgggtagatcacctgaggtcaggggtttgagaccagcctggccaacatggcgaaaccccacctctactaaaaatacaaaaattagccgggcgtggtagcgcatgcctgtaaccccagctactggggaggctgaggcaggagaatcgcttgaacctaggaggcggaggttgcagtgagccgagatggcgccactgcactccagcctgggcagcagagtgagactccatctc

SEQ ID NO: 15275 - protein, 172 aa, Homo sapiens
MDEYEKTEEELQKQYDTYLEKFQNLTYLEQQLEDHHRMEQERFEEAKNTLCLIQNKLKEEEKRLLKSGSNDDSDIDIQEDDESDSELEERRLPKPQTAMEMLMQGRPGKRIVGTMQGGDSDDNEDSEESEIDMEDDDDEDDDLEDESISLSPTKPNRRVRKSEPLDESDNDF

SEQ ID NO: 15276 - DNA, 2093 bp, Homo sapiens
  CDS (77)..(1531)
gtgcccagctgagagcagcaccaacaccacccaggatgagcagcgcaggtggccaggctgtgaccagcaggacgagatgctcaacctgggcttcaccattggttccttcgtgctcagcgccaccaccctgccactggggatcctcatggaccgctttggcccccgacccgtgcggctggttggcagtgcctgcttcactgcgtcctgcaccctcatggccctggcctcccgggacgtggaagctctgtctccgttgatattcctggcgctgtccctgaatggctttggtggcatctgcctaacgttcacttcactcacgctgcccaacatgtttgggaacctgcgctccacgttaatggccctcatgattggctcttacgcctcttctgccattacgttcccaggaatcaagctgatctacgatgccggtgtggccttcgtggtcatcatgttcacctggtctggcctggcctgccttatctttctgaactgcaccctcaactggcccatcgaagcctttcctgcccctgaggaagtcaattacacgaagaagatcaagctgagtgggctggccctggaccacaaggtgacaggtgacctcttctacacccatgtgaccaccatgggccagaggctcagccagaaggcccccagcctggaggacggttcggatgccttcatgtcaccccaggatgttcggggcacctcagaaaaccttcctgagaggtctgtccccttacgcaagagcctctgctcccccactttcctgtggagcctcctcaccatgggcatgacccagctgcggatcatcttctacatggctgctgtgaacaagatgctggagtaccttgtgactggtggccaggagcatgagacaaatgaacagcaacaaaaggtggcagagacagttgggttctactcctccgtcttcggggccatgcagctgttgtgccttctcacctgccccctcattggctacatcatggactggcggatcaaggactgcgtggacgccccaactcagggcactgtcctcggagatgccagggacggggttgctaccaaatccatcagaccacgctactgcaagatccaaaagctcaccaatgccatcagtgccttcaccctgaccaacctgctgcttgtgggttttggcatcacctgtctcatcaacaacttacacctccagtttgtgacctttgtcctacacaccattgttcgaggtttcttccactcagcctgtgggagtctctatgctgcagtgttcccatccaaccactttgggacgctgacaggcctgcagtccctcatcagtgctgtgttcgccttgcttcagcagccacttttcatggcgatggtgggacccctgaaaggagagcccttctgggtgaatctgggcctcctgctattctcactcctgggattcctgttgccttcctacctcttctattaccgtgcccggctccagcaggagtacgccgccaatgggatgggcccactgaaggtgcttagcggctctgaggtgaccgcatagacttctcagaccaagggacctggatgacaggcaatcaaggcctgagcaaccaaaaggagtgccccatatggcttttctacctgtaacatgcacatagagccatggccgtagatttataaataccaagagaagttctatttttgtaaagactgcaaaaaggaggaaaaaaaaccttcaaaaacgccccctaagtcaacgctccattgactgaagacagtccctatcctagaggggttgagctttcttcctccttgggttggaggagaccagggtgcctcttatctccttctagcggtctgcctcctggtacctcttggggggatcggcaaacaggctacccctgaggtcccatgtgccatgagtgtgcacacatgcatgtgtctgtgtatgtgtgaatgtgagagagacacagccctcctttcagaaggaaaggggcctgaggtgccagctgtgtcctgggttaggggttgggggtcggccccttccagggccaggagggcaggttccctctctggtgctgctgcttgcaagtcttagaggaaataaaaagggaagtgag

SEQ ID NO: 15277 - protein, 485 aa, Homo sapiens
MLNLGFTIGSFVLSATTLPLGILMDRFGPRPVRLVGSACFTASCTLMALASRDVEALSPLIFLALSLNGFGGICLTFTSLTLPNMFGNLRSTLMALMIGSYASSAITFPGIKLIYDAGVAFVVIMFTWSGLACLIFLNCTLNWPIEAFPAPEEVNYTKKIKLSGLALDHKVTGDLFYTHVTTMGQRLSQKAPSLEDGSDAFMSPQDVRGTSENLPERSVPLRKSLCSPTFLWSLLTMGMTQLRIIFYMAAVNKMLEYLVTGGQEHETNEQQQKVAETVGFYSSVFGAMQLLCLLTCPLIGYIMDWRIKDCVDAPTQGTVLGDARDGVATKSIRPRYCKIQKLTNAISAFTLTNLLLVGFGITCLINNLHLQFVTFVLHTIVRGFFHSACGSLYAAVFPSNHFGTLTGLQSLISAVFALLQQPLFMAMVGPLKGEPFWVNLGLLLFSLLGFLLPSYLFYYRARLQQEYAANGMGPLKVLSGSEVTA

SEQ ID NO: 15278 - DNA, 1763 bp, Homo sapiens
  CDS (164)..(1039)
atcaagcaggggcagggctggcgctgcggcgggagatgctgtcgggccgcggcggcgcttggcagccaggagctctgcattgaaggcactggggtaaagtgaatgccgaagacagaagatttggatgatacaccactgactttctttgtttggaatacacgttatgaaccctttctggagcatgtctacaagctctgtacgcaaacgatctgaaggtgaagagaagacattaacaggggacgtgaaaaccagtcctccacgaactgcaccaaagaaacagctgccttctattcccaaaaatgctttgcccataactaagcctacatctcctgccccagcagcacagtcaacaaatggcacgcatgcgtcctatggacccttctacctggaatactctcttcttgcagaatttaccttggttgtgaagcagaagctaccaggcgtctatgtgcagccatcttatcgctctgcattaatgtggtttggagtaatattcatacggcatggactttaccaagatggcgtatttaagtttacagtttacatccctgataactatccagatggtgactgtccacgcttggtgttcgatattcctgtctttcacccgctagttgatcccacctcaggtgagctggatgtgaagagagcatttgcaaaatggaggcggaaccataatcatatttggcaggtattaatgtatgcaaggagagttttctacaagattgatacagcaagccccctgaacccagaggctgcagtactgtatgaaaaagatattcagctttttaaaagtaaagttgttgacagtgttaaggtgtgcactgctcgtttgtttgaccaacctaaaatagaagacccctatgcaattagcttttctccatggaatccttctgtacatgatgaagccagagaaaagatgctgactcagaaaaagcctgaagaacagcacaataaaagtgttcatgttgctggcctgtcatgggtaaagcctggctcagtacagcctttcagtaaagaagagaaaacagtggcgacttaagagatggtgaatctggtgcaccatgcactttcctgctagactctggcctagttcaagctgaccaatggcagaggactgcctgaagagtaaaactgtgtgaacaatgactgactgccagtgttttccatgtatgcataggttctaacagcagggtttggaaacctgtctctaagtaatgcattacttctgtcagaagtgtcttagggtggttatctagttcagtactccaaattattggggaccttgaggcttaagtaagtatttttctgaatataatgctaaaggtaagttgcattcatttaaactaatagagcagacagaattcagcactacttaatagtttataaatcagtggtttcagttgtatatatgttaggaaatggagaggtatagagagagcaggttccatagctcagcacttttaagtggaagatcatttgaatctcagtcttcagcctgcactgatttgtagcctgcactgtcttactgatttacaaactgaaatcactgagaaatgtctttagttcagtgagaagaaaccagaacacttgttcctagtgttgtgttgttttttttaagcaaattacttactgtatttttatggcaggagggagaaaaagtgttacaacggcttctaatgaagtccggtatttaaatgataaatgactaatgtgtttagtagagacaaaataaaccaataaatgattgttctttgccattt

SEQ ID NO: 15279 - protein, 292 aa, Homo sapiens
MNPFWSMSTSSVRKRSEGEEKTLTGDVKTSPPRTAPKKQLPSIPKNALPITKPTSPAPAAQSTNGTHASYGPFYLEYSLLAEFTLVVKQKLPGVYVQPSYRSALMWFGVIFIRHGLYQDGVFKFTVYIPDNYPDGDCPRLVFDIPVFHPLVDPTSGELDVKRAFAKWRRNHNHIWQVLMYARRVFYKIDTASPLNPEAAVLYEKDIQLFKSKVVDSVKVCTARLFDQPKIEDPYAISFSPWNPSVHDEAREKMLTQKKPEEQHNKSVHVAGLSWVKPGSVQPFSKEEKTVAT

SEQ ID NO: 15280 - DNA, 1889 bp, Homo sapiens
  CDS (154)..(801)
aagggctcgcagcggccagaaacccggctccgagcggcggcggcccggcttccgctgcccgtgagctaaggacggtccgctccctctcgccagctccgaatcctgatccaggcgggggccaggggcccctcgcctcccctctgaggaccgaagatgagcttcctcctcagcagccgctcttctaaaacattcaaaccaaagaagaatatccctgaaggatctcatcagtatgaactcttaaaacatgcagaagcaactctaggaagtgggaatctgagacaagctgttatgttgcctgagggagaggatctcaatgaatggattgctgtgaacactgtggatttctttaaccagatcaacatgttatatggaactattacagaattctgcactgaagcaagctgtccagtcatgtctgcaggtccgagatatgaatatcactgggcagatggtactaatattaaaaagccaatcaaatgttctgcaccaaaatacattgactatttgatgacttgggttcaagatcagcttgatgatgaaactctttttccttctaagattggtgtcccatttcccaaaaactttatgtctgtggcaaagactattctaaagcgtctgttcagggtttatgcccatatttatcaccagcactttgattctgtgatgcagctgcaagaggaggcccacctcaacacctcctttaagcactttattttctttgttcaggagtttaatctgattgataggcgtgagctggcacctcttcaagaattaatagagaaacttggatcaaaagacagataaatgtttcttctagaacacagttacccccttgcttcatctattgctagaactatctcattgctatttgttatagactagtgatacaaactttaagaaaacaggataaaaagatacccattgcctgtgtctactgataaaattatcccaaaggtaggttggtgtgatagtttccgagtaagaccttaaggacacagccaaatcttaagtactgtgtgaccactcttgttgttatcacatagtcatacttggttgtaatatgtgatggttaacctgtagcttataaatttacttattattcttttactcatttactcagtcatttctttacaagaaaatgattgaatctgttttaggtgacagcacaatggacattaagaatttccatcaataatttatgaataagtttccagaacaaatttcctaataacacaatcagattggttttattcttttattttacgaataaaaaatgtatttttcagtatccttgagatttagaacatctgtgtcacttcagataacattttagtttcaagtttgtatggtagtgtttttatagataagatacgtctattttttcaaaattcatgattgcagtttaaatcatcatatgacgtgtgggtgggagcaaccaaagttatttttacagggactttattttttgatctttatttgagattgttttcatatctatctaaattattaggagtgtgtgtatcagaagtaattttttaatgtcttctaaggatggtcttccaggcttttaaactgaaaagcttaattcagatagtagcttttggctgagaaaaggaatccaaaatattaataaatttagatctcaaaaccactatttttattatttcattatttttcagaggccttaaaattctggataagagaatggaggaaaatactcagagtacttgattattttatttccttttattaaaaaattacttctatgtttttattgtctcttgagccttagttaagagtagtgtagaaatgcatgaacttcatcctaataaggataaaacttaaggaaaaccacaataaaccatgaaggtgtacacatcttataacac

SEQ ID NO: 15281 - protein, 216 aa, Homo sapiens [sequence omitted]

SEQ ID NO: 15282 - DNA, 1896 bp, Homo sapiens
tatgaaatgtttcatattgaaaacacaagatgacctttctaatgagctgtatgagaggtgaatctcctcactgtcactgccatagccaagcatcctcatgagagtgagcacatcggcacagcatgcatccagctctggaggccacggtgcaggcatagctgcctgctgctctggcagaggccagtaaatacagttcctagaagcagcctttgctgtctttttacactgtatgcggtttggaaatgaatgtagaaacttactgtgggcatttacctttctgtgccagtttggcttttattgcctgaaccttatgctgacctggagaggagatgggggacagtgctgttgtggggccagcagtgaatctgtatgcggagagttgtgttgtgctgatgtggccgttggtggtcaggtaagaggctcggcaccttcttggaagaaatcatgtctgagggtgtacgtttgatatgatcatgccagattggagaagatccaagccaggaagatgggcttgaagcaaactgcattatcaggagtaccttggtgagaggatcagtgtaaatcctaataggtacaaagacttttgtgttttggctttgtcacagatttattgaaaaacttttttgcttctgcttccatttttagcattttagtttctggttttcatttttggagattccttgccttttaaactcgtggtttttctctcattttcttccctctctccctccatctctgaccacccccaccctaaccccccacccccaccatcctattaaacatttttaaagccctaccccagacattggaaataggtgacccaagtggggggagaaagtattattgttgatagcttctgactaggtgttaagggatcttcattatgaacaagatgaatttttttctggaaacactagatgttatcaatcaaacactaaaatgtaccatacaaatcccttaagcctctcaaatattgagctttagtacaatcatggatagacattctggtgatgatttaggggctttttatacaccacatactagcttctttctctataagagtgcctctttcataaaaccaaatgcttgtctgctagcatacttttcaaagggaatccactgttttctcactttcctcccatatctccgtccttcatccaaaaccttcccagaatccatcagcaagcatgtttgaggcctgtggtgtaggggactgaattttttttttaacttctattccattttaattgtaggatatctttgtccatatacccaggtgtcctgatttgaatgtactatttgatcctcattgtgttcaggcaaaaaataggaaatgagtaattttgagtttgaaatctctcccagaagacaaactacttcagtgagtaaaagctttgacattttatgttttattcataaagggggttaattatttgctacaaagaagcacgatctattttcatcatcgatttgaaaatatctgtaactcctatagatcctataggcagagagttttcctttctgactttttccctttgctttcgtgtgaccacatgttttctgtaccagtcactggggaaagaagtgagtttatctcgtttgttttaaaagttttgcttgtctatttagcattcctttttgggtctcaagatttatggaacaataaatgtcatttaatgctgtgtgcttattttgaattcctcatcaggttttagaagcggggtaaaaatacttagatgcttatcagacttgaaattatactgagtggcattgaacgtgagttcgtcccagtgaaacaggctaaataaattttggcaccagcaaatttgttactttgtttttttaatagtaggatgtacacatttcagtataataaatgttttctgattgttttgc

SEQ ID NO: 15283 - DNA, 1775 bp, Homo sapiens
  CDS (469)..(1275)
gtgcaaagtgctgggttctgggtttctggattcgcgggccgttcacacgtagcctgtgccggctcctcgggtgagtccgtccgcgcgcggtgccccgggacggcctaggctgccgggggtccggggccccaggcattccgggctgcagattgacggggatcccggatgcaccgcgcgcccccgcgccctcaccgacgggtccagacctggtgggaagaaggtgcggggacgggtccctgaggatcccgatgcctacgagccaagatgctcagctttataggtgtgacctacacatgtgacttcacctcagttttgtgatccgtaaaatggacaaattcgaagctacttcacagtgctgttgagaggattaaatgaaacaatgcttgtaaagctctttgcaggagggagcctcggaagcagggcctggccggcagagcacacctgctgtcaccagggaccacaggcagcatgaagacccccgtggagctggccgtcagtgggatgcagaccctcggccttcagcaccgctgccgaggtggctaccgggtcaaggccaggacgtcatatgtggatgagactctgtttggcagcccagcaggcacccggcctaccccaccggacttcgatccgccctgggtggagaaggctaacagaaccagaggcgtgggcaaggaggcatcgaaggccttgggggcaaaggggagctgtgagaccaccccctcaaggggcagcacccccaccctcacaccaaggaagaagaacaaatacagacccatcagccacaccccgtcttactgtgatgagtcgctgtttggctcccgatctgaaggcgccagcttcggggccccgcggatggcgaagggggatgccgcaaagctccgtgctctcttgtggacgccaccacctacccccaggggtagccactcgccccgccccagggaggcaccactgcgagccattcacccagctggtccctccaagacagagccggggccagcggcagactcccagaagttatctatgggtgggttacactcttcacgccccctgaagcggggactttcccattccctcacccacctgaatgtccccagcactggtcatccagccaccagtgccccccacacaaatgggcctcaggatctcaggccttccacgtcaggggtgaccttccggagccccctggtgacttccagggctcgctcagttagcatttcagtgccatctaccccacgacgaggtggggccacccagaaaccaaagcccccttggaaatgatactctttcatcagggttgcctatggggccacggcgacaggtatggccccttgccagggtaggaggacattcatcacccagggaaccccaggtattaaagaagcccctgtgggggcagacagacatagcaggggtgggcagtgcctccctttatcctgacaatctctagtcgattcttgcctttttctcccgattgcggatttgggggccacctctaagatgcctctctccagccctgtctcaaccatactccaaattagtgccaacccaggggcctggcacctcccacatcatccattgtcttgctgccaagtgcgaataaacggcgtgattgccaacctggagggtcccctcttatcccttcaagccaagcttcctgctcaggattagtttccagctaagtctgcaagccctagaggagtttttccaggctgtctgtgaagcctggggaacacaacggcaactgggagatttgtgagtgaacactgtttcatctt

SEQ ID NO: 15284 - protein, 269 aa, Homo sapiens
MKTPVELAVSGMQTLGLQHRCRGGYRVKARTSYVDETLFGSPAGTRPTPPDFDPPWVEKANRTRGVGKEASKALGAKGSCETTPSRGSTPTLTPRKKNKYRPISHTPSYCDESLFGSRSEGASFGAPRMAKGDAAKLRALLWTPPPTPRGSHSPRPREAPLRAIHPAGPSKTEPGPAADSQKLSMGGLHSSRPLKRGLSHSLTHLNVPSTGHPATSAPHTNGPQDLRPSTSGVTFRSPLVTSRARSVSISVPSTPRRGGATQKPKPPWK

SEQ ID NO: 15285 - DNA, 1767 bp, Homo sapiens
  CDS (217)..(786)
gaataaattagaggggatctcggtgcgaactttccttgacctcgaccccaaagaggcttgctggggccgagaagaaaacccgtgcgggatgtggaggggcccggggcgccggggtcccccgcccgcgagacccgctccaccaggcgccttggagagcagcgccagcggtcgtcctccagctcccgcaggggtcgccccgccggcgcgagggacacaatgggtccgcgggccacgcgaacgggcctcggcccggcggcagcacgggagagatgtgaggagcgcgcggaaggggagcgcggccggggagatcccagcgcggtcaggcccgggagccgaggctcgggggcccgggaactgggcttcccacagcagaagacccaacaaagacaccaggggagcccggcgggctgggcgcgagaagacgtggtagcaggttcgctcctccgagcagacgggaggcgccatcatggggggggggggtcgcggcccgccccgcgcagaaagagcccccttcccgccgctgcccgcgcccccagcccagcacgaccgcggcggccccacgcgtgcagagacggcggcggcggcgctggaaagcccggggcgccgaggggagggctgggacgcggcatgaagggaaagttcggttcgggtctgtttcgttttaccgggttggcggcgcgcccgtccgtgcgggagcacgagtggccgggcgagcggggtctcgcggcccgggtccggacggccgggcgctgcgccactctccgctccccgagcctcggcccgggttgagccgctcggcctctcctttctccgcccgcccgcctgctttctcctggagcctggattgatctggtcgcgctggcgtcagggagtcggagctgcccagcctccactcctcagctgccaatacccggcgcactcgcctgcctgcccgcccgctcacacgctcacccgctcacccgcgcgccgccgccgctgccgcgcgaccagggatcctctccaaattcccggcccggccggcgtgagcgcagcgcggccggggccggaggacggcgcgggggagcggccggagccacccccttctaccggcagccccacgccccgtttcttcctggagaaaagacagtgtggcggcgttcaggctttcctaaccctgcctttttagtcccggtggagcggacttagtccattatctgcaagtgaatttcgatgttccatatgtttattttctgaaatgttcattaacgcttccaccgcgcccactgaatcgttctataaacgtggagtgcatgttgacagttacctttcgagacgcgcccttttatgtctatctttcgttgcccctcactcactctccaataatttgcaggccccagaagttgtacgtacccagaattggatagcctagtaaatactgcacgtggttatacaaaccctgagtcaacagatgcgttttgtgtcaactcaggatccagtgattcgagtaggtaaccttgttgctccaaataatggcatgccataaggagatactgctttagaactccacatttttggtccaatttctacagtcttttagatgatgccaactcccccgcacttaactcttacctacctgatctgcatagacattgaaaatatcttcttgcaagagtcaacttttctcttggctaactcttgaagctgcataaaatcttgcataattactataatgttgagttacgtttagaaaaaatgatttttttttgaggaataaatttcacatgaagc

SEQ ID NO: 15286 - protein, 190 aa, Homo sapiens [sequence omitted]

SEQ ID NO: 15287 - DNA, 1745 bp, Homo sapiens
  CDS (221)..(793)
gaccctgtttcaaagagaaaaaaaaaaaagctggagaggagagggggcaggtttgtggcagggtggctgcagtggccatggggaggtgtttggacctgggggttggagacagctccatgagccctgctgaggatcatggtagccaggctgggatcctgggcccagagcagtgctggctgacacataggtctgtggcccaggtgtggtctacgacacgttcatgctaaagcaccagtgcatgtgcgggaacacacacgtgcaccctgagcatgctggccggatccagagcatctggtcccggctgcaggagacaggcctgcttagcaagtgcgagcggatccgaggtcgcaaagccacgctagatgagatccagacagtgcactctgaataccacaccctgctctatgggaccagtcccctcaaccggcagaagctagacagcaagaagttgctcggccccatcagccagaagatgtatgctgtgctgccttgtgggggcatcggggtggacagtgacaccgtgtggaatgagatgcactcctccagtgctgtgcgcatggcagtgggctgcctgctggagctggccttcaaggtggctgcaggagagctcaagaatggatttgccatcatccggcccccaggacaccacgccgaggaatccacagccatgggattctgcttcttcaactctgtagccatcaccgcaaaactcctacagcagaagttgaacgtgggcaaggtcctcatcgtggactgggtaggcagtgagctggtggggctgggcaggggcgggtagagctaggaccagggtcagccttcaggaagtctcctcccccagccccaccttcaagcaccccagtcgtcctcatcctcgggtgctgggtgtgggtgcagaaggaagggcgctggggctcctgccggatgactaacgtcacattccaacagggctccctcctcaactatgaaagacatttagctcctgttccatcttggccctcacgttgcagtttcaagcaacgaaggggatttcctaccttgaacggtagtgacgctgccgccattgctagtagccgatatttcctcccaccccctacaattaggagcagactgtataccaggaacacaatgagtactttatggccacctcgagtagtaagaacgaggatgtccatttctgtgaacaaaggtgttgttgcgtgacttacccaaggccactcagctggggatgtcggcactgggtttcagaccaaggcttttggccccagcactctgctcttgctaccatgggtgcttcccaaaccctgctcctaatggtggaggcagaggcacacaccactctctgtgagctggggaagtagccaggaccaagcctcaggaaggacaaaatctcttggaagcccaattctggcttaaaaattcatgtaaatgttggatcctccttcagaatcttacgtgcttgtggttgggcacaatggctcaaagcctgtaatcccagcattttgggaggccaaggtgggtgaatcacttggggtcaggagttcgagaccaggatggccaacatggtgaaaccctgtctccactgaaaattcaaaaaaattagctaggtgtggtggcgggagcctgtaatcccacctattggggaggctgaggcaggagaattccttgaacctgggaagtggaggttgcagtgagtcaagatcatgccactgcactccagcctcgatgacagagtgagattctgtctc

SEQ ID NO: 15288 - protein, 191 aa, Homo sapiens
MLKHQCMCGNTHVHPEHAGRIQSIWSRLQETGLLSKCERIRGRKATLDEIQTVHSEYHTLLYGTSPLNRQKLDSKKLLGPISQKMYAVLPCGGIGVDSDTVWNEMHSSSAVRMAVGCLLELAFKVAAGELKNGFAIIRPPGHHAEESTAMGFCFFNSVAITAKLLQQKLNVGKVLIVDWVGSELVGLGRGG

SEQ ID NO: 15289 - DNA, 2032 bp, Homo sapiens
  CDS (31)..(399)
gaagcgcgctcccggggaggtgttgcagccatggctacggcagccggcgcgacctactttcagcgaggcagtctgttctggttcacagtcatcaccctcagctttggctactacacatgggttgtcttctggcctcagagtatcccttatcagaaccttgggcccctgggccccttcactcagtacttggtggaccaccatcacaccctcctttgcaatgggtattggcttgcctggctgattcatgtgggagagtccttgtatgccatagcattgtgcaagcataaaggcatcacaagtggtcgggctcagctactctggttcctacagactttcttctttgggatagcgtctctcaccatcttgattgcttacaaacggaagcgccaaaaacaaacttgaagttgtctgaaagcttgctctacacttttacattcatcctcacccttttttttgtggggtagaggaggtgcagtaatttactcagtgatctttctactttctagaaactgtccttcaaagctctttaagaccccctcgttagtcagtttcttctcttatatgctctggttgagcttgaatagaccagttgttacttaagaaagaaacagagaaagattttagcttttcaatcctatttggcagaggacttcagctaccttcttacagtctttggctgtgttggtaccctcgtgtgctctgagctaagccacatactaaactgactttttggtttgtatacccttgctcccgccttctgatgaaaacaccttaccctcacaaccaccatctttcctctcctttccaaagctctttccaccttgctgcactaagataaagtgacacttccactatatgtcaattccacacacatttattaggtacctgtgaggtaggatcctatcctctcaaacttccatttctcatgctacagagaaagataaggaagatgagcaagtgcctggaatggggcaggctgagcagtcacacaggcatagaggcacgctgagaacctggaggggagactgcagagtgccttccctgatgctgcagccggaagtgatccttccctccacctggcccctgggacactgtgctctgcagtgtgcagggcctgatggcactgctagattgctccttcagctcagggccacagcttaaacagctttacctttcccctcagcacctgtcccactatcttgcacacaggtgctctaaccatgtttattgaacaaaggagggaaactgatttcactttcacttgttcattatcattccaatttttatgtgaaaatggcacaacccatttggggtaccctcaccccaaaataaaagcccaagtctacctttgactggtaccaccttttttgtggtttcgttggtgagaaacctttatctttttcatacctttctattctcaatcacttctccaaaagtgtgtctttccagctctgatttattcaaaacacaagcatttctgtttagagattctagcccatgggttatctggctagttattacctctcctgttcacttagttatactttattattgctcacaggctggggaggcagaatgactctgtcaccactaggagccattagggcttcttccctggaggactgcctgcttgctttctggggacactagccctcatttcccttctgtggtacagtggggcaaattatttgtattaagcaaacatttatgggaaacaacccgctcccgaaaacggagcccccaagtaaagcacaaccctgaaagattatgaactatgaattgtctctagtagagataaatttctgcaaacatatctcagtcttccctctgtttctctggtgattaagaagttcctttttggtaaggaaaaggatttttaaccatagagttaggcatcatggaaattcaaaccagatttcttaatacctggtcttcctcaaagagaaataataacagtaatagtggtgctgggaacaatatggcagattattgaatgaaattgattaacttgaataaaatgctgtgaattttc

SEQ ID NO: 15290 - protein, 123 aa, Homo sapiens
MATAAGATYFQRGSLFWFTVITLSFGYYTWVVFWPQSIPYQNLGPLGPFTQYLVDHHHTLLCNGYWLAWLIHVGESLYAIALCKHKGITSGRAQLLWFLQTFFFGIASLTILIAYKRKRQKQT

SEQ ID NO: 15291 - DNA, 1737 bp, Homo sapiens
gttgaaagatgtgagacagtattcagaataatgaagataataataatgattattataataatgatgatgattccaaggaaaaaacctacagcgaatgttccatttctaccccgcacgcagacactctccctaacactgataacctgagcccccagcactggacggaagaatgctggcgtctccgtgtgtactggttcagggttctggccccagccttgtcaggaccccctggtgtccagagcccccacccctcccgcaacaagcagctgatgccccagtgattctctatacatttttcacctcggccaatatgtccaggaaaactgcttacttctcttttcttgcctggagcttcattgttcacccttacgttgcaatataggaattaatgctacaaaataaaagtaaagcttacctgaaaagtgcatagtttggggcaatggtatctacatctcccactgtgggaaaaccagcaaagcatcaaaactctcaattctcctgttaccgaatgcagatctgaattataagatgtttatgtttgaccattgtttcaacaatgggattttgttacgaattatccctttaactgaaaccctcagttttactgtttacattattaggaaaacagggatatcttttgaatctaaaaatttgatgtacagcatgtgatttttgaagtttacatgtaaagtcacagtataggtgaaataacgtttgtcatattttgagacgtatcctgcagccatgtttttacgtgagtgttttagtcaaagtacatggtagacagtctttcacaataaaaggaaaaggattttttttcctccaaatgtacatttatcaacctaatgattgatttttttaaaaagagatttcgccccagtctggtttatgaaagttcattgccctaaactgtgctgattgtttttaatcaagttataaatttccaacctagatcatgtatctaccaactctcctgcattttccaaaaggcattgagcttaaatattagtcttgcttagagtaggttatccacttacatgctgcgctaaagccatgcctttgaaactccttgtttaaaacatgatatgatttttgtgggcagtttcagaaaagaaaacaaacaaacaaaaatcgaccctttaattattacttgcaactcaacagatctccctgccgtactgccttttccaggaactttacttcagggctgtccagattgcagttgtgccccgtgtatgtggatctagttcacagagtctttggaagccagcagtcgtgccctccgtatactgtccactcattttatgtagatttggtatcctcagcagccagtgttaacaccactgtcacgtagtgtacagattcatcttttatgtatttaaagtaatccatactatgatttggtttttccctgcaccattaattctggcatcagatcagtttttgtgttgtgaagttctactgtggtttgacccaagaccacaaccatgagaccctgaagtaaagataaggtacacatacattatttgagtaactgtttccttgggggccaatctgtgtatgcttttagaagtttacagaatgcttttatttttgtctataacaaacagtctgtcatttatttctgttgataaaccatttggacagagtgaggacgtttgccctgttatctcctagtgctaacaatacactccagtcatgagccgggctttacaaataaagcacttttgatgactc

SEQ ID NO: 15292 - DNA, 1813 bp, Homo sapiens
  CDS (147)..(1622)
gtatgcaaatgtagcggcgcggcgggagcgcgcggctgatacccgggactgggctgcggcggttagtcctctcccggccgccgtcgcctccgacatattgcccgcaggagctgcggcggcgaagcggagagcaccggggggaggagatgggaggacgaagaggtcccaacaggacatcttactgtcgaaatccgctctgtgagccgggatcctcggggggctctagtggaagccacacttccagtgcatcggtgaccagtgttcgttcccgcaccaggagcagttctggaacaggcctctccagccctcctctggccacccaaactgttgtgcctctacagcactgcaagatccccgagctgccagtccaggccagcattctgtttgagttgcagctcttcttctgccagctcatagcactcttcgtccactacatcaacatctacaagacagtgtggtggtatccaccttcccacccaccctcccacacctccctgaacttccatctgatcgacttcaacttgctgatggtgaccaccatcgttctgggccgccgcttcattgggtccatcgtgaaggaggcctctcagagggggaaggtctccctctttcgctccatcctgctgttcctcactcgcttcaccgttctcacggcaacaggctggagtctgtgccgatccctcatccacctcttcaggacctactccttcctgaacctcctgttcctctgctatccgtttgggatgtacattccgttcctgcagctgaattgcgacctccgcaagacaagcctcttcaaccacatggcctccatggggccccgggaggcggtcagtggcctggcaaagagccgggactacctcctgacactgcgggagacgtggaagcagcacacaagacagctgtatggcccggacgccatgcccacccatgcctgctgcctgtcacccagcctcatccgcagtgaggtggagttcctcaagatggacttcaactggcgcatgaaggaagtgctcgtcagctccatgctgagcgcctactatgtggcctttgtgcctgtctggttcgtgaagaacacacattactatgacaagcgctggtcctgtgaactcttcctgctggtgtccatcagcacctccgtgatcctcatgcagcacctgctgcctgccagctactgtgacctgctgcacaaggccgccgcccatctgggctgttggcagaaggtggacccagcgctgtgctccaacgtgctgcagcacccgtggactgaagaatgcatgtggccgcagggcgtgctggtgaagcacagcaagaacgtctacaaagccgtaggccactacaacgtggctatcccctctgacgtctcccacttccgcttccatttctttttcagcaaacccctgcggatcctcaacatcctcctgctgctggagggcgctgtcattgtctatcagctgtactccctaatgtcctctgaaaagtggcaccagaccatctcgctggccctcatcctcttcagcaactactatgccttcttcaagctgctccgggaccgcttggtattgggcaaggcctactcatactctgctagcccccagagagacctggaccaccgtttctcctgagccctggggtcacctcagggacagcgtccaggcttcagccaagggctccctggcaaggggctgttgggtagaagtggtggtgggggggacaaaagacaaaaaaatccaccagagctttgtatttttgttacgtactgtttctttgataattgatgtgataaggaaaaaagtcctatttttatactccc

SEQ ID NO: 15293 - protein, 492 aa, Homo sapiens
MGGRRGPNRTSYCRNPLCEPGSSGGSSGSHTSSASVTSVRSRTRSSSGTGLSSPPLATQTVVPLQHCKIPELPVQASILFELQLFFCQLIALFVHYINIYKTVWWYPPSHPPSHTSLNFHLIDFNLLMVTTIVLGRRFIGSIVKEASQRGKVSLFRSILLFLTRFTVLTATGWSLCRSLIHLFRTYSFLNLLFLCYPFGMYIPFLQLNCDLRKTSLFNHMASMGPREAVSGLAKSRDYLLTLRETWKQHTRQLYGPDAMPTHACCLSPSLIRSEVEFLKMDFNWRMKEVLVSSMLSAYYVAFVPVWFVKNTHYYDKRWSCELFLLVSISTSVILMQHLLPASYCDLLHKAAAHLGCWQKVDPALCSNVLQHPWTEECMWPQGVLVKHSKNVYKAVGHYNVAIPSDVSHFRFHFFFSKPLRILNILLLLEGAVIVYQLYSLMSSEKWHQTISLALILFSNYYAFFKLLRDRLVLGKAYSYSASPQRDLDHRFS

SEQ ID NO: 15294 - DNA, 1972 bp, Homo sapiens
cacagttcatggtaaagcccaagactgtacctgcccatccactgccttttccatgtatcctggaactgagcatagacctcttcccaggcagagctgacagcaagtaaaggagatcataatcaggggaccaaacaactttgtctaaagtgtgaatgtcacctaaggagaagctgtgagatcagaagggtggggcagaggagcagacaccatgagggagagtccttgggggtacatctgccagactgacactgtctggcctgggcagtggaggggctagcaggaaccacaggtactggtggtgtggctactaccgttacaactgcctgtgcttggacatggaccctctgcaatatgcggcagtttcattcattgccccctacattctacaccaagtagaaatggaaggcaattggatacttcacagacaagatctaagtggagaaggaatgcgtcctgtggctgcagagatccttggagcttggaggggagagcttgagccccactgatgatgacctcccacagctcgccaactcagccctccctaagtccccatcgggggccaattctcactctggggttggggggactccaccatagctcatccatcatagggatgttggtatctactgtgggttgggtagggccgatgtgctgaggatggctcccccacaagcaagagatgtggatttggggagcttcccatcttgtgttgaaggaacataactcagaataataagagccaactataacaaacccacagccaacatcatactgaatgggcaaaagctgcaggcattccccttgaaaagtggcacaggataaggaagccctttctcaccactcctattcaatatagtgttgaaagtcctgatcacagcagtcaggcaacagaaataataaagggcatccaaataggaagagaggaagtcaaactatccttgtttgcagacagtatgattctatatctagaaaaccccatagcctcagcccaaaaggtccttcatctgataatttcagcaaagtttcaggagacaaaatcagtgtacaaaaatcactaacattcctatacacagtcgccaagccaagagccaaatcaggagcacaatcccattcataattgccacaaaaaagaataaaatacccaggaatgcagctaaccaaggaagtaaaggatctctacaatgagaatcacaaacgctgctcaaagaaatcagagatgacacaaacaaatggaaaaactttccatgctcatggctaggaagaatcaatatcattaaagtggccatactacccaaagcaatttatagattcaatgctattcctatcaaacaattacatttttcacagaactagaaaaaacttaaaattcatatggaaccaaaaagcctgagtagtcaaggcaatcctaaacaaaaagaacaaaggtggaggcatcacattacctaacttcaaactacagggctaccatgaccaaaacagcatggtactggtacaaaagcagacacacagaccagtgggacagaatagagagcccaaaaataaggccacaaacctacagccatctgatcttcaacaaagttgacaaaaacaagcaatggggaaaggtctccctattcaataaatggtgctgggataactggttggccatatgcagaagatcgtaactggaccccttttactatgtacaaaaattaagatggtttaaagagttaaaacccaaaattataaaaatcctgaagataacttaggcaataccattctggacataggaactggcaaagatttcatgatgaagacaccaaaagcaattgtaacaaaagcaaaaatggacaaattggatttaagagctttttcatagcaaaataaacaacagggcagacaatctaccaaatgacagaaaatttttgcaaactatgcatctgacaaggggctaatatctagcatctataaggaatttaaacacagttacagg

SEQ ID NO: 15295 - DNA, 2228 bp, Homo sapiens
  CDS (252)..(1634)
acttccctttttccggtccgccggattatgaatgacggccggcgcgagtattttccacataagctggctgtcgtttttctcctggcctctgtggaggcgagtggtctgcgggcagcagctcccagaggcagccttggaattccagctcggactgggcgggaaggcgcaggcggcccaggtcgccgacacgctcacgcaccctccctgcctggccgcgcctctgcgaccaggtgacccaatgaaagaagaaaatgaaagccataaagaaaagtcttacagaagaagaatacctgtacctggacttttctcaccaaacagaaggatgcatctttcctcttcatacatctgtaactttatttctgttatcttactgtgactgtaaaatctttaaaatttgcttagttgtcaccaaagaggtgagtagagatagttcactactaagagatgacctgatccaggatgttgaaatacggattatttcaaggcaggagctcccaccaatagtccaaaattgctgtttgcctgcagtagtagaacgatcagacaatttttgtagagcaggacttgctgttgtattgagacacataatccagaaatcctatgaagcagaccccttaaagaaggaacttttggaacttctgggctttaaaaagacttgcttgaaagcctgtgctgaagttagtcagtggaccaggctatgtgaactcaccatccctttggctattgagaattttctcagagaatcttctgaccagcccccaactatacctgtagaaatactacagctagagaaaaagcttagtgagcctgttagagtgcataatgatgataaactccgcaggcagaagctcaagcaacagaaggctgatggagttgggcctccccttactaagggaaaggcaaagagcaaggtccacacacaggaaacatctgaagggttggattcttcatccaagagtctggaactgaaagtggcattctcaaagctcacagtacaggaagaaccagctactaccaacagagagccttctcacatcagaaaagcaaaagcctccgaccttccacctctggagcatgtgtttgcagaagggctttacttcactctggcagatattgtgctcttgccctgtatccatcatttcttggtaattatcagcaggaaattttctgagaagctggtagaatttccattgctagcctcttggtaccagaggattcaggaagtgccaggagtaaaaacagcagcttctaagtgtgggatccaatttctccatttaccaaagttgttgacaacctcaactgaacagcatccaaacttatgtgaagtcccaggtgtagaagagcaaagcgatcctttatttataggaggaccaagaccaaccatggccaagttaatggaaaagggcattgaagtgatgttttctccccacccttgccctacttggactcttgattggaatgttctccctgcagcagtcagcccaaaggaaggtaaaatgtccagtgatcgagctttgaggaagcagcaacagttgaacaaccttgtctatgtggtaacaaatcaggccaaacctggtgacagaattgtggatttctgcagcggtggggtattttatctctcctttcatcctttttagtctttctaagattatgagacttttctatattacattcaaggtcatgtttttatttggcaagattgtggtttcagaatgaggaaaagctgtggggaccaaagctaacttgtttgtcttactgactttttcagggccatgttggaattgtccttgctcacatgctgccatcatgtcaggtaaagccagaataagagataaaaggaaatattttaaaattatacagttcagctagccaaatttggtttatcccgctcttggagtttctagtcactcacccaagtcaaatatgtggcacaggcattgtcttttctttgaaataaactttcaagactcagaatcttaaggaaaaaaaagtaaagtaagatcataaaacatttatcaatttttaaaagaggtttataggtttaagtaatttttcaaagaagtagctattttattgctaaataaaataattatgattcaactagtttaattttcaatataattttaaatggaaatattgacctctgaaacttgctgagcatattcttttggtatcttgattttgatccattgcatcaaaattataacaatagcaaaattttttaaagc

SEQ ID NO: 15296 - protein, 461 aa, Homo sapiens
MKAIKKSLTEEEYLYLDFSHQTEGCIFPLHTSVTLFLLSYCDCKIFKICLVVTKEVSRDSSLLRDDLIQDVEIRIISRQELPPIVQNCCLPAVVERSDNFCRAGLAVVLRHIIQKSYEADPLKKELLELLGFKKTCLKACAEVSQWTRLCELTIPLAIENFLRESSDQPPTIPVEILQLEKKLSEPVRVHNDDKLRRQKLKQQKADGVGPPLTKGKAKSKVHTQETSEGLDSSSKSLELKVAFSKLTVQEEPATTNREPSHIRKAKASDLPPLEHVFAEGLYFTLADIVLLPCIHHFLVIISRKFSEKLVEFPLLASWYQRIQEVPGVKTAASKCGIQFLHLPKLLTTSTEQHPNLCEVPGVEEQSDPLFIGGPRPTMAKLMEKGIEVMFSPHPCPTWTLDWNVLPAAVSPKEGKMSSDRALRKQQQLNNLVYVVTNQAKPGDRIVDFCSGGVFYLSFHPF

SEQ ID NO: 15297 - DNA, 1736 bp, Homo sapiens
actagacaaggcagttgaggaggagggagcgcttgagggggactggcctggcgtgcactccgcacctcggggacattattgcgcgtggaacggctgcttttggaaggcacaacttcctgaatggaccatgactcccaccaaagatccctgtctctgattcaccaaacagcttcaaccctgaaaccaggacgagaagttgacaacatctgagtggacagctaattgacctaagacttcagaccaggcctgtatgatctcctgtctaaacattcttagagtattatatttactttggggactattggccttgtctgctttgactcagattataggatatataacctggttaatgtttctgtacacatgatggccacctatgtatatacacttgacttttcagggtctctgctggggatggaaaaatagttcattagccaaactctcctaaagtgtggcagatggaggcagtctctcagattgctggatttgtcaccagcttccaagggccattcaagatcattacatgctacttgttgcaccagagattgatttttctgacactccaaatgttaccatatacttacatcagttccctccaaatgtcactttccaaattcaaattcagcttctaaagccaggccatattttcattctgtgcttagtaataagccctaagtctcacccttccccaccgcccccaggtctatctatcagtaagccaattagggacaaattctctaacttatctagaacacaaacttaattcctcatcttttccaggtccctgcacattcctggcctcccaccgttactgtcataactggcaactgaatgtccaaaggagaaaaagcaaagcagattgtgccagcacgtctcatttgttatatatcatgcttatgcaggcctttgtaaggcctgcagtaaaaccaatccatggctcactcatgttttaaacaacttacctattcaaactattatgaatgaatagttaagagatacattttggtatgtggcattgggccacacccaccaactcaaggatgggcacatagtgtaaatagctggcaaaatagctggcaaattgaagggcgctttttttttttttttttttgagggagagtcttgctctttcgcctaggttgtagtgtggtggtgtgatcatggctcactacagccttgacctccctgggctcaggtgatcctcctacctcagcctcccgagtagctgggacaaggagtctgtgcagtagctcacagtgcctgttgcacttacatcgacacctcgggtgaagtagagacttgcacagaaagaatttccaagcaagctaaatggttacaagaggcacaaactactgatcttctcaatgatctatttaattggcttcctatttcttccagtctgcagttcaacccctttttcatgggtaaagtgccgacgtcataacaaggtttgagggaggcacatctcacacgtgtgaatgcccagtcatcacacttacaaatgacaaaaggatctcaaaccttgatatagtctctatcctacttctcttactatcacttaaattactcatggtatttataaccaacttacgtaagtctattgctaaaaccagaattataggtcaggtgcagtggctcacactcaatcctagcacttgggaggccaaggtgggaagactgcttgaggctaggagtttgagaccagtgtgggcaatgcagtgaaaccctatcttgat

SEQ ID NO: 15298 - DNA, 2636 bp, Homo sapiens
  CDS (772)..(1341)
ttcacaaaaaaagaaattccaaagcagaagtcctggtatgttactattccagacaaatctgatatgagaaagcactaaagataattgaaacattaatttaataattaattaattaaaatagtacagtcctggatgtcttttttgtgctttctttaatttctttccagctatatataaatgtgtcttggtatgaatttaagtgcctgggaatgaatagtactgtcccccaggataataagttattagcaaattaataccttgcttctgttagttgtcaacatgttgcaagtaaacattgttgataggcactgtggatctactaagggtaagatatcatcctttcacaaaaggatagctattaaacctgactgtaggtaaagttaaattgcaactaaacatatgtagacatatactaagattttaaacattacacaatatttctgaccaataaaatataaactagagtctaaactgtttggttaagaatttcattgctagagtacccttacaagttctaactgaatttccaaaaatctaacattttgttctcaataaaataaaatgtgtttaataaatatgaagcaaaaaacaaaatcctaaacaaaagcaaacactgttgatcagtcaatttaacatggaatattattgctattatttttattgaccaatagtttatttcctgacttttcttctcagatatggacactattgatgggagcggctggccatctggagtggcagttgccatcatgccagtagcgcttgggccgcatgggcagtgttgtcaggagcagcagcaggagcagcagtggcggtggtaggaccccgttccctgtgtccccaaggcatctgactgcgccgccgccccctaatggctgggcaggacccactgccaggtgcagaccctccatggcggcctcaatttcgcttcctaccacatctgggagcccatcagcgctggcagccgggtcttgcaggattggtgccaggagcatcaggttcatttgtgcggcattagccagggcccccatgccacctgcacctcgcccatgcactactgcagggaaaacgcagagaggagtcacggccaaggctgcacactctatggagccagtggcagctggggacaagtgggagcccagccccttccaagttgccagggcaggaactccccaggcgcaactgcagctgcccaaggagggtctgcgacccaggcactcctgtgctcttgggagccaggagaaggcaggagccccaccctcccaggcacagctggagcctttcaagccacagctgcagacccaggcacctctgcactcttggggcctgggaaggcccccgtgaccacacaggctcggaagtgcctgcccccactgtctgggttctcctcgctgtcagcacctgctccaatcttcgagcaaagttgaggtcgagcacactatattgtgaccaatataaaatagatataaaaatacctcttacacttaaatccaggcattgccatttgaatgacttaagaatatgcagctaaggtgcttttaaaaatacaagctagtgattatactgaatttgtaaatcacgtaggatagtgagtcgttttagaatattaattatttcagtccataaacctggatgtctttccttttttgtgttttctttaatttctttcattgatgtttgtaatttttgttatagaaatcatttacttcctcggttaagtttatttctaagtacatttttgtagctattgtaaaagaaatagcttccttaattttttttctgctagtttactatcaacatatagaaatgctactgttttttgtatgttgattttatatcctgcagctttattaaattcatttatcactctaagaagttttaggtagagaccttagtttcttccgtgtatgagatcacattgtctgcaaacaaggataatttgactgtctcctttccaattcagatgccctttatttctttctctaacctaattgccctggctaagactttcactatgtgaaatatgattggtgaaagtgggcctccttttcttgctccagttttcatggtaacatttttcaccttttccacgttcagtatgatcttagctgtagggttgtctttacgcccttttgtgttgaggcatatgttttccacactaaattgtttagaggcttttgtcatgtaagaacgtttaattttgccaaatgctttcattgtgtttattgatttaatcatatggttttcaatatatgtccaaaggaaagaaaatcaatatatcaaagccttacctgcacccccatgtttattacagcactattcacaatagccaagatatggaatcaacataagtgtccatcaacagatgaatggataaagaaaatgtgacatacatatataatggaatactattaagttataataaagaacaaaatcctgtcatttgtggcaacatgaatgcaactggagggcattatcttaggtgaaataagcctggcatagaaaaataaacaccacaggccaggcacggtggctcacgcctgtaatcccagcactttgggaggccgagacaggcggatcacgaggccaggagatcgacaccatcctggctaacacggtgaaaccccgtctctact

SEQ ID NO: 15299 - protein, 190 aa, Homo sapiens [sequence omitted]

SEQ ID NO: 15300 - DNA, 1915 bp, Homo sapiens
gtaaacttttttcacttaaaaaagtccctccccccacctcacagcatatgaatgcgttctctactgagtaaatcaagcctgagctttctcatgtgggctcctctgtgctccatccacttctctcttggaagacagggtgtctttctgccttccaaggctgatgcctctcgtccccctcccaggggctgcaccctcagccacccccagctggtgttttcagtttgcttctctgataggtggcctcttttatcttctggtttgttgctgctgccttctgaatttacaggcagcctgtggatccttctgttggtatttttctctcctaggtgaactcttggaaggaggtggtcggcattcactgttacctcgggccctttccaccttggcactgctcatcatgctatgatttggctcctatcctgcccactctaataaacaatcacgagtttggcagttctccttattgccaaatttaatggtcatttacaactcgttttcctgaactcttcttctttttttgacaccatagacgtctctctctgtgtcactttctgatttttcttccattgattctctgacttggctcctgaactggttcctgatttctcctgcctgtcactttagttgttccctaagagttggttcttcacctcttaacttttccaggacttttgtttggaatttgacactgttgactatacacctctttcttgaaattgtctgtcattcatctccatggtgttattcctttctggttctccttgaaatgtgtcttgatttcagtggctcttgaagacttggtgggaactttctatttccttagctcccataatgctaatttttcctggtacttcttgtgaaccttttcttttttttagccttcagtagattctaaagagttgcactgagggcctttaatgtggaactggctcaggctggttaaagactcagtctctgagaaaacaattggactgatgcgaatgcagttttggaaaaaaactgtggaagatatatactgtgacaatccaccacatcagcctgtggccattgaactatggaaggctgttaaaagacataatctgactaaaagatggcttatgaaaatcgtcgatgaaaaatcagtcatggagaaaaacatattaaaataatttcatggcactgatgttaattctagtctattagttttataaaagttaggattcttatttaggaacaacaggaaatgactgttaaggagaaaatgaatttattgaatgggatgtcaagtagctcacaaaattgagaagttgccgtgggactagggtgccaagactgctgagattctggcagaggcactgccattggcacccctggcccagacagtgtctgctgtgctgtccctggaagctggagctccaacagggaatattggtgtagctgtgcataggccataagccacacttgagccagtgggcagggagaaggaatgtcattctcccttcaccactggggaaggaaaggggaaagggctcaagttatcataggggcttacatgctgagcagctataacctaggtgttcagaacacctggaagatgcatttatttaggggtcacaaatagtgaaattaatatttgaggaatatcagtcacgtgttgtgggcttttatccttaacgtttaatttttacaatcttgtgtaaaaatttatccatgataataacataacttctttaaggttggagtggctggcaagagcagagccttaatttgactttagctctggctggtctggaagcttttacttttttgttaatcccacttcctcactctgtcattcagcattatcatgatcgtgaacaaaattgtactgagaaagtttgtataagtgatatgaacggtattgtattgaacatccattaaagggttgctacacttt

SEQ ID NO: 15301 - DNA, 1917 bp, Homo sapiens
gaaaatatggggtgaagatctaagacatttaatagtatcgagaagtacacaggcaccactaataatcagacctgattctggaaaccctcttgacactgtgttaaaggttttggagattttaggtaagaagtttcctgttactgagaactcaaagggttacaagttgctgccaccttatcttagagttattcaaggggatggagtagatattaataccttacaagaggtatgtgttttatattaaaagtttcaataaggcatttcttataattaagtttgtttatgtttgataaagaacacaatataaatacaattttaagtctttgtaagtgtttatgttggtataaatctctgtgcattgcttaaagtttagaaataatagtagtttaaaatacagaggtgccagccaagccatacttactcttccagttgtcattggccaccctgaatgatgaatctaaagaagtatcattgtgaaacaaggaaatgtcagtcaagaaatattccttggaatataaaacaaagccttgactctgctggcataggtctgagttttcataaactggagcttcacaaatctgtaaaactcataatattaatgggtgctttttcagaaattatagaatagctgccacctcttctaaattaagcattgactgtcatcagtattagatttagccagatagtataagtgttatgcaggcgtacctcattttattgtgctttgcaaacattgcatttttttacaaattgaaggttgtggccaccctgtgttgagcaagtctgttggtgctatttttccaacatgtattcacttcatgtctgtgtgacacatactggtaaattctcacaatatttcagactttgtcattatatctgttatggtgatctgtgattagtgatcttcgatgttactactgtgattgttttagggcaccacagggcacacccagataaggcagtgaacctaattgataaatactgtgtgtgttgtgactccttcaccagttacccattccctttctctgctcacttcaagtttccctatgccctgagacacaacagtatttaaattaggtcaatgaataaccccacagtggcctctgagtattcaagtgaatggaaaagtcacatccctctcattttaaatcaaaacctagacatgattaagtttagtgaggaaggcatgctgaaagctaaaataggcctcttaaggcaaacagtaggccaagttgtgaatgcaaaggaaaagttcttgaagaaaaatcaaagtgctactccactaagcatatgaataagaaagtgaaacagctttattgctgctagggagaaagtttgaatggtctgaatagaagatcaaagcaaccacaacatttccttaggctaaagcctaatccagagcaaggccctcgtttcaattctgtgaagcctaagagaggtgatgaagctgcagaagaaaaattggaagctagcagaggttggttcctgtggtttagggaaagaagccatctccatgagtgcagaatgaagcagcaagtgctgatgtagaagctgctgcaagttacccagaagatctagctaagatcattgatgcaggtgactaaacagattgtcagtgtagaggaaacagccttccattggaagaaggtgccgtctaggactttcataactagagagaagacaacatctgctttgaaaggacatgctaactctcattagtggataatgcagctggtcacttttaagtggaagctagtgctcatttatcattctgataatcctaggacccttagaatttgctgaatctactctgcctgtgctttataaatggaacaacaaagcctggatgacagcatgtctgtttacatcatagtgtactgagtattttaagcccactgttgggaccgactgctcagg

SEQ ID NO: 15302 - DNA, 1840 bp, Homo sapiens
  CDS (20)..(1330)
gcagtgccttgcggctgtaatggctgcccccagctggcgcggggctaggcttgttcaatcggtgttaagagtctggcaggtgggccctcatgtcgcgagggagcgggtgatccctttttcctcactcttaggcttccaacggaggtgcgtgtcctgcgtcgcggggtccgctttctctggtccccgcttggcctcggcttctcgcagtaatggccagggctctgccctggaccacttcctcggattctctcagcccgacagttcggtgactccttgcgtccccgcggtgtccatgaacagagatgagcaggatgtcctcttggtccatcaccctgatatgcctgagaattcccgggtcctacgagtggtcctcctgggagccccgaatgcagggaagtcaacactctccaaccagctactgggccgaaaggtgttccctgtttccaggaaggtgcatactactcgctgccaagctctgggggtcatcacagagaaggagacccaggtgattctacttgacacacctggcattatcagtcctggtaaacagaagaggcatcacctggagctctctttgttggaagatccatggaagagcatggaatctgctgatcttgttgtggttcttgtggatgtctcagacaagtggacacggaaccagctcagcccccagttgctcaggtgcttgaccaagtactcccagatccctagtgtcctggtcatgaacaaggtagattgtttgaagcagaagtcagttctcctggagctcacggcagccctcactgaaggtgtggtcaatggcaaaaagctcaagatgaggcaggccttccactcacaccctggcacccattgccccagcccagcagttaaggacccaaacacacaatctgtgggaaatcctcagaggattggctggccccacttcaaggagatcttcatgttgtcagccctaagccaggaggatgtgaaaacactaaagcaataccttctgacacaggcccagccagggccctgggagtaccacagtgcagtcctcactagccagacaccagaagagatctgtgccaacattatccgagagaagctcctagaacacctgccccaggaggtgccttacaatgtacagcagaagacagcagtgtgggaggaaggaccaggtggggagctggttatccaacagaagcttctggtgcccaaagaatcttatgtgaaactcctgattggtccgaagggccacgtgatctcccagatagcacaggaggcaggccatgacctcatggacatcttcctctgcgatgttgacatccgcctctctgtgaagctcctcaagtgaccaccctctactgaccctcccagggcattccagctcaagctgctggcaggaactgaccagttctttccttggctggggaccctccaggcactggtgagagacatgaacactgactggccactagctggcctggccctgttgagtctgcacagtccctgcccagctgtgtcttctgttggaagaaggaacctgccttagctcagtttccaggtggttcttctgcctggcaccacagctacaaaggtgtagctaagaagatggcccattggtgggagcaatgtcaccctgcctccagctagctatgggcccagagtttctccctgagtcgctgttgctagcagggagatttctcttcctgccctcacttctttcaccttgaacttggataagaactcgtgtctcctgagtgaggtagcgcctcccatctgctccccaattcttgatctctcccaccccatccctctccccagtcttggatactaataaaatataagcattctggttctc

SEQ ID NO: 15303 - protein, 437 aa, Homo sapiens
MAAPSWRGARLVQSVLRVWQVGPHVARERVIPFSSLLGFQRRCVSCVAGSAFSGPRLASASRSNGQGSALDHFLGFSQPDSSVTPCVPAVSMNRDEQDVLLVHHPDMPENSRVLRVVLLGAPNAGKSTLSNQLLGRKVFPVSRKVHTTRCQALGVITEKETQVILLDTPGIISPGKQKRHHLELSLLEDPWKSMESADLVVVLVDVSDKWTRNQLSPQLLRCLTKYSQIPSVLVMNKVDCLKQKSVLLELTAALTEGVVNGKKLKMRQAFHSHPGTHCPSPAVKDPNTQSVGNPQRIGWPHFKEIFMLSALSQEDVKTLKQYLLTQAQPGPWEYHSAVLTSQTPEEICANIIREKLLEHLPQEVPYNVQQKTAVWEEGPGGELVIQQKLLVPKESYVKLLIGPKGHVISQIAQEAGHDLMDIFLCDVDIRLSVKLLK

SEQ ID NO: 15304 - DNA, 2862 bp, Homo sapiens
cgttcaatgagctttcacataggaaacatatccagaccaagaatagaatatttccaggtcctcagaaggctcccccatgccccttcacagttatacttccccaaggctacaactattctgacctgtatcaccacaggttacttcagaactttctagttatttaatgctatttaggtcaacttttaatgctatattaggtcaagtttcaagaaaaagttttagttggaaattcttcttattttgggaggatgcattgaaggcataattttagccactttaaattttgtgaggagaatgtctctaaaaccatattatccataagaaagatcatcaataaagaagatagagttgtgaaaaaagaataaaatgaagagaaaaatcggctgccccaagtatcttgcttttctgtgcaccacaagtgaaaatcatctctttaggatggtaaatgtagtatactgaccacaagagttcaaaacaaattcagattttggataaacttcagatttattcaagaatcccagaagtccattcgatgatggcaatgttctgttttcaggtaacagttgtttttacactcagtcgtttggctgttgtgaccaactcatccacttattggccctcattctgttagaactgtttaatgatctgctctcctttcctttaatcatcctttccttactttctctcctcatcatctcagacaacctggctgccctcccaggactctgcctgcgggcttgtcctctaacccactcatgatcatcactctggcagaaggaagtctctcgggagaccttagtgggggtatttgccttggtctgcgtgttttccaaagatggatattgctactactagttatgatctaacacctgtcagtacttggggctgacaagcgtttcatagatagcatttccacatctttacctggaatcctatttggcaggtaggattcctcacattttgctgtagagaaacagacaagccaattgttcgaggtcatgtagacgggagtcaggatttacacctgattctgtctggctccaaagcttactctgactctggtcagtagtaaaaaagcacaggagttgatggggagggataggtagagtggaatcctcagcagggttgggaatgtcttataatgaatttgggtttgaaatagaacaggcatgggacacaatgcagcttgtttgggactgagataaaggaagaaagaaggggatggtgctggtcaagcaatgttggagagaccatcaggactggccaataccaagccataccttctccagctccagtccccagaacgagagaaatggtatctgtagcccagggggacagggaaatggcattttcgcatctcaacccctcaggcctgggcagactgccagagtggagagccagggtagcaatgaggcaggggagatcattatcgggaggaaggaagctctggcagctcccaccagcctgtttgtgacaagcaggctcagggccacggaagtcccttaaggtcaaaggaaatgtgatcctggatctgggggatgaagctcagacactccctttaccttatgtcttcaggccaaggggatctggccagagccaggtccagggcctaggttggaagagcagtggtctagagaaacgggaggggcagttagagaggaagagagagaaggaataaaatgccagagcacctcataaacaatctcttggctagagaggtaatgacctttattgcagccaacacagggtaactggctcttcagagcactcgtttcttcatgagtgaactcttacctagttcaccgcttgcctctgtaacagtgacttctttcttgcgcaactggtagagtagaaggtacactgtatttagagcaaggagacctaggttcaagtccaggttctgctactaactaattagacaagctctttaattcattaagctttctaaaaccttaatttcctcatccataaagaaggcatacaatccctgtcaagtctatgtcacaagggattagaggattctatacaaatatgaagtggtatttatttatatttttctttccttcaggtcacctcactgccacgtcagagctggggaagacttctagttcaggaacagaaacagctgtgtccacaaatcccatatgccccctttccatttatttcctctccttgtcatgctgccctaatgccagggggcaggggagacatgtgcaatggcatagaccagggaacccacagacctgagcttgctgtttcttggggataagcatctgggaaaacagcaacaaaaagatgaaaagccatccttctagagctcagctcaccagagtgtcagcttcagcctcccagcagaggctgaaccaggaacagccccaagagatgaggggaagagaatgctctgggtgtaggggagtggtgcggagtcctggagagggaattgaaggtcagccaaagagcaagccagtctggaaacctaaaggactctgtccaagtgtacaggaaccaggtggaattgctgagagtcctttttctggggaggcttacaggccactacgtaagacttgttctgtcagatctctgagggcctcttctcactcctgaactccttaagagctggcccgggctacgctgtgtctgtttgggggtgggctgggagcatcactggatcaggaaatgaatcaggttcatgcctctccacttacatgtcccaaatacgtggacacctaaggatgcctgtacctgcctaaacatgttcagcaatgaggaagcttgaatcgtcacattcgaagactgtatttgttccctggccacatgattttaatgactctttaatagagcacctgacccaggtgtcaactg

SEQ ID NO: 15305 - DNA, 2427 bp, Homo sapiens
  CDS (1478)..(2209)
agtagggcctgatgtaaacacccgagccgggctccaaggcccgggaggtcagaaaaccgggccgcgggcggcaccgacagctggggcccgggtcagggacacgcggaggtcaggccggtgaaggcggcaggaagctggagcacgatcccaggaggaacaatcctgcaccatgactcaacagccacttcgaggagtgaccagcctgcgtttcaaccaagaccaaagctgcttttgctgcgccatggagacaggtgtgcgcatctacaacgtggagcccttgatggagaaggggcatctgggtgagctgttggcaggggaggggcaatgggcagaagagctgggctgggcattggctcccacctccactgacaccctggtccctgtccagaccacgagcaggtgggcagcatgggcttggtggagatgctgcaccgctccaaccttctggccttggtgggcggtggtagtagtcccaagttctcagagatctcaggtaagtgccctcatcctgccctttggcccagatttctcggattcctggcctcccacaggcaccccaaggtactggcagatgaagacgtcagagtacttcagagtcacacagagaggaggcctacagcttggaagtcatggatcttatagcttgagaagcttggtgctttgttttcattttaaaaattctgattgagtgcctcctgtgtgccatgccctagagcacttactgtgagcctggaactgccctaagcactttacgtttattaactcatttaatcctcacagtaactctatggggtaggaaggatcattatccccatctttaccgatgaggaaactgaggcccagtgcagttaagtgactcatccaaggtcacacaagcaataggttttaaaatcttggagccgtcttcccaatacccccttggcttgagcctcaagtgccatcttactttaagggtttttcttgatgatcccatctggacaaggcaggagttgccctaggtgagtcacagagccctaggattcctcacggaaatctccagggtgcatggactaggaccctggaggcagaaatagttaccgaggggaagttacaggcctgagtgtgagtccctgtttggttgctgatgagctttgaggtccttggccagacactcaaccactttgaacctcagtttcctcatctgtagatgagtgtaacagtctagaacactcctctcagggatcatatccacaagtgctcgtgctgtgcgaggatctcactggttgtttattgaaaggctaagcaagtaggttgaggtccctgggaagcaggggtggatcctgtgtcaccagggctgccccttaccctaaaccttggccccgacaacccacccacctgcccagcagtgctgatctgggacgatgcccgggagggcaaggactccaaggagaagctggtgctggagttcaccttcaccaagccagtgctttctgtgcgcatgcgccatgacaagatcgtgatcgtgctgaggaaccgcatctatgtgtactccttccccgacaatccccgaaagctgtttgagtttgatacccgggacaaccccaaggggctctgtgacctctgccccagcccggagaagcaactgctagtgttcccgggacacaagtgtgggagtctgcaacttgtggacctggcgagcacaaagcctggcacctcgtctgctccattcacgatcaatgcacatcagagtgacatagcctgtgtgtctctaaaccagccaggcactgtagtggcctcagcctcccagaagggtacccttattcgcctctttgacacacaatccaaggagaaactggtggagctgcgccgaggcactgaccctgccaccctctactgcattaacttcagccacgactcctccttcctctgcgcttccagtgataagggtactgtccatatctttgctctcaaggatacccgcctcaaccgccgctccgcgctggctcgcgtgggcaaggtggggcctatgattgggcagtacgtggactctcagtggagcctggcgagcttcactgtgcctgctgagtcagcttgcatctgcgccttcggtcgcaatacttccaagaactgcagagctgagccttggcagtggggcgtgcttggaagccaccagccagcaagcattaatggggctggtgcccactttccactcagcagagctatgtctaaataaagagctcacttccccccagcacttcttgatgactgtgtgccccaagggccaggccagagacccaggaaggcagcgaccccttgggatccctaacctggaggaaattgccagggacccagagggagtgccctaatccaacctggggattttttaaaagcttcctaggaagagatgatctccgatgtgatgaatacgaataaaaggcccttaatggc

SEQ ID NO: 15306 - protein, 244 aa, Homo sapiens
MRHDKIVIVLRNRIYVYSFPDNPRKLFEFDTRDNPKGLCDLCPSPEKQLLVFPGHKCGSLQLVDLASTKPGTSSAPFTINAHQSDIACVSLNQPGTVVASASQKGTLIRLFDTQSKEKLVELRRGTDPATLYCINFSHDSSFLCASSDKGTVHIFALKDTRLNRRSALARVGKVGPMIGQYVDSQWSLASFTVPAESACICAFGRNTSKNCRAEPWQWGVLGSHQPASINGAGAHFPLSRAMSK

SEQ ID NO: 15307 - DNA, 1657 bp, Homo sapiens
  CDS (659)..(1120)
agcgcgaggagaaagatggcggcgatggcggtcgggggtgctggtgggagccgcgtgtccagcgggagggacctgaattgcgtccccgaaatagctgacacactaggggctgtggccaagcaggggtgagggccggacctccacgagcggaatgcgaggtccgagcctgtagggagaaggaccgtgaccctgaggcccagtttgagatgccttatgtggtacggctgcacaacttccaccagctctctgcaccccagccctgtttcaccttcagccatcccaacagagatcctatgattgacaacaaccgctattgcaccttggaatttcctgtggaggtgaacacagtactacatggctttgccggctactttgagactgtgctttatcagcacttcctaaaagatgatggtgtgagcatccccggggagtacacttcctttctggctcccatctcttcctccaagctgtacaatgaggtccgagcctgtagggagaaggaccgtgaccctgaggcaccaaccaccactcagagaaggagttctgctcctacctccaatacctggaatacttaagccagaaccgtcctccacctaatgcctatgaactctttgccaagggctatgaagactatctgcagtccccgcttcagccactgatggacaatctggaatctcagacatatgaagtgtttgaaaaggaccccatcaaatactctcagtaccagcaggccatctataaatgtctgctagaccgagtaccagaagaggagaaggataccaatgtccaggtactgatggtgctgggagcaggacggggacccctggtgaacgcttccctgcgggcagccaagcaggccgaccggcggataaagctgtatgctgtggagaaaaacccaaatgccgtggtgacgctagagaactggcagtttgaagaatggggaagccaagtgaccgtagtctcatcagacatgagggaatgggtggctccagagaaagcagacatcattgtcagtgagcttctgggctcatttgctgacaatgaattgtcgcctgagtgcctggatggagcccagcacttcctaaaagatgttctcatggtttcccatcctcttccctattaagcagcccataacggtacgtgaaggccaaaccatctgtgtgcgtttctggcgatgcagcaattccaagaaggtgtggtatgagtgggctgtgacagcaccagtctgttctgctattcataaccccacaggccgctcatataccattggcctctagccctgcgtgccaagtgtccagagccttggaagcagcttcaggttctgctcctgtagtacagaaggtgcagtacatctatgggctgtgattccccttgcccatcagagaggagcatttcaatctgctttcctgccttacatcaaggtgggcaagggattataattaattgcagggctcaagccaccaatctatgaagacctcaggccagggggtgaggaattagtgctggatttgaagctacgcactcagcctcaagaactccctggaatatccctgagaacatggggtttgaacggattttcagcctttttctgttcttgttttgatggttttgtgtaagaggaaatacaaataaagttatagccctttactgcacgacc

SEQ ID NO: 15308 - protein, 154 aa, Homo sapiens
MDNLESQTYEVFEKDPIKYSQYQQAIYKCLLDRVPEEEKDTNVQVLMVLGAGRGPLVNASLRAAKQADRRIKLYAVEKNPNAVVTLENWQFEEWGSQVTVVSSDMREWVAPEKADIIVSELLGSFADNELSPECLDGAQHFLKDVLMVSHPLPY

SEQ ID NO: 15309 - DNA, 1630 bp, Homo sapiens
  CDS (85)..(1323)
actgctctgccggccactcctgcatctttaccgtcccagggacttccagttgctgccccttcccagaggccgtggcatgcggggatggccatcactgctgcccacggggcttccactgcagtgcagacgggcgatcctgcttccaaagatcaggtaacaactccgtgggtgccatccagtgccctgatagtcagttcgaatgcccggacttctccacgtgctgtgttatggtcgatggctcctgggggtgctgccccatgccccaggcttcctgctgtgaagacagggtgcactgctgtgtgtgacctgatccagagtaagtgcctctccaaggagaacgctaccacggacctcctcactaagctgcctgcgcacacagtgggggatgtgaaatgtgacatggaggtgagctgcccagatggctatacctgctgccgtctacagtcgggggcctggggctgctgcccttttacccaggctgtgtgctgtgaggaccacatacactgctgtcccgcggggtttacgtgtgacacgcagaagggtacctgtgaacaggggccccaccaggtgccctggatggagaaggccccagctcacctcagcctgccagacccacaagccttgaagagagatgtcccctgtgataatgtcagcagctgtccctcctccgatacctgctgccaactcacgtctggggagtggggctgctgtccaatcccagaggctgtctgctgctcggaccaccagcactgctgcccccagggctacacgtgtgtagctgaggggcagtgtcagcgaggaagcgagatcgtggctggactggagaagatgcctgcccgccgggcttccttatcccaccccagagacatcggctgtgaccagcacaccagctgcccggtggggcagacctgctgcccgagcctgggtgggagctgggcctgctgccagttgccccatgctgtgtgctgcgaggatcgccagcactgctgcccggctggctacacctgcaacgtgaaggctcgatcctgcgagaaagaagtggtctctgcccagcctgccaccttcctggcccgtagccctcacgtgggtgtgaaggacgtggagtgtggggaaggacacttctgccatgataaccagacctgctgccgagacaaccgacagggctgggcctgctgtccctaccgccagggcgtctgttgtgctgatcggcgccactgctgtcctgctggcttccgctgcgcagccaggggtaccaagtgtttgcgcagggaggccccgcgctgggacgcccctttgagggacccagccttgagacagctgctgtgagggacagtactgaagactctgcagccctcgggaccccactcggagggtgccctctgctcaggcctccctagcacctctccctaaccaaattctccctggaccccattctgagctccccatcaccatgggaggtggggcctcaatctaaggccttccctgtcagaagggggttgtggcaaaagccacattacaagctgccatcccctccccgtttcagtggaccctgtggccaggtgcttttccctatccacaggggtgtttgtgtgtgtgcgcgtgtgcgtttcaataaagtttgtacactttc

SEQ ID NO: 15310 - protein, 413 aa, Homo sapiens
MAITAAHGASTAVQTGDPASKDQVTTPWVPSSALIVSSNARTSPRAVLWSMAPGGAAPCPRLPAVKTGCTAVCDLIQSKCLSKENATTDLLTKLPAHTVGDVKCDMEVSCPDGYTCCRLQSGAWGCCPFTQAVCCEDHIHCCPAGFTCDTQKGTCEQGPHQVPWMEKAPAHLSLPDPQALKRDVPCDNVSSCPSSDTCCQLTSGEWGCCPIPEAVCCSDHQHCCPQGYTCVAEGQCQRGSEIVAGLEKMPARRASLSHPRDIGCDQHTSCPVGQTCCPSLGGSWACCQLPHAVCCEDRQHCCPAGYTCNVKARSCEKEVVSAQPATFLARSPHVGVKDVECGEGHFCHDNQTCCRDNRQGWACCPYRQGVCCADRRHCCPAGFRCAARGTKCLRREAPRWDAPLRDPALRQLL

SEQ ID NO: 15311 - DNA, 2196 bp, Homo sapiens
  CDS (18)..(404)
atgctagacaaggtactatgcctgtatctctgctgaaggctcatgaagctgaaatgtgggaagttcactttcacccatccaacccagaacatctttttacctgctctgaagatggatccctctggcactgggatgcttccacagatgtacctgaaaagtcgtcactctttcaccaaggaggaagaagcagtacttttttgtctcatagcattagtaaccaagctaatgttcaccagtctgtcattagctcctggctcagcactgatcctgcaaaagaccgaattgaaatcacaagcttacttcccagtaggtctctgtctgtgaacactttggatgttttaggtccttgtcttgtttgtggaaccgatgcagaagcaatttatgttactagacatcttttttcgtagaagtactataattataagatttcagatagaacatgcaattagccttttgaaatccagcttctgtgcaaaattttagtatcagaaaatacgagatttgcaggggaaacatcagtaaactaccattaatgtcaatgcccagttttgacttttgttagcctgacactcccaaacagttgtagaatccgatagatgactgatggcaaaagattgtgaacatgtggaagaaaatcagtgggattctggtgctgatgaataggttgccttcagagtattattgacagacagcttgtggaactaattctttatttttgatgttgtgggaattaacacatcaatggtggttatgggaactaccaatgggttcctacaatttttatcagtagtatgtggcatatacaccttcctagtggcagttgccaatgttaatgattattctttttattgcaagtatttcctatgatccttccacactttatttccttaataataataaactttttcagaaagaattgagtagagcaaaaatgacaaagatgtgtagctgtgttcaattttttttttttttttttttgaggcagagtcttgctctgctggagtgcggtggtgcaatctcggctcactgcaacctccacctcccaggttcaagcaattctcctgcctcagtctcctgagtagctggaactacaggtgtgcgccaccacgcccagctaatttttgtaattttagtagagacagagtttcaccatgttggccaggatggtctcgatctcttgacctcatgatccacccgcctcgacctcccaaagtgctgtgattacaggtgtgagccactgcacccggcctgaaatttttttaaggtgaaaatgttttgacaagttcctttttcagaataggtttttgagcagaactctttcagcttgttagacccaactttgcttttgtttagcttcacagcatagctgaaagttgccaaactggacattgtgcaataaagtagaattctatattgataagcaaactatttccaaactaaaaatgtgatagataaaagtgtgattaatcaaatgatatgatcagagtaaagaattttgccattttgatccttttactttgttttagccacctatagtgttaccaaccatctttatccttgtctgcagggataataatgaactaatgtagtgttttaagataatttaatgatactatctttccaaactttgttagattttaaatgtattattgacctgagaccttaatgacaaatcactgctattagacaattgaagtgttcatttactttgtaattccaataatcatagttatggaattatggtaaggttttgcttttctgtcctaataaatatatatattttttgagatggagttttgctcttgttgctgaggcaggagagttgctcgagcccgggaggcagaggttgcagtgacccaggatcgtgccacttcactccagcctgggcaaaagagcaaaacgccatctcaaaaaatatacatatataaggagataaagtttcccattttccaatacagtttcacatttgaacagccctaattgatacaactttatggcagggttttagtgtgtgagtgggatccaaaacactcaatcctgtaaaagggtacagtcctattgtatgttagttaacacactgatgatgtgagcctgtgagatgagccaatcaccagttgttatgttcgaatctgctttgtgttgggacgctttaatgtagggtttcactaaataaatgaattttcatatactgaactg

SEQ ID NO: 15312 - protein, 129 aa, Homo sapiens
MPVSLLKAHEAEMWEVHFHPSNPEHLFTCSEDGSLWHWDASTDVPEKSSLFHQGGRSSTFLSHSISNQANVHQSVISSWLSTDPAKDRIEITSLLPSRSLSVNTLDVLGPCLVCGTDAEAIYVTRHLFS

SEQ ID NO: 15313 - DNA, 2318 bp, Homo sapiens
  CDS (379)..(1467)
aatggcaaaagtggaactcaggacatccagcctggccctctttttaataataatgctgatggagtggccacagatataacttctaccagatccttaaattacaaaagcactagcagcggtcacagagaaatatcatcacctaggattcaggatgctggacctgcttcccgagatgtccaggccactggcagaatcgcagatgatgctgacccaaaagtagcacttgttaacgattctttatctgatgtcacaagtaccacatcttctagggtggatgatcatgactcagaggaaatttgtcttgaccatctgtgtaagggttgtccgcttaatggtagctgcagcaaagtccacttccatctgccttaccggtggcagatgcttattggtaaaacctggacggactttgagcacatggagacgatcgagaaaggctactgtaaccccggaatccagctctgttctgtaggaagttatacaatcaattttcgggtaatgagttgtgattcctttcccatccgacgcctctccactccttcttctgtcaccaagccagccaattctgtcttcaccaccaaatggatttggtattggaagaatgaatctggcacatggattcagtatggagaagagaaagacaaacggaaaaattcaaacgtcgactcttcatacctggagtctctctatcaatcctgtccgaggggagttgtgccatttcaggcgggctcacggaactatgagctgagtttccaagggatgattcagacaaacatagcttccaaaactcaaaaggatgtcatcagaagaccaacatttgtgcctcagtggtatgtgcagcagatgaagagagggccagaccatgagccagcaaagacctcgtcagtgtctttaactgcgacctttcgtcctcaggaggacttttgcttcctatcctcaaagaaatataagttgtcagagatccatcacctacatccagaatatgtcagagtaagtgagcattttaaagcttccatgaaaaatttcaagattgaaaagataaagaagatcgagaactcagagctcctggataaatttacatggaagaaatcgcagatgaaggaagaaggaaaactcctattttatgcgacaagccgtgcctatgtggaatctatctgttcgaataattttgacagtttcctacatgaaactcatgaaaacaaatacggaaaaggaatttactttgcaaaagatgccatctattcccacaaaaattgcccgtatgatgccaaaaacgtcgttatgtttgtagcccaagttctggttggaaagtttactgaaggaaatataacgtacacgagccctcctccgcagttcgacagctgtgtggataccagatcgaatccctccgtttttgtcatctttcagaaagatcaggtttacccacaatatgtgattgaatatactgaagacaaagcctgcgtgattagttagaaccgatgaatacagcgtcagaaggatgccataaccattctgttcctttacagaactaaattgccgcagacaggagttaaagttttatattttcctgctcagttatctaatgtcttagatcagtggtccccaaattttgctacatattagaatcatctgggaggttttaaacaaattctgatgcccaggttgcaccccatgccaatgaaatcatttctgggcgtcagcgccaggcagttgtatttttttttttttttttttttttgagactgaatctcactccatcgtccaggctggagtgcagtggcgcgatctcggctcactgcaacctctgcctcccgggttcaagcaattctcctgcctcagcctcccgagtagctggaactacaggcacacactgccgcgcccagctaattttttgtattttttagtagagacagggtttcactgtgttgcccaggctggtctcaaactcctgagctcaggcaatctgcccgccttggcctcccaaagtgctaggattacaggtatgagccaccatgcccggctggcagttgtattttttaaagcccttctgatgattccaatgtgttggaaagtttaccttgtctcagatgtaactggtaaaggctgatttctaaattttctgtaattgcagcaacctttctctcctgtctacccttttagtttactgtatgccatggttttgttttggttacattgaaagaaagttaatttggaaaatttgggagaaatctaatcatgcctattaaggatgtaagacattacagccttagaagaaagattgtgaaaagctggggagaaaatgcttaaggacatgctagggg

SEQ ID NO: 15314 - protein, 363 aa, Homo sapiens [sequence omitted]

SEQ ID NO: 15315 - DNA, 1656 bp, Homo sapiens
agaaacggcagtggcagcagcgtccggagcagccgcagccttctggaagctccaggcggtctttctgccgagcctcggtcccggcccccatcctccccgccccatcggttgttgtctgggcggatttaaacagtcaagtaaaatcaagctgggtaatcatggcagaaggtggatttgatccctgtgaatgtgtttgctctcatgaacatgcaatgagaagactgatcaatctgttacggcagtcccagtcctactgcacagacacagagtgtcttcaggaattaccgggaccctctggtgataatggcatcagtgttacaatgatcttggtagcctggatggttattgcattgatcttgttcttactgagacctcctaatctaagaggatccagcctacctggaaagccaaccagtcctcataatggacaagatccaccagctcctcctgtggactaactttgtgatatgggaagtgaaaatagttaacaccttgcacgaccaaacgaacgaagatgaccagagtactcttaaccccattagaactgtttttccttttgtatctgcaatatgggatggtattgttttcatgagcttctagaaatttcacttgcaagtttatttttgcttcctgtgttactgccattcctatttacagtatatttgagtgaatgattatatttttaaaaagttacatggggcttttttggttgtcctaaacttacaaacattccactcattctgtttgtaactgtgattataatttttgtgataatttctggcctgattgaaggaaatttgagaggtctgcatttatatattttaaatagatttgataggtttttaaattgctttttttcataaggtatttataaagttatttggggttgtctgggattgtgtgaaagaaaattagaaccacgctgtatttacatttaccttggtagtttatttgtggatggcagttttctgtagttttggggactgtggtagctcttggattgttttgcaaattacagctgaaatctgtgtcatggattaaactggcttatgtggctagaataggaagagagaaaaaatgaaatggttgtttactaattttatactcccattaaaaatctctaatgttaagaaaaccttaaataaacatgattgatcaatatggcagatgatttacagtccattatatgacatttgtaagccactcaacactagccttacaaggttcatgaaaggaggaaaacattaattctttctgcctttgctgatataatccacatagtaataatttaagctataatttatttttaaaatgagtgcctcttgggaagcttcttttctgttctaacagttccctgttaaaatgaaaatcttaggccagtgcagtggctcacacctgtaatcccagcactttgggaggctgaggtgggtggatcacttgaggtcaggagttcgagaccagcctggccaacatggtgaaaccctgtctctactaaaaatacagaaaaattagccagggttggtgcatgtgcctgtaatcccagctactcaggaggccaaagcaggagaattgcttgaacccgggaggtggaggttgcagtgaaccaagatcgcaccactgcattccagcctaagcaatagagcgagactccctctc

SEQ ID NO: 15316 - DNA, 2110 bp, Homo sapiens
  CDS (808)..(1116)
ataaaaaagtttctccaaatgagctcatcctgggctggtaagttggggaggtgggggctggggttaatggaaggtctcttcgtgattgccggtgtcttttgctactggactggatcttatactcttccttttggaggcaagagtattgcaagtgtattactgactgtgagcagtggctcaatgcctgtaatcccagctgggaggctgaggcaggaggatcacttgagcccagtagttcaagatcagcctgaacaaaatagtgagaccctgtctctacaaaaacattttttaaaaacttagccaggaatttgaagttgcagtgagctatgatcatgccttgccactgcattccagcctgagtgacagagtgcgaccctgtctctaaaaaacaaaaggaaagtgtgttacctgtaggaactgtgaattcagtgggttttgctggtggttctgatcctgtggggccaggatatttcgaattaccttgtaagtgacttggaatttttcatcagcactaagtcagcctttgattttatttgacatagttttcggtgtgtgtattgctcttggcagttggtgtcactaggtgtcctaccgtagaagtgtccggtaccctgaagacacccatgccactgttgtgtttgatattgacgccacatatagacaggagtccaccactgtgttccatttcacaggtacgctacgggccatgacatcacagagcactctgtgctgatccatgagtactacagccgagaggcccccaaccccatccacctcactgtggacacaagtctccagaacggccgcatgagcatcaaagcctacgtcagcactttaatgggagtccctgggaggaccatgggagtgatgttcacgcctctgacagtgaaatacgcgtactacgacactgaacgcatcggagttgacctgatcatgaagacctgctttagccccaacagagtgattggactctcaagtgacttgcagcaagtaggaggggcatcagctcgcatccaggatgccctgagtacagtgttgcaatatgcagaggatgtactggtgagaggggaaagaaaaaacaaagggggaggacatagttctctatcctgggatcactgaggcatgtgctgatgaaatggtagggctcagtggttataattaactgcctcatcgagtctttgttttggtactcagtctggaaaggtgtcagctgacaatactgtgggccgcttcctgatgagcctggttaaccaagtaccgaaaatagttcccgatgactttgagaccatgctcaacagcaacatcaatgtgagtgcccttcctgagccccttcttgcctggtttcttcccccacctcagcacatacactcaaatgtgaaaagagttgggtgaggtgacctggagtaggatagagacagggcttcacctatagccccactgaagtccaggttgggaggaaggaagaggtgtgttatgcgtggttggagacttccttccttctcccatgattccattgtctcatttactgctgatactactgtgacttactgtctaaattcgtgatggaaagaaacactaaaattcagaggttaatgaaaatgcaattacttatttcccccatctgagttcacagaccccctatattccatccatgggtttcagctaaggcacccctagtctataagtgtatcagtagagataagaaagccttctcaagcatttcctttctgtcttctacctttttgacttttattcagtctctcctagctgtcatttatccacagctgtcctcatacccagtgtctaccatagagctggccaaagccagcctttttgctccctttccacccaaccccccactcattgtgtattctttgtcttccaggaccttttgatggtgacctacctggccaacctcacacagtcacagattgcactcaatgaaaaacttgtaaacctgtgaatggaccccaagcagtacacttgctggtctaggtattaaccccaggactcagaagtgaaggagaaatgggttttttgtggtcttgagtcacactgagatagtcagttgtgtgtgactctaataaacggagcctaccttttgtaaatt

SEQ ID NO: 15317 - protein, 103 aa, Homo sapiens
MSIKAYVSTLMGVPGRTMGVMFTPLTVKYAYYDTERIGVDLIMKTCFSPNRVIGLSSDLQQVGGASARIQDALSTVLQYAEDVLVRGERKNKGGGHSSLSWDH

SEQ ID NO: 15318 - DNA, 1734 bp, Homo sapiens
attagatatgacccacctgaataacctcacatactcttcctatctcaaaactcttaacttaatcctatctgcaaagtccgttttgtcatatacagtagcatgttcataggtttcaagcatttggacatggtcctctttgggaggcattacgctgcctgtgacagtgctcttctgatacattttcagtgatcttctagacataacaatcctggtcctgggaacatgcatggcggggacctaaataagtctattttttaagaggccctaccctttgcatagatcctaatcttggggtaaaggaaagtttgagatttcactccacctttttttttggtgctggtatttccactgtgggaaagatcattcggatttaacaaccacatgaagctcctggattatctggggcatgtttgctgattcccaaggaagcttgatctttttgatggagcacttgagctggtaagttattagaagctgagctataattttccttggcattggtcatttttgtctaatcttttatttttttgttttttttgttttgttttgttttgttttgagatggagtctcactgtgtcccccaggctggagtgcagtggtgcgatctcggctcactgcaacctccgcctcctgggttcaagcaattctcctccctaagccttcagagtagctgggactacaggcgtgcaccaccatgcccgggtaactttttgtattttcagtagagacagggtttcaccatgctggccaggctgatctcgaactcctgaccttgtgatccacccacctcagcctccaaaagtgctaggattacaggcatgagccaccgcgcctggcctgtctaatcttttatttaatgcatctaggctcctcctttcttccttcatggtttcctttttcctacttccctatctcgttttctttccttcttttcatttacagagaaatggtgttagaaatgaatgagaggagtgagcaaagaaagatgagggaaaaatagatgtgttaaggagtatacgcataaagaaaagaggccaggaggaaaagctgttcaccccgactcccatcctaatcttgcgtagtctttcgtttcctgagaatagttaggtcagaagttacagtagaaactttcatggaatacacaaaagggaattaagtaaggaaacttgtgaccgatgctatgggaaaggacatgtttgtcaaagcaataggttcttcctgagttagagaacaattatggttcccccatggaaatgtttatctgacgcaatgagaaccaggtcagacacaattcagaaatgaaatgaataaaattattctaagatctagatgggaggagacataagggattgtgttttgatagtcttaagggtgcacttacatttacatccccaaattccctcttccatgaaccactgcgcactgtacattgccacattaatgctaactgtgccaattagattaactaatattggtcaaaaaagaatatcctggccgggcgcagtggctcacgcctgtaatcccagcgctttgggaggccgaggcgggtcacggtgaaaccccgtctctactaaaaatacaacaattagctgggcgtggtggtgggcacctgtaatcccagctacttgggaggctgagacaggagaatcgcttgaacccgtgaggcggaggttgcagtgagccaagatcacaccactgtgttccagccctagcgacagagtgagactcttatc

SEQ ID NO: 15319 - DNA, 1607 bp, Homo sapiens
  CDS (20)..(946)
gtgctcagcggcagccactatggaggccgccaggaccgctgtactccgggtgaagcggaagcgcagtgcggagccggcggaggctcttgtgctcgcttgtaaacgcctccggagcgacgcggtcgagtcagcggcacagaagacgtcggaggatttggagagagcggcggagaataatgtcttccacttggtggccactgtgtgctcccaggaggaaccagtccagcctctcctgcgggaagttctgcgcctgtcacgggacagccagcagcgtgtccgccgtaatctccgcgcctcggctcgggaggtccggcaggagggccgctaccgggtgctttccagccgccgatccttggggaccacctcgagcggccaggagtccgagtacacgccggggaacccagaagccgccgggaactcgggctttcagttgttagaccttgtccacgaggagggagaacctgaagccgcctctgcaggctcctgcaaaacatctgacccagatgtgatcctctgcaattctgtagagttgatccgtgagcgattgactgtgtctgaggatggaccaggagtcaggcgccaggaagaacaaaaacacgatgactatgtgtatgacatttactacttggagacggccactccaggctggattgagaacatcctctccgtgcagccctacagccaagaatgggagctggtgaatgatgatcaagaaccagaggacatttacgacgatgaagatgacgagaacagtgagaataactggcgcaatgagtacccagaggaggagagcagtgatggagatgaggattccagaggctctgctgactacaacagcctgagtgaggaggaaagaggcagcagcagacagcggatgtggagcaagtaccctctggatgtgcagaaggagttcggctatgacagcccccacgacctggattcagactgatggtcttgtgatgtccatgaggttctgccacatgcccttgagggctctgagtccagagttaactgccctgctgacatcctgttaggtttcctagcttaacatgtggaaggaaaagcatatcaagcatatcgggcggcaccatcccaccacagtgaaaacttatgttaggggagtgagtcttttccacttacagtaggacccctttgcctcaatcaaaagtgaccctacagtttgaaagaaaaaaaaacgttgaaaaaaggaaggtttctttagctttagcttcttggcccaggaatttttcctggcattcaggttctgtgctgaaaccacaagggagggggaggttcccatttcattagcagtaagcttctgctgtgccataccaccaggctgcctgcctctaggaaaaccctgttccttttgatagaatctaaaaggggtaccagtgggtcccttgtagcaatacagactggatagtaatggccattagggcagaaagtagtctgagcagtgggagattttagttaacagctatttctgcttccaaactctgataacggttgtgaaattactgactgacttcctttggcagtggggccaagaaacaatatatatgaatgtgatacatgtgtttagtaaaatctagctttgaacatgg

SEQ ID NO: 15320 - protein, 309 aa, Homo sapiens
MEAARTAVLRVKRKRSAEPAEALVLACKRLRSDAVESAAQKTSEDLERAAENNVFHLVATVCSQEEPVQPLLREVLRLSRDSQQRVRRNLRASAREVRQEGRYRVLSSRRSLGTTSSGQESEYTPGNPEAAGNSGFQLLDLVHEEGEPEAASAGSCKTSDPDVILCNSVELIRERLTVSEDGPGVRRQEEQKHDDYVYDIYYLETATPGWIENILSVQPYSQEWELVNDDQEPEDIYDDEDDENSENNWRNEYPEEESSDGDEDSRGSADYNSLSEEERGSSRQRMWSKYPLDVQKEFGYDSPHDLDSD

SEQ ID NO: 15321 - DNA, 1862 bp, Homo sapiens
  CDS (31)..(972)
gctggcgggcggccgggtggcggcggcggcatggcggagccgagcggggccgagacgaggccccccattcgggtcaccgtcaagacccccaaggacaaggaggaaattgtgatctgcgatcgagcctcggtcaaggagttcaaagaggaaatctcccggaggtttaaggctcagcaggatcagctggtcctgatcttcgcaggcaagatcctcaaggatggggacacactgaaccagcacggaatcaaggacgggctcactgtccatctggtcatcaagacccctcagaaggctcaagatccagctgctgccactgcttcttccccctccacacctgaccctgcctcagcaccctccaccacgcctgcttcacccgccacccctgcccagccctccacctctggcagtgcctcttcagatgctggcagtggaagccggaggagcagtggtggggggccctctccgggggctggggagggatcccccagtgctactgcgtccatactctctggctttgggggcatcctggggctgggcagcctaggcctgggctctgctaacttcatggagctgcagcagcagatgcagcggcagctgatgtccaatcctgagatgctgtcacagatcatggagaaccccctggtccaggatatgatgtctaaccctgatctgatgcgtcacatgattatggccaacccccagatgcagcagttgatggagcggaaccctgagatcagccacatgctcaataaccctgaactcatgaggcagacaatggagcttgctcggaatccagccatgatgcaagagatgatgcggaaccaggaccctgaatctctgctcagggctgactcgtgggcagagaaggaagaatgtggggaacaacctgccctccactccaaccctccacagccatactgtatgactgtaacctacttttatttatgttttaagacatacagggcatcacactgaaaaggagctgtgatctgagggtcaggagtgtgggcctgggtaccagcactgccactgacttgcctctctctcagccttagttgccccttcactgaagacctttccagctttggtgatctacgattctatcacagcaagcaacaggaagacagagcatcatgctaggcacataagaagcttttaaaatactggttaaattgagatcaccacaccaggggaatagtgtccaagtcatgctccagctcctttcccctcttagggatcttggactagaaaaggccaaactttgtttatttcttaaaacttgaatctgagttcacagaaagtaagtgctgtactttattgactacctcttccacaggagaacccagcacaggtcacagtggcttatcctgtaatcctagcactttgggaggctgaggtgggcagatcacctgaggtcaggagtttgagaccagcctggccaacatggcgaaaccccatctctactaaaaatacaaaaaaaggctgggcgtggtggctcacgcttctaatcccagcactttgggaggccaaagcagacggatcacctgaggtcaggagttcaagaccagcctggccaacatggcgaaaccttgtctctactaaaatataaaaaattagctgggggaagccgaggtgggtggatcacaaggtcaggagatggagaccatcctggctaacatggtgaaaccccgtctctactaaaaatacaaaaaattagccaggcgtggtagtaggtgcctatagtcccagctacttgggaggctgaggcaggagaatggcgtgaacctggaaggcggagtttgcagtgagccaagatcgtgccactgcactccagcctgtgtgacagagtgagactccgtctc

SEQ ID NO: 15322 - protein, 314 aa, Homo sapiens
MAEPSGAETRPPIRVTVKTPKDKEEIVICDRASVKEFKEEISRRFKAQQDQLVLIFAGKILKDGDTLNQHGIKDGLTVHLVIKTPQKAQDPAAATASSPSTPDPASAPSTTPASPATPAQPSTSGSASSDAGSGSRRSSGGGPSPGAGEGSPSATASILSGFGGILGLGSLGLGSANFMELQQQMQRQLMSNPEMLSQIMENPLVQDMMSNPDLMRHMIMANPQMQQLMERNPEISHMLNNPELMRQTMELARNPAMMQEMMRNQDPESLLRADSWAEKEECGEQPALHSNPPQPYCMTVTYFYLCFKTYRASH

SEQ ID NO: 15323 - DNA, 1780 bp, Homo sapiens
  CDS (42)..(560)
agcggaaaaccaattggtttaaaagaagagccagtaagttcatgactcacgtggcctcccagtttgcctccagctatgtgttttattggcgggattactttgaggaccagccccttctgtatcccccaggctttgacggaagagtcgtggtgtatcccagcaaccagactttaaaggactacctcagctggcgacaagcagattgtcacatcaataatctttataatacagttttctgggcacttatacaacaatctggactaacaccagtacaagcccaagggagattacagggaactcttgcagcagacaagaatgagattttgttttctgaattcaacatcaactataataatgagctgccgatgtataggaaagggactgtgttgatatggcagaaggtggatgaagtgatgacaaaagaaattaagctgccaacagaaatggaaggaaaaaagatggcagtgacccggaccaggacaaagccagtgcccttgcactgcgatatcatcggggatgctttctggaaggaacatccagagattctagatgaagacagctgacccttttgcgcttcagttctggtgtgcttaaccatgcaagccctcccacctcccaggacactggtgcgaatgacacaactcaagttgggaggggaacagggaaggaagggatggatgggggtggtgtatcttactctgtttaagcagaacaccttgtttgcggtgttggaacatggttcctttggcagaagtgctttttttttaatcgcagtactatttttataaagcaagaactattccatgccttggagaatgaatcatttttagattgtgacataaatcttgtaaaaacctgtcagttattttcatctatgagagaagaggagcccaaactctcgcccacctgttcttaaccagaaaacccactgactttgaaaatctcacctctgccacccatctacttgcattcgtctttggcagacctcaagataaatatgggttaatgcctgcatgatgcctctgaattcaggaattgcagggaaaactcggggctttgtgccagtctctaagttggcaactttggctgaacaaatgagtagtggcttcagtgtccttgcgtacacattctgtggattgatttaatggagttgtcagcatgatcatcatcttctagccaggggcatagttgccaaggccatttacctctttctaagaagaaacagaattatgtgtatatatgagagaaagaaacaagaatgcgtgaatgaggatgaagaaacatttaccccatgtactcaagacatttcagttttaaaagtcactttcctattagacttcttgaaaaacattctcacatagcctctatgtaatcagacaaatgacatttgatttcaagggcagaggggtaaacatcctctgctaatcgacaggtagcaggtgtcagaggaggcataatattaatagcgccaccttctgttgggtcagtggagatgggtgaggaacagcacagagcagcagggatcatcacatgcagccaaacttggcctctgaagggggaaggtagtgggaataggtggtgagagaactcacatttttctcttgtcctggttttatatttcggagggaaaggattatttggccccattaagaattaagaggctgggtgcggtggctcacgtctgtaatcccagcaccttgggaggcccaggcaggcagatcacctgaggtcgggagttcgagaccagcgtgaccaacgtggagaaacccccgtctctact

SEQ ID NO: 15324 - protein, 173 aa, Homo sapiens
MTHVASQFASSYVFYWRDYFEDQPLLYPPGFDGRVVVYPSNQTLKDYLSWRQADCHINNLYNTVFWALIQQSGLTPVQAQGRLQGTLAADKNEILFSEFNINYNNELPMYRKGTVLIWQKVDEVMTKEIKLPTEMEGKKMAVTRTRTKPVPLHCDIIGDAFWKEHPEILDEDS

SEQ ID NO: 15325 - DNA, 1984 bp, Homo sapiens
  CDS (63)..(896)
ttgcgcctgcgcagtgcatcaccgcaggcgggcctcgcgggtccgggagcgcggcggagacgatgcctgagatcagagtcacgcccttgggggccggccaggacgtgggccgaagctgcatcctggtctccattgcgggcaagaatgtcatgctggactgtggaatgcacatgggcttcaatgacgaccgacgcttccctgacttctcctacatcacccagaacggccgcctaacagacttcctggactgtgtgatcattagccacttccacctggaccactgcggggcactcccctacttcagcgagatggtgggctacgacggccccatctacatgactcaccccacccaggccatctgccccatcttgctggaggactaccgcaagatcgccgtagacaagaagggcgaggccaacttcttcacctcccagatgatcaaagactgcatgaagaaggtggtggctgtccacctccaccagacggtccagattaaagtgggctcagagtctgtggtctacacgggtgattataacatgaccccagaccgacacttaggagctgcctggattgacaagtgccgccccaacctgctcatcacagagtccacgtacgccacgaccatccgtgactccaagcgctgccgggagcgagacttcctgaagaaagtccacgagaccgtggagcgtggtgggaaggtgctgatacctgtgttcgcgctgggccgcgcccaggagcatctgcatcctcctggagaccttctgggagcgcatgaacctgaaggtgcccatctacttctccacggggctgaccgagaaggccaaccactactacaagctgttcatcccctggaccaaccagaagatccgcaagactttcgtgcagaggaacatgtttgagttcaagcacatcaaggccttcgaccgggcttttgctgacaacccaggaccgatggttgtgtttgccacgccaggaatgctgcacgctgggcagtccctgcagatcttccggaaatgggccggaaacgaaaagaacatggtcatcatgcccggctactgcgtgcagggcaccgtcggccacaagatcctcagcgggcagcggaagctcgagatggaggggcggcaggtgctggaggtcaagatgcaggtggagtacatgtcattcagcgcacacgcggacgccaagggcatcatgcagctggtgggccaggcagagccggagagcgtgctgctggtgcatggcgaggccaagaagatggagttcctgaagcagaagatcgagcaggagctccgggtcaactgctacatgccggccaatggcgagacggtgacgctgcccacaagccccagcatccccgtaggcatctcgctggggctgctgaagcgggagatggcgcaggggctgctccctgaggccaagaagcctcggctcctgcacggcaccctgatcatgaaggacagcaacttccggctggtgtcctcagagcaagccctcaaagagctgggtctggctgagcaccagctgcgcttcacctgccgcgtgcacctgcatgacacacgcaaggagcaggagacggcattgcgcgtctacagccacctcaagagcgtcctgaaggaccactgtgtgcagcacctcccagacggctctgtgactgtggagtccgtcctcctccaggccgccgccccttctgaggacccaggcaccaaggtgctgctggtctcctggacctaccaggacgaggagctggggagcttcctcacatctctgctgaagaagggcctcccccaggcccccagctgaggccggcaactcacccagccgccacctctgccctctcccatccctggggacagaggccttgtgtcacctgcctgcccaggcagctgtttgcagctgaagaaacaaactggtctccaggctgtcttgcctttattcctggttagggcaggtggtcctagacagcagtttccagtaaaagctgaac

SEQ ID NO: 15326 - protein, 278 aa, Homo sapiens
MPEIRVTPLGAGQDVGRSCILVSIAGKNVMLDCGMHMGFNDDRRFPDFSYITQNGRLTDFLDCVIISHFHLDHCGALPYFSEMVGYDGPIYMTHPTQAICPILLEDYRKIAVDKKGEANFFTSQMIKDCMKKVVAVHLHQTVQIKVGSESVVYTGDYNMTPDRHLGAAWIDKCRPNLLITESTYATTIRDSKRCRERDFLKKVHETVERGGKVLIPVFALGRAQEHLHPPGDLLGAHEPEGAHLLLHGADREGQPLLQAVHPLDQPEDPQDFRAEEHV

SEQ ID NO: 15327 - DNA, 1836 bp, Homo sapiens
  CDS (283)..(732)
cacttaacacactcttgatgacatatggcaggttcttggtattgacacccgtgtggctgcaggtggcatgaatcatgcatggcttgtctggatctgtcttctgcagagcccattctctctgtcttttgctagtctggactggagagcaacttccctgagtcaggactcttgctgctaattgcagaaaaccagcagtctctgtgaagttgtggtgttctcagagttcagctgtaaaatatagaatcctcattaattgtatttacaactatattgagcaaaccaatgttgttctttattaatgtacagaccaaaaaagacacctcaaaagaaaggacgtacgcgtttcttgtaaacacgaggcaccccaagataagaagacagatagagcaagggatggacatggtcatctcctcagtgattggagaaagttaccggcttcagtttgattttcaagaggcagtgaagaatttcttccccccaggaaatgaagtggttaatggagaaaatttaagctttgcatatgaattcaaagctgatgcattatttgatttcttctattggtttgggctcagtaattccgttgtaaaagtaaatggaaaagttcttttaggttcaatagatgatgtttttaactgcaatctgtcacccagatcatctctgacagagcctcttttggcagaattaccatttccaagtgttctggaatctgaagagacacccaaccaatttatctgattgaactgaacattgtagcagttgctcccgcactccaggcctgtgctagactataggctggggggagggtaggaggtgggaggcagatacttccacctgcgtgtcaatctccggctcctccatggcttctatggaggactcctctcttctgcttctgtggatgtgatgccctggcaggcccagggcagctgattcccctaaaacttatgattaccaggatggaaaggccttggtcccatggcactgggtggggctgggggatattctctactttgaacacttctcccaagaggcagaagggccacagagttctgccaccctgaacatttttctcagttccctgggagtttttgtggcagcctttgtgggagtggtctgactggctgttgacctagcatgcttcataaatcagggtttggccctctgcttggagcatccaaccccttgaactcaaacctgtcgagcaaggggttaagagttctgttctcttgccaacctggctgggcaaaagcctgtgccatctttcactgggaggcaaatatgtttttcatcctgccatatgacacctatgagaaacgttcacagtgaggagtagccaggttgctaggacagtaaccctgccacacactgcctgaaatcggaactcccttggcctccctcttaactaagtgacccatgtagaaggaagccaggagatatggtaccgaacaatgacaggggaagggtattggacacggcagcgtcctccttattgaaaacacattatgtcagttgggaattttaaataagcttttagcaaacctaacactaaaagcaaaatagaagaaagctataccattaccataatacatttttcatctcatggctacaatggaattcttgaaaaggaaaaaaaaatcctatctacatataaaaacctgcatgaatgaatcactacatatgcttataatgaggaagagttatgggtcctgagtgtaattttttatcctttcttaaaaagtttctgtattatgcattttgataacactactgatgatccttccacttacatttgaaatgttatgtaccacatttgcacaattaaaacttttcttagcattc

SEQ ID NO: 15328 - protein, 150 aa, Homo sapiens
MLFFINVQTKKDTSKERTYAFLVNTRHPKIRRQIEQGMDMVISSVIGESYRLQFDFQEAVKNFFPPGNEVVNGENLSFAYEFKADALFDFFYWFGLSNSVVKVNGKVLLGSIDDVFNCNLSPRSSLTEPLLAELPFPSVLESEETPNQFI

SEQ ID NO: 15329 - DNA, 2221 bp, Homo sapiens
  CDS (80)..(820)
cttggctcgctgcgcctctgcctcccaggttcaagagattcttctgcctcagcctcctaagtagctgggattacaggaaatgagaacagaagccattgccagacctctggaaataaacgagactgaaaaagtgatgagaattgcaataaaagagattttgacacaggttcagaagactaaagacctgctcaataatgtggcctctgatgaagctaatttagaagccaaaatcgaaaagagaaaattagaactggaaagaaatcggaagcgactagagactctgcagagtgtcaggccatgttttatggatgagtatgagaagactgaggaagaattacaaaagcagtatgacacttatctggagaaatttcaaaatctgacttatctggaacaacagcttgaagaccatcataggatggagcaagaaaggtttgaggaagctaaaaacactctctgcctgatacagaacaagctcaaggaggaagagaagcgcctgctcaagagtggaagtaacgatgactcggacatagacatccaggaggacgatgaatccgacagtgagttggaagaaaggcggctgcccaagccacagacagccatggagatgctcatgcaaggaagacctggcaaacgcattgtgggcacgatgcaaggtggagactccgatgacaatgaggactcggaggagagtgaaattgacatggaagatgatgatgacgaggatgacgatttggaagacgagagcatttctctctcaccaaccaagcccaatcgaagggtccggaaatctgaacccctggatgagagtgacaatgacttctgacccttttgccaagggaccctggcagattaaaaccctcagacttgtaggtaaatgggaacttagaaggttaggaaggtaacccctgttttgtttactaagctggctggactcatgatcactgaagcaatacttatttctgctttagcctcctatgtttgcattccatgaagcttaaataagaattgaagcaaatccctaagatttatttttttccaccttatttatcttctaaaacttgaggaatgcatgtgttcttagtgattcacatccacgggacaaaaactcaagaagaaataagagctgacgccacacaagtcttggctgcttttgttactatacattttctctgagactccagcagagttggggctggaacttggcactggggactcatgtttggaatcgtaggggaacatctggctgttaatcacttgcacagttgagaacatttcctatacatcggcttttaattctagctcttatttcattttgtaatcttattttctttcgtctgcatgttcacaataccaagcattaaatgtattttaataactaaacttttctgaaagaaggttagctaaagttaaatgaaaacttggtttctttgaaaatcaggcaatagagacaggctccagatgaggaatcctccattttctgtccgaagctgacattcctctggcagtccagttcaccttggattacagccaccttcatgtttccacggttggtactaaatctggaaactctggtgacctgggctgccctctcagaaactccagactcccatggcaatgacagccgggacacttttcttccctccagccagggtttctctaaaggagctttgttttgtctaaagtgtggcaagacatagtgcacaacacagggacaaaggcaggtttcctgcagctcgctacctaagtgtttctgtaggggaaggagccaattaagaaaaagtgttggtacagattcatgtttctgatttaaaaaaacaacaacacaggattgaattaagtagagtaatagcactagaagaatttttctgttgtgaaattagaagtggagttggtttttttcttttttcttcttctttttttttaatatgaaaagtacttagctgggagtggtggcaagcgcccttgggtccagctactcaggaggccaaggtgggaggatcacttgagcccaggagttttagactagcctggacaactaagtgagactccatctctacaaaaaatttaaaaattagccaggtgtggaggggcatgcctgtggtctcagctattcaggaggctgaggcaggagaatcacttgagaccaggaagttgaggctgcaatgagccgtgatcatgccactgcactccagcctgggtgacagagtgagaccctgtcttt

SEQ ID NO: 15330 - protein, 247 aa, Homo sapiens
MRTEAIARPLEINETEKVMRIAIKEILTQVQKTKDLLNNVASDEANLEAKIEKRKLELERNRKRLETLQSVRPCFMDEYEKTEEELQKQYDTYLEKFQNLTYLEQQLEDHHRMEQERFEEAKNTLCLIQNKLKEEEKRLLKSGSNDDSDIDIQEDDESDSELEERRLPKPQTAMEMLMQGRPGKRIVGTMQGGDSDDNEDSEESEIDMEDDDDEDDDLEDESISLSPTKPNRRVRKSEPLDESDNDF

SEQ ID NO: 15331 - DNA, 2179 bp, Homo sapiens
  CDS (91)..(2178)
ttattcaggcaccctaatgggcagattgtccagcttctacctttgcatcagcttcgaggctctaatacccagcccaacttacagcctgtcatgtttcggaacccagggtctgtgatgggaatccggttacctgctccttccaaaccctctgagactccgccatcttccacttcgtcctctgctttctctgtcatgaatcctgtaattcaagctgttgggtcttcttcagcagtgaatgttatcactcaggcaccatcattgctttcctctggagctagttttgtgtctcaggctggtacattgaccctgaggatttctcctcctgaaccacaaagctttgcaagtaaaacaggctctgaaaccaaaataacttatagctcaggaggacagcctgttggtacagccagtcttattcctctccagtctggtagttttgccttgttacagctcccaggacaaaagcctgttcctagctccattcttcagcatgttgcttcccttcagatgaaaagagaatctcagaatccagaccagaaagatgaaacaaactcaataaaaagagagcaagaaacgaagaaggttctacagtcagaaggagaggctgtagaccctgaggctaatgtaataaaacaaaactcaggagctgctacctcagaagaaactctgaatgattccttggaagataggggtgatcatttggatgaagaatgccttccagaagaaggttgtgcaactgtcaaaccatctgagcattcctgtatcactgggtcacatacagatcaagattataaagatgttaatgaagaatatggggctaggaatcgtaagagttccaaagaaaaagtggctgttctggaagttaggaccatttctgaaaaagccagtaataagacagtccaaaatttaagtaaagtacagcatcaaaaacttggtgatgtgaaggtggaacagcagaaaggatttgacaatccagaagaaaactcaagtgaatttccagtcacctttaaggaagaaagtaaatttgaattgtcaggaagcaaagttatggagcagcaatctaatctacagccagaggccaaagagaaggaatgtggagactctctggagaaagacagggaaagatggagaaaacatctgaagggccccttaaccaggaaatgtgttggagcttcacaggaatgtaagaaagaggcagacgagcagttaattaaagaaacaaagacatgtcaggaaaattcagatgtgtttcagcaagaacaaggcatctctgacttacttggaaaaagtggaactgaagatgccagagttttgaaaactgaatgtgattcttggagtaggatttctaatccttcagccttctccattgttcctaggagagctgcaaaaagcagcagagggaatggacattttcagggtcacttactgctacctggagaacagatacaaccaaagcaagagaagaagggtgggagaagcagtgctgacttcactgttttggatttggaagaagatgatgaagatgataatgagaaaactgatgattctattgatgaaattgtggatgttgtttctgactaccagagtgaggaggttgatgatgtagaaaagaataactgtgtagaatacattgaggatgatgaggagcacgtggacattgagactgtagaagagctctcagaggaaattaatgttactcacctgaagaccacagcggcccacacacagtcattcaaacagccgtcctgtactcacatctctgcagatgaaaaagcagctgaaaggagtcgaaaggctccaccaattcctctaaaactgaagcctgattactggagtgacaaactacagaaagaagcagaagcgtttgcttattatcgccggacacacactgccaatgagcggcggcggcgtggtgaaatgagggatctctttgagaaattaaagatcacattgggattacttcattcttccaaggtttccaaaagtctcattcttactcgagccttcagtgaaattcagggactaacagatcaggcagacaaattgataggacagaaaaatctcctgactcgaaaacggaatattctgatacggaaagtatcgtctctttcaggtaagacagaagaagtggtcctgaagaagctagagtatatttatgcaaaacagcaagcactagaggcac

SEQ ID NO: 15332 - protein, 696 aa, Homo sapiens
MFRNPGSVMGIRLPAPSKPSETPPSSTSSSAFSVMNPVIQAVGSSSAVNVITQAPSLLSSGASFVSQAGTLTLRISPPEPQSFASKTGSETKITYSSGGQPVGTASLIPLQSGSFALLQLPGQKPVPSSILQHVASLQMKRESQNPDQKDETNSIKREQETKKVLQSEGEAVDPEANVIKQNSGAATSEETLNDSLEDRGDHLDEECLPEEGCATVKPSEHSCITGSHTDQDYKDVNEEYGARNRKSSKEKVAVLEVRTISEKASNKTVQNLSKVQHQKLGDVKVEQQKGFDNPEENSSEFPVTFKEESKFELSGSKVMEQQSNLQPEAKEKECGDSLEKDRERWRKHLKGPLTRKCVGASQECKKEADEQLIKETKTCQENSDVFQQEQGISDLLGKSGTEDARVLKTECDSWSRISNPSAFSIVPRRAAKSSRGNGHFQGHLLLPGEQIQPKQEKKGGRSSADFTVLDLEEDDEDDNEKTDDSIDEIVDVVSDYQSEEVDDVEKNNCVEYIEDDEEHVDIETVEELSEEINVTHLKTTAAHTQSFKQPSCTHISADEKAAERSRKAPPIPLKLKPDYWSDKLQKEAEAFAYYRRTHTANERRRRGEMRDLFEKLKITLGLLHSSKVSKSLILTRAFSEIQGLTDQADKLIGQKNLLTRKRNILIRKVSSLSGKTEEVVLKKLEYIYAKQQALEA

SEQ ID NO: 15333 - DNA, 1987 bp, Homo sapiens
atgctataatgtctgaacagccactgcacttgggcaacatagcaagaccctgtctcttaaaaaaacagtctccatttatatagcattcaggaataggaaaaactacagggaaggcaaacacatcaatggcctcctgagctgggaatgggagttaattacaaagggacatgagggaatttttaggggtggtgtgacttcaatatcttgactgctgatgattgattgattacatgtttgacagaactcacagaactctacacttacgaaggaaaaaaagttttgtttttctagcttaaccaaagtggtaccaaacctttaaaatatcaagcttagaagaagggctagaacatgtccatattttacctcattagaaataaagaataggatgttgaaaatggtttgtgctttaagaagactgaaccaagctagtagctcggatttgggtgtccaccacctcaccttccaggcttataactggtaattctgctcaagaatctgtcctcagtgttttcaacatcgagaattaatttgagacaaactacatctagttcataaacaaagctagaattaaaaaggattcctgtcacaggccaaaactagtctacaaaccctcagggtggccaattcttgcttttaacaacagccaaagatattaaagaattccatgaatacagagatggatttttaaaaatacaagtatatataatactaaaaccctcaggaaagccaacatcttgaggtactctggctccagaagaatccatttctgtgggccatattccaagatctaagaggtgtatctgtttgactttactgagtggcttttcacctgacagaccagacaaacttaaaagctttcaagtcaaactttggtaggcaaaggtaaagtatgtcttttgttttagagtaggtgagcctgcaggtcaatttgtcaaaaatattaactaaccacaactatgagacactacacacagtgtagttcctgccttcatggggctcagttctgttcactggagtgggttttatatatacccaataaatagaagtgtgactggcctgtccaatctcgaagtcagaaaagggccatgggtagcatcacatccttagagactggatgcagtcaccagactttgaggaaagagggaaattcatcccaacctgtcatgctagctaagagagcaaaaagtcaagaatatgaacaatgtgacctaggctctgaaagctgaccaagacaccatctaaataaacctggactgacaatgaaaggactttcgttctcccttaaaataatgttcaaaatagcaaggaaatagagcttcagatctgtcttgtgtcacctggtctttcatgtgacagtcaaagatccacaatgtgaaagtgggattaacccatctgtgaagttctagtctgtgcagtcacaattgaccactgcaggttttaacaagaggaccctgtggggacacaacagacttcaattctttagccagcttttccttggctcagaatatggagagagctggaggccctccaaaccagaggatgttcgctggtcttcccaggagagaaatgaactatcttttgtaaaagtaagtttcaaaggccaagtgtagtggctcatgcctgtaatcccagcactttgggaggccaaggcaggtggataacttgaggtcaggagttcaaaaccagcttggcaaacatggtgagatcctgtgtctactaaaaatacaaaaaaaaattagccaggcatactggtacatgcctgtaatcccagctacttgggaagctgaggtatgagaactgcttgaatccaagaggcggaggttgcagtgagccgagatcgagccactacgctccagcctgggtgacagagtgagactctgcctcaaaaaaaaaaaaaaaaaaggaagttgcaaaacagtaaaggaactctcaacccctgcattacatgattaggacaacaaatagaaaagtaataaagtttacgatc

SEQ ID NO: 15334 - DNA, 1614 bp, Homo sapiens
  CDS (635)..(1165)
agtacacacgcacctgagtgagtggcaccagaggaccctctccatgtttagggacctcctgggcctcaggagcgtggcgcccgcccctgggcggactccccccatccgcgggcgcggatggtccgggccgcgtccgcagtgctgctggctgctccctggttgctgggtgcaaagtgctgggttctgggtttctggattcgcgggccgttcacacgtagcctgtgccggctcctcgggtgagtccgtccgcgcgcggtgccccgggacggcctaggctgccgggggtccggggccccaggcattccgggctgcagattgacggggatcccggatgcaccgcgcgcccccgcgccctcaccgacgggtccagacctggtgggaagaaggtgcggggacgggtccctgaggatcccgatgcctacgagccaagatgctcagctttataggtgtgacctacacatgtgacttcacctcagttttgtgatccgtaaaatggacaaattcgaagctacttcacagtgctgttgagaggattaaatgaaacaatgcttgtaaagctctttgcaggagggagcctcggaagcagggcctggccggcagagcacacctgctgtcaccagggaccacaggcagcatgaagacccccgtggagctggccgtcagtgggatgcagaccctcggccttcagcaccgctgccgaggtggctaccgggtcaaggccaggacgtcatatgtggatgagactctgtttggcagcccagcaggcacccggcctaccccaccggacttcgatccgccctgggtggagaaggctaacagaaccagaggcgtgggcaaggaggcatcgaaggccttgggggcaaaggggagctgtgagaccaccccctcaaggggcagcacccccaccctcacaccaaggaagaagaacaaatacagacccatcagccacaccccgtcttactgtgatgagtcgctgtttggctcccgatctgaaggcgccagcttcggggccccgcggatggcgaagggggatgccgcaaagctccgtgctctcttgtggacgccaccacctacccccaggggtagccactcgccccgccccagggaggcaccagtgccccccacacaaatgggcctcaggatctcaggccttccacgtcaggggtgaccttccggagccccctggtgacttccagggctcgctcagttagcatttcagtgccatctaccccacgacgaggtggggccacccagaaaccaaagcccccttggaaatgatactctttcatcagggttgcctatggggccacggcgacaggtatggccccttgccagggtaggaggacattcatcacccagggaaccccaggtattaaagaagcccctgtgggggcagacagacatagcaggggtgggcagtgcctccctttatcctgacaatctctagtcgattcttgcctttttctcccgattgcggatttgggggccacctctaagatgcctctctccagccctgtctcaaccatactccaaattagtgccaacccaggggcctggcacctcccacatcatccattgtcttgctgccaagtgcgaataaacggcgtgattgcc

SEQ ID NO: 15335 - protein, 177 aa, Homo sapiens
MKTPVELAVSGMQTLGLQHRCRGGYRVKARTSYVDETLFGSPAGTRPTPPDFDPPWVEKANRTRGVGKEASKALGAKGSCETTPSRGSTPTLTPRKKNKYRPISHTPSYCDESLFGSRSEGASFGAPRMAKGDAAKLRALLWTPPPTPRGSHSPRPREAPVPPTQMGLRISGLPRQG

SEQ ID NO: 15336 - DNA, 2587 bp, Homo sapiens
  CDS (139)..(1257)
ctgcacaagggcgccaagcgcaagggcatcaagtcgtccattggccgcctgtttgggaagaaggagaagggcaggctgatccagctgagtcgggatggagccacaggccatgttctgctaacagactccgaattcagtatgcaggagcctatggtgcctgccaagctggggacccaggcagagaaggaccggcggctaaagaagaaacaccagctgcttgaagatgcccgcaggaaaggaatgccctttgcccagtgggatggtcctactgtggtctcctggttggagctctgggtggggatgcctgcctggtatgtggcagcctgccgggccaacgtcaagagtggtgccatcatgtccgctctgtcggacacagagatccagcgggagatcggcatcagcaatgccctgcaccggctcaagctccgcctggccattcaggagatggtgtcattgaccagcccctctgccccacccacctccaggacttcttctgggaatgtctgggtcacccatgaagagatggaaactctggaaacatctactaaaacaaccctggcctatggggacatgaaccatgagtggattgggaatgaatggctacccagcctggggctcccgcagtaccgcagctacttcatggagtgcctggtggacgcccgcatgctggaccacctcaccaagaaggacctgcgggtccacctgaagatggtggacagcttccatcgaaccagtcttcagtatggcatcatgtgtctgaagaggctgaattatgaccggaaggagctggagaagaggcgagaggagagccagcatgagatcaaggatgtgttagtctggaccaacgaccaggtggttcattgggtccagtctattgggctccgggactacgcaggaaacctgcatgagagtggtgtgcatggagccttgctggccctggacgagaacttcgaccacaacacactggccctgatcctccagatccccacacagaacacccaggcacgccaagtgatggaaagagagttcaataacctgttggccttgggcacagaccggaagctggatgacggggatgacaaggtgtttcgccgcgcgccctcctggaggaagcgcttccggccgcgggagcaccacggtcgcggcggcatgctcagcgcttccgcggagaccctcccggcgggcttccgtgtgtccaccctggggaccctgcagcccccaccggccccgccaaagaagatcatgcctgaaggtgagtaacaggcgggctgggcatggccgaggcccagccgagcgcgggcttcttcctggcaccccagggccgggccgggtggagaggggcgaggccgaggctggtgccccgcgctcctgcgctgcagctgcactaacgctccgcggggagcgtgtgtgcgcactaacccgccgctctgtgtgttctcccgcggctgccgacttctcccagctgggacggcggggtcgcagagactggagacctccacggttcggacctactcctgctgaccccccatcctcccgccccgggtctgacgggggagtgcccgtggctcggggtaagtgggccaggcccggggacgcgggcaccttgctgctggccctcggccccacgcacctgcccttggctgccggcctggccctgccgctccagtcccgcttaccagcactgcctggcttgccccttcctgcttcgtctggcctggggcgctttgcgcttggagcacgctgcgttgccgctgtcgcacacatcctacaacctctctcgcagctgctttgcaacctgatcaccttgagttctgagcagggactaggcttgcaggtgagataatgggccagggcacccagtccagaaggagcaatggcacctgggcagtgccagggcttaaagcccgctgctccttttcggtagaggagaggcccatcactggtgtggtggggtgggctctcccttaggcttgggcaaggcagccacctgcccttgctctcccttagtgttccctggcctccctgccatcaggttgctgggagtggagatggagggattattgagcagaaaatgagttggatggagataaacagctcccatccctgggtaatggatggtaagatgatggagattcctaagattggtggagttgggcaatgcatagccatctgactccttcagggtgctcttgatgggctggctgtaagggagactcagtcccagcctctcccctctacaactcctgccactgttggccatgtcgtaaggcagcagctgtgccaggatagctgggtccattcagagcaccttgagaagtgttgcagggaggtgttaagaagagaactctgtgcaaacagtgatggaaggctgttgtcttggtgtatcccttgcctcatagtcaatatattttttttttggcgagtcaccagtgacccgagccctccacaccagcctcccgtatctcatcaggtcccttctcagtactgtatttgctcagtgcatcaggaatgggtgtatgggtgtgtgtgggtgggtgtgagtgtgggtgtgtacgtaccaataaacaacctggttttaagacaatgt

SEQ ID NO: 15337 - protein, 373 aa, Homo sapiens [sequence omitted]

SEQ ID NO: 15338 - DNA, 2200 bp, Homo sapiens
  CDS (722)..(1720)
agcaagaacgccagggacggggtctccgcgcctgcgcagtgaagctgggcgccttcggggcttgagcttctgagggtcgggtccagcgcgtgggctgctggatggcggaaccccaggcggagtcggagcccctgctgggcggggcccgcggcggtggcggcgactggccggcggggctgaccacttaccgcagcatccaagtcggccctggtgccgcggccaggtgggacctctgcattgatcaggctgtggtcttcatcgaagatgctattcagtaccgctccatcaaccaccgggtggatgccagctcgatgtggctttaccgacggtattactcgaacgtatgccaacggactttgagcttcaccatcttcttgatcctgtttttggcttttatcgagaccccatcctcactcaccagcacggcggacgtgcgctaccgcgctgccccctgggagccgccctgcggcctgaccgagagtgtcgaggtgctctgcctgctggtctttgcggccgacctctctgtgaagggttacctgttcgggtgggcccatttccagaaaaacctttggctgctgggctacctcgtggtgctggtggtgtctctggtggactggaccgtgtccctgagtctcgtgtgtcatgagcccctgcggatccgccggcttctccgtcccttcttcctgctgcagaactcctctatgatgaagaagaccttgaaatgcatccgctggtcgctgccggaaatggccagcgtcgggctgctggccatccacctgtgcctcttcaccatgttcggaatgctgctgttcgctggtgggaagtgatgattcctgcgtattccaagaaccgggcctatgccatcttcttcatagtcttcactgtgataggaagcctgtttctgatgaacctgctgacagccatcatctacagtcagttccggggctacctgatgaaatctctccagacctcgctgtttcggaggcggctgggaacccgggctgcctttgaagtcctatcctccatggtgggggagggaggagccttccctcaggcagttggggtgaagccccagaacttgctgcaggtgcttcagaaggtccagctggacagctcccacaaacaggccatgatggaggaggtgcgttcctacggcagtgttctgctgtcagctgaggagtttcagaagctcttcaacgagcttgacagaagtgtggttaaagagcacccgccgaggcccgagtaccagtctccgtttctgcagagcgcccagttcctcttcggccactactactttgactacctggggaacctcatcgccctggcaaacctggtgtccatttgcgtgttcctggtgctggatgcagatgtgctgcctgctgagcgtgatgacttcatcctgtggaacttgatggtggtgaacaactggcaggtgtttctggatgcatatcggcgctactcaggcccgtggtccaagatctattttgtattgtggtggctggtgtcgtctgtcatctgggtcaacctgtttctggccctgattctggagaacttccttcacaagtgggacccccgcagccacctgcagccccttgctgggaccccagaggccacctaccagatgactgtggagctcctgttcagggatattctggaggagcccgaggaggatgagctcacagagaggctgagccagcacccgcacctgtggctgtgcaggtgacgtccgggctgccgtcccagcaggggcggcaggagagagaggctggcctacacaggtgcccgtcatggaagaggcggccatgctgtggccagccaggcaggaagagacctttcctctgacggaccactaagctggggacaggaaccaagtcctttgcgtgtggcccaacaaccgtctacagaacagctgctggtgcttcagggaggcgccgtgccctccgctttcttttatagctgcttcagtgagaattccctcgtcgactccacagggacctttcagacaaaaatgcaagaagcagcggcctcccctgtcccctgcagcttccgtggtgcctttgctgccggcagcccttggggaccacaggcctgaccagggcctgcacaggttaaccgtcagacttccggggcattcaggtggggatgctggtggtttgacatggagagaaccttgactgtgttttattatttcatggcttgt

SEQ ID NO: 15339 - protein, 333 aa, Homo sapiens [sequence omitted]

SEQ ID NO: 15340 - DNA, 1897 bp, Homo sapiens
  CDS (589)..(1896)
gctcaggcctcggaggcggggcgatggccacctcccaccgagtggcgaagctggtggcctccagtctccagaccccggtaaatcccatcactggagcgcgggtcgcccagtacgaacgcgaagaccccttaaaggccctggcggcagcggaggcgatcttggaggacgaagaggaggagaaagtggcgcagcccgctggggcatcgagatggggtttcaccatgttggccagattggtcttggattcctgacctcaagtgacccaaagtgctgggattacaggcatgaaccactgtgcctggccaattctgttgatttttcgagtgaaaactgcatactggattcagacactgctactaaaacgaactgctgctgcccagatgaataaccgttgctagactgacacaagccgacaggaagcagtcagagggctaacagaaaggagctgatttgaacaccagcttttctggggtggatgaacatgcaccgataagctatgaggactttgtgaactttcctgatattcaccactctaatgaggagtatttcaagaaagtagaagagttgaaggctgcccacatagaaactatggcaaaattagagaaaatgtaccaggataaattacatttaaaggaagttcagccagtggtcatcagagaagactctcttagtgactcttccagatctgtatcagaaaagaactcctatcaccctgtctcattaatgacatcattttcagagcctgatttaggccagtctttctccttgtatgtgtcctcctctgaagaggagttacccaacctagaaaaagagtatcctaggaaaaacagaatgatgacctatgctaaggagctcatcaacaatatgtggacagacttttgtgttgaggattatattcgctgtaaagatactggcttccatgcagctgaaaaaagaaggaagaaacgaaaagaatgggtgcccacaattacagtaccggagccttttcaaatgatgataagagaacagaagaaaaaagaagagtccatgaaatctaaatcagatatcgaaatggtacataaagcgctcaaaaaacaagaagaggatccagagtataagaagaaattccgagccaatccagttcctgcatctgtctttctccccctttaccatgatttagtcaagcaaaaagaagaacggagaaggtctctgaaggagaaaagcaaagaagctcttttggcctcacaaaagccatttaaatttatagcaagggaggaacagaagcgagcagcccgggaaaagcagctgagagactttcttaagtataaaaagaaaacaaatcgatttaaagccagacccattcctcgatctacttatggttcaactaccaatgacaagttaaaagaagaagagctctatcgaaaccttaggacacagctgagagcccaggagcatttacagaactcatctcctctgccttgtaggtcagcttgcggatgcaggaaccccaggtgtcctgaacaggctgtaaagttgaagtgtaaacacaaggttaggtgcccaactcctgattttgaggaccttcctgagagataccagaaacacctctcagaacacaagtctccaaaactcttaacagtgtgtaaaccatttgatcttcatgcatctccacatgcatctattaaaagagaaaaaattttggcagacatcgaagcagatgaagaaaatttaaaagaaacacgttggccttatttgtctccaaggcgtaagtcaccagtaagatgtgcaggtgtaaaccctgtgccttgtaactgcaaccctcccgtgcccacggtatcttccagaggacgagaacaagccgtaagaaagagcgaaaaggaaaggatgagagaataccaacgagaactagaagaaagag

SEQ ID NO: 15341 - protein, 436 aa, Homo sapiens
MAKLEKMYQDKLHLKEVQPVVIREDSLSDSSRSVSEKNSYHPVSLMTSFSEPDLGQSFSLYVSSSEEELPNLEKEYPRKNRMMTYAKELINNMWTDFCVEDYIRCKDTGFHAAEKRRKKRKEWVPTITVPEPFQMMIREQKKKEESMKSKSDIEMVHKALKKQEEDPEYKKKFRANPVPASVFLPLYHDLVKQKEERRRSLKEKSKEALLASQKPFKFIAREEQKRAAREKQLRDFLKYKKKTNRFKARPIPRSTYGSTTNDKLKEEELYRNLRTQLRAQEHLQNSSPLPCRSACGCRNPRCPEQAVKLKCKHKVRCPTPDFEDLPERYQKHLSEHKSPKLLTVCKPFDLHASPHASIKREKILADIEADEENLKETRWPYLSPRRKSPVRCAGVNPVPCNCNPPVPTVSSRGREQAVRKSEKERMREYQRELEER

SEQ ID NO: 15342 - DNA, 2925 bp, Homo sapiens
  CDS (1328)..(2395)
tcaataaagttttagcccacttcgtcgctatgtgtgatacaaatatgccatttgtaggacttcggttggagttgtccaatctggagattccacatcaaggagtgcaagtggaaggtgatggcttcagccatgcaattcgcttattaaaaattcctccctgtaagggtataactgaggaaacccaaaaggctctggaccgctctcttcttgattgcactttccgattacaaggtagaaataaccgcacttgggtagcagagttagtgtttgcaaattgtccacttaatggcacttctactagggagcaaggaccatcccggcacgtttacctgacatatgaaaatctgttgtctgagcctgttggtggtagaaaggtggttgaaatgtttcttaatgactggaatagcattgcacgattatatgagtgtgtgttgaaatttgcacgttctctaccagacatacctgctcatctaaatattttctcagaagttcgtgtttataattaccgagaacttatcttgtgttatggaaccaccaagggaagctcaattagtatccaatggaattcgatccatcaaaaattccacatttctttgggaactgttggcccaaactcaggttgcagtaactgtcacaataccattctccatcagcttcaagaaatgttcaacaaaacaccaaatgtggttcagttattacaggtactgtttgatactcaggctccattaaatgccatcaacaaactccccactgtgccgatgttgggcttgacccagagaaccaatactgcctaccagtgcttctccattctgccacagtcgtccacccacatcagactggccttcaggaacatgtattgcattgatatatactgccggagtcgaggtgttgtggcaatacgggatggtgcctatagtctttttgataacagcaaactagttgaaggtttctatcctgcaccaggactaaagacgttcctgaatatgtttgttgacagcaatcaggatgctcgaagaaggtctgtaaatgaggacgataatcccccttctcctataggaggaggtatgatggattctttaatatcgcagctccagccaccaccccagcaacagccatttccatggcgtcttctcaagctagaaattctagttgaggataaggaaacaggagatgggcgagctttggttcatagcatgcaaatcagcttcatccatcaccagcgtcatttgttccaactcctcccccatcctcgcatggaatctcaataggaccaggggccagttttgctagtccacatggaactcttgaccctagttccccatacactatggtgtcaccaagtggacgagcagggaactggccaggatctcctcaagtgtctggcccctcaccagcagcacgcatgcctggaatgtcaccagccaacccctcactacattctccggttccagatgcttctcattcccctcgagctggaacaagttctcaaacaatgccaacaaacatgcctccacctcgtaaactacctcagcgctcttgggcggcatccatacctaccatcctcactcacagtgccttgaacattttactgctgccctctccaactccaggccttgtgcccggcctggcaggtagttacctttgttctccacttgagagattccttggatcagtcatcatgagacgacatcttcaaagaattattcaacaagaaacgctgcagctgataaattctaatgaacccggagtgatcatgtttaagactgatgcactgaaatgcagagtagctcttagtcccaaaaccaaccaaacgcttcagctaaaagtgacacctgaaaatgcaggacagtggaaacctgatgaacttcaagttttggggaaattctttgaaacaagagttgcaggaccaccatttaaagctaatacgttaatagccttcaccaagctattaggagctcctacacacatcctcagggattgtgtgcacattatgaagctggagctgttccctgaccaagcaacacagctgaaatggaatgttcagttttgcctgacgatccctcccagcgcgccgccgattgcacctcctgggacgcctgctgtggtgctgaaatccaaaatgctattttttcttcaactaactcagaaaacatcggtccctccccaagaacctgttagtattatagttccaatcatttatgacatggcttcaggtacaacccagcaggcagacattcccagacagcagaactcttctgttgctgctcccatgatggtcagcaacattctgaagaggtttgcagagatgaatccaccacgacaaggtgaatgcacaatatttgcagctgttcgtgatttaatggctaatcttacactgccccctggtgggcgtccatagacactattgtttttaaaccaggaaggctgacagatgagacaacaaaaaaaatctgaattcagccttcagtttaaaaaaggaaaaggactttttttttaaactttaagagctaaatattctaaactggcaaaaattttcagggtgcacttctttcatcaaaatgatcatccatcttttgtataatgaacttgtatagtgtgtttaaatgggacacatttcaaaggaaataaatcagtgtccgtttgccagtaataaatttaatattctgttttatactataaagttatgaaaatgccaaacttgtttatttaattgttttcttatgttttgggtgtaatagtccttttttggtttttgttttgttttttaaggcaggtctgtcatttttgaatactgtaaaactgtgataaactttatattgaagctgtattttaatatgaccgctttgaatccttacatgaaatgttctgggagttgttataaacacaccccaaggaagcaatatttaataaaactaggtcaaaaac

SEQ ID NO: 15343 - protein, 356 aa, Homo sapiens
MVSPSGRAGNWPGSPQVSGPSPAARMPGMSPANPSLHSPVPDASHSPRAGTSSQTMPTNMPPPRKLPQRSWAASIPTILTHSALNILLLPSPTPGLVPGLAGSYLCSPLERFLGSVIMRRHLQRIIQQETLQLINSNEPGVIMFKTDALKCRVALSPKTNQTLQLKVTPENAGQWKPDELQVLGKFFETRVAGPPFKANTLIAFTKLLGAPTHILRDCVHIMKLELFPDQATQLKWNVQFCLTIPPSAPPIAPPGTPAVVLKSKMLFFLQLTQKTSVPPQEPVSIIVPIIYDMASGTTQQADIPRQQNSSVAAPMMVSNILKRFAEMNPPRQGECTIFAAVRDLMANLTLPPGGRP

SEQ ID NO: 15344 - DNA, 1837 bp, Homo sapiens
  CDS (112)..(1041)
gaaatcaattatgcaaaggaggaggcttgtcggctgagagagctaagggagggagctgaatgtgaattgagtagacgtcagtatgcagaacaggaattggaacaggttcgcatggctctgaaaaaggccgaaaaagaatttgaactgagaagcagttggtctgttccagatgcacttcagaaatggcttcagttaacacatgaagtagaagtgcaatactacaatattaaaagacaaaacgctgaaatgcagctagctattgctaaagatgaggcagaaaaaattaaaaagaagagaagcacagtctttgggactctgcacgttgcacacagctcctccctagatgaggtagaccacaaaattctggaagcaaagaaagctctctctgagttgacaacttgtttacgagaacgactttttcgctggcaacaaattgagaagatctgtggctttcagatagcccataactcaggactccccagcctgacctcttccctttattctgatcacagctgggtggtgatgcccagagtctccattccaccctatccaattgctggaggagttgatgacttagatgaagacacacccccaatagtgtcacaatttcccgggaccatggctaaacctcctggatcattagccagaagcagcagcctgtgccgttcacgccgcagcattgtgccgtcctcgcctcagcctcagcgagctcagcttgctccacacgccccccacccgtcacaccctcggcaccctcaccacccgcaacacacaccacactccttgccttcccctgatccagatatcctctcagtgtcaagttgccctgcgctttatcgaaatgaagaggaggaagaggccatttacttctctgctgaaaagcaatggaacacaagggagtgtgcagctggagacagccagggaccacatgtacacggcctggtacgctttgacaaggactttggatcttactctgagtatgagagaaagcactgggaagtttcaaggaagtgccagacacagcttcagaatgtgactccttaaattcttccattggaaggaaacagtctcctcctttaagcctcgagatataccaaacattatctccgcgaaagatatcaagagatgaggtgtccctagaggattcctcccgaggggattcgcctgtaactgtggatgtgtcttggggttctcccgactgtgtaggtctgacagaaactaagagtatgatcttcagtcctgcaagcaaagtgtacaatggcattttggagaaatcctgtagcatgaaccagctttccagtggcatcccggtgcctaaacctcgccactactgttttccagactggaaaaaaaaaaaaatctctgcaagtgaaactgtatagagtttataaaatgactatggataggggactgttttcacttttagatcaaaatgggtttttaagtagaacctagggtttctaattgacttgatttctggaaatgaaaacccgcgcttttattatgggaagcttcttgaactgcatttactattgtgaagtttcaagtcccgctgtaaagatcatgttgttttgttttccccagggctttcactgtgatttactgcattgtaggctgtatgataaaacacacataatttaaagagagaaggctcttgattccttatgcaagtggaagagttgaaacttgattgaaggacttaaaacattcacaaccttaagccgaggtggggggatatggggattcaggcagttgtttacacactttgaataactgcaaaggatttacggtttgtgaaaaatgtgtactgtggaaaagataataaattgaagacatt

SEQ ID NO: 15345 - protein, 310 aa, Homo sapiens [sequence omitted]

SEQ ID NO: 15346 - DNA, 1991 bp, Homo sapiens
  CDS (158)..(1192)
gtctggaatcaagcgaaccatcaaagaaaccgaccctgattacgaggatgtatctgtggcccttccaaataagcggcataaagcaattgagaattcagctcgagatgctgctgtgcagaagattgagactattatcaaagaacagtttgctcttgaaatgaagaataaggaacatgaaattgaagtcattgaccagcgactgattgaagcaagaaggatgatggataaactgcgtgcctgcattgtagcaaactactatgcttctgcaggtcttctaaaagtttctgagggatcaaagacatgtgatacgatggtttttaatcatcctgctatcaagaaatttttggaatcaccatctaggtcatcatctcctgccaatcagagagcagaaacaccatcagccaatcattcagaaagtgattctttatctcagcacaatgacttcttatctgacaaagataataacagcaatatggatatagaggaaagactctcaaacaacatggagcagagaccaagccgaaatactggaagggatacttctagaattactggctcccataaaacagaacagcggaatgctgatctcacagatgagacttcacgactttttgtaaagaaaacaatagtagtgggcaatgtgtccaagtatatacctccggataagagggaagaaaatgaccagtcaactcataagtggatggtatatgtccgagggtcccgtagagaacccagcattaatcattttgtcaagaaggtttggttcttccttcatcctagctataaaccaaatgaccttgtggaagttagagagcctccttttcacctgaccagaagaggctggggtgagtttcccgtcagagttcaagttcattttaaggacagccagctcaaaccactcagcgtaaacacatctggaggggtgcagacgatcctgatgcctgtgaataaagtggttcagtcattttctaccagcaagccacctgccattctgcctgtagctgccccaactccagttgtccccagctctgctccagcagctgttgcaaaagtgaagactgaaccagaaacacctggaccgagttgcctctctcaggagggtcagacagcagtgaaaacagaagaaagttctgagctgggaaactatgtcattaagatagaccatttagaaactatccagcaactcctaacttagtaaagaagattccattaatcactgcaaaaagtgaagatgccagctgcttttctgcaaagtctgtggagcagtactatggctggaacattggaaaaaggagagccgctgagtggcaaagagcaatgacaatgcgaaaagtcttacaagaaatcctggagaagaatccgagatttcaccacctgactcccctcaaaaccaagcacatcgctcactggtgccgctgtcatggctacaccccaccggaccctgagagcctgaggaatgacggggactccatcgaggacgtgctgacccagatcgacagcgagcccgagtgcccatcatcattctcctctgctgacaacctctgccgcaaactggaggacctgcaacagttccagccctggtgacagaggagaccccgtctcaaaaattgattgatcaattcagcatctgagggctgcaagtacagaaggaatctattctcagcagggcatagggcacgcactggcttaacagtttagtatataaggctcaaatagtctatacctgaactgctataagcaaggtcgatagggaagtggatagattgcttcagcaaagtgaactgtgagatctccaggacagagggagaaagatctgatccaaatgagaacagattggttattgcaggtatcacagcctaaagaaattatctttttgcaaaagaaatattaaatgatttagcagtctccacgtgtgttaatgtttcaaacgtgtatcataatgtgtataattgtgtaacaaaattgtctacaataaatcttttggtatttgt

SEQ ID NO: 15347 - protein, 345 aa, Homo sapiens
MKNKEHEIEVIDQRLIEARRMMDKLRACIVANYYASAGLLKVSEGSKTCDTMVFNHPAIKKFLESPSRSSSPANQRAETPSANHSESDSLSQHNDFLSDKDNNSNMDIEERLSNNMEQRPSRNTGRDTSRITGSHKTEQRNADLTDETSRLFVKKTIVVGNVSKYIPPDKREENDQSTHKWMVYVRGSRREPSINHFVKKVWFFLHPSYKPNDLVEVREPPFHLTRRGWGEFPVRVQVHFKDSQLKPLSVNTSGGVQTILMPVNKVVQSFSTSKPPAILPVAAPTPVVPSSAPAAVAKVKTEPETPGPSCLSQEGQTAVKTEESSELGNYVIKIDHLETIQQLLT

SEQ ID NO: 15348 - DNA, 1777 bp, Homo sapiens
  CDS (663)..(1139)
gaggtgcccatttaagctagatgtgcatgtcaccacagatgagtttcagttagggcttatagcagcacatggagtgcctgagcatgccaataggcttttggtcccaactatggaagggagctgagctccagtatttcttggtagagaagcagttagtaacagcaggatgggtgtgttcatgggtaaccaccccctcaactgggaaaacagtaactgcatatgctgccctttaggctcacaaaagtgtgtcaggatgggttacagtcatcgtatgggccacttacctagtagcgggaggggtgtgttcatggggaacaaccccccagacagggaaggcacagacatccactttagcaaagtggggtgcctacttggagcagcaaagtatgccaagtcccttagcagcaaagttgcaaaaagtcttgggacctgtagtcctaatgcaaaataagactgtggggcctaaggcatccctagaccctatgctttcaccattaggaagagcgtccccccattcctaatagggcatggtatacagatgggtctagccaaggtgctactgctgcctcgactgttgttgcagtccagcctagtactgacaccatatggtttaaaaccagtgtacgcaaagtagctaatgagctaaactcacagcaatgtaaatggtaatcaccaagaaggtaacactgatggtaatctgtgccaatagctgggcagtttatcacagcttatgtatgtgtcaaatctgtatatatacattgggcctgcgtgcccaatgcttatgggtcaggcttatgtgtcaagcctatgtgtatgtattgggtttgcatgcccaaagtttatatatcaggcctgtgtgccaaacctgtgtatcaaacctgtgtgtccaaggcctatgtctccctcggcctaggggatggaatgtaaggtacacggatgtgctttggtcgaagaatagaccaaggcggatatccaggcctgcaggaatcagcaagtttggtgcacaggtgcaaacctccacttgttatataacctgtttgtataagttcatactttgctctgagccactattgcctgtgaaaggtataattgccctgctaatgctatacagcggctcgtgggcttggcttggctcaacatagcaggtgcacttgtgcccagagaaagagagagtcagagctatccatcttgcagatgaacaggagggagctaggacatagctcgactggcttgtggccagagacagaaagagttaagctgctgacccgaaaggcagggcagagccggctgtacagctgtatgtgggagccactagctcaagcagctgagacagggaagacagcataaagagctagtgtgagaaagttgttaatgagagctgctgctgaataaaaccatattcacctgcctaaggccccctgagtgttctttctgcccatccacccacttccctcatacttcagcatgggctagacccagacccccggatctgacaaaggtgcctgcttctcctttgccttttgccatgattgtaagtttcctgaggtctcctcagctatgtggaactgtgaatcaattaagcctcttttctttataaattacccagtctcagatatttcttcatagcagtgtgagaacagatgaatacatattgtctctgacaataaatgtgttctcactcatatcattcttcgtctgtacataaatatttatttctgattacttttataattttttaaattggttctgagtaacttgattaaaatatgacttggtg

SEQ ID NO: 15349 - protein, 159 aa, Homo sapiens
MVITKKVTLMVICANSWAVYHSLCMCQICIYTLGLRAQCLWVRLMCQAYVYVLGLHAQSLYIRPVCQTCVSNLCVQGLCLPRPRGWNVRYTDVLWSKNRPRRISRPAGISKFGAQVQTSTCYITCLYKFILCSEPLLPVKGIIALLMLYSGSWAWLGST

SEQ ID NO: 15350 - DNA, 1757 bp, Homo sapiens
  CDS (40)..(402)
agcaaaatctacattgcaacagacagttcccctgtggatatgcaatcttatgaactttgctgtgacatgatcgatgttgtaattgatgtgtcttgtatatatgggttaaaggaagatggaagtggaagtgcttatgacaaagaatctatggcaattatcaagctgaataatacaactgtcctttatttaaaggaggtgactaaatttttggcactggtctgcattctaagggaagaaagctttgaaagaaaaggtttaatagactacaacttccactgtttccgaaaagctattcatgaggtttttgaggtgggtgtgacttctcacaggagctgtggtcaccagactagtgcctccagtctgaaagcgctgacacacaatggcacgccacgaaacgccatctagtctgaatcccagcgtcggggctctgtgccagcttactcttcactccagggtcggatgccacgtgctacaggacatgggagctgctgcttgtgggaatctggtgcctgttccactagagacaaggggtagagtttctcatttggatgaaaaccccttcaactggtggtgtacaactgaagctactatatcttttttgaaaatggcaaaaaaaaaaaaaaaaaaattctggagaccacagaactcaggtgtgtgtttctcctcttttgggtcccctttaagtagttgggatattttggacctggagataacaccagttacccatccttaccagggaatgttgccatcaattccagttgaaaataatagaaaagactgaatttttatatgcttcacttaggctttcatttgagtagactctaaaaattctgccttgcttaagttctaacactgcctctcagatttcagttttggacattgcacaactaagaccttttaaacgcatttgcttgctaactcggaagacacatagtctgcagcaagacattcctatattgaagaaatgagagaaaattttatgctgcatcaggtggagagcaaggctcaacggtggttgcattagttccctcggaagtattgaaaaaactttgaaatggaagaaaatttttgcacctatgttctgagtaccagatgtctgggttctttcttctgcattagataaatgatcatgctcagtgtaacaaagggaattaaaagttttcccacagtccccttctaggggagaaactcattgtgtcactgaaatgtttagcttactttaatcttgatatcagcctctacagaccttttattctaagctatcgagcttcttgattgcatttggttgaccacgagtgaccctaaggcattgggggactgtccactgggagttggagtgagcacgtggtgctgcaacaggcattgttttacatactttgtctccagtattctgacaccaagtgtcaactgtggtactttctttgcctaggatatgaattcataattgttgcttttgttgatggttgataccctttccattgatttaaacctaacacattatttctattccacatgcccagtagacatatattccaaagccactggaccacttgagtacataagtgccactgtttaatgcaatatgtatattcaggtctgtaaagctaacagtgtgacttggagtgcttcctgcagatgattctgacttgagtatttacatggaccatggtgatatccaaaagaaaaatgctttttatatttatagattatttcattgaactatatatgaaatgggtatcaataaatgtatttactcc

SEQ ID NO: 15351 - protein, 121 aa, Homo sapiens
MQSYELCCDMIDVVIDVSCIYGLKEDGSGSAYDKESMAIIKLNNTTVLYLKEVTKFLALVCILREESFERKGLIDYNFHCFRKAIHEVFEVGVTSHRSCGHQTSASSLKALTHNGTPRNAI

SEQ ID NO: 15352 - DNA, 1974 bp, Homo sapiens
  CDS (254)..(709)
agccgtagccagatccgttgaaaggagtgcagagaggtctcattgcgctcccgaacagacctgacgtagatccgaagtggcccgcgccatctcaactatgaggggacacccgtaggcggcgggagagggacgccgcgaggagccaataaagctccgcaaccggaagtgtcttctgggaggggtcgtacccggaagtgtggcacctcccgggccgcacccggaagtgtgatgccaccgccgctacggggaagtaatggtatccggccaattgagattcggagttaaaacagggatgtgcagatggaggtcggaggagacactgctgccccggcccccgggggcgcggaggacttggaggacacgcagttccccagtgaggaagctagagaaggtggaggggttcacgcggtcccgccggatcccgaagacgagggcctggaggaaacaggatccaaggacaaggaccagccacccagcccatcaccaccgccccagtcagaggccctgtcaagcacctctcggctctggagtcctgcagcccctgagaatagtcccacatgtagccctgagagtagctctggaggccagggcggggaccccagtgatgaggagtggcgcagccagcggcgcggctgtcggacctgtaccaccgcctgcatgctcgtctccacagcacctcccgacccctgcgcctcatttaccacgtggctgagaaggagacactactggcctgggtgacctccaaattcgagctctatacctgcctcagccctctggtgaccaaggcaggtgcaatcttggtagtgaccaaactcctgcgctgggtgaagaaagaggaggaccggctcttcattcgttacccacccaagtactccacaccaccagccacctctacggaccaagctgcccataatggcttgttcactggactctgatagttggagctcccagaccaggcagtgctgggagcaaccacctttgttttttaccttctgtctaccctggaaatgtgtgtgggggtgtgtctgtggccagtcattgtctccctaagcaatggggcaaggtctgagggcccaccgatgagagagatggtggcagccgccaggcgagcaggctgctttccctgcccagtcatgcacctccccctctggggaaatccttaggcctccctctcccttccctctgtctcatctcctccacttggatgatgctctagcctctgtcagggactgtcccctccaaacttgcttccgtggtctgcctcctagttgaatctcagccctgagtgtccagatctggccaaggtgtctagggtggcccacgggggtgctggaattggcacttcagggccaggctatgcttgggactggcctgagggtattttaaagaaaaaaactacataaaaggcctaaaagtaagacccacaaggatattcctttgcccttcttgtacttttttcatctttaccctgccagaaatgacccgccctcaatgctggctgctgctaacattaatgagaaggtggcctccagtgtccacctgcggaacccaggacacagcacctgactgcacacagtggctgaaatccagcatttttacataggagatgcacttagcctctaagcctcgttttactcatctgtgaaacagagataagtaaccctctctcatgaactctttgatgaggatttgtaaacgaaaacagactcgaactattgtgtaccaccacatagcacatgcacgtctgtcccagactttgacaacctgcacaagacaagcagcctaaagcaggagagacctccctagggttttgtgtgtgtgcacactaccctcactccccaactggccattaccctagttctgcactcctttctctccaaccagggcagaaaggagggaggattcgtcccattacaataatgaaataatgatattctaatttttttaaataaaatgttaagccttttgttattg

SEQ ID NO: 15353 - protein, 152 aa, Homo sapiens
MVSGQLRFGVKTGMCRWRSEETLLPRPPGARRTWRTRSSPVRKLEKVEGFTRSRRIPKTRAWRKQDPRTRTSHPAHHHRPSQRPCQAPLGSGVLQPLRIVPHVALRVALEARAGTPVMRSGAASGAAVGPVPPPACSSPQHLPTPAPHLPRG

SEQ ID NO: 15354 - DNA, 1944 bp, Homo sapiens
aaaaggtaatgtatggaaaggaaccaaccatctgaaataatagtcctaaatccaactagataatcttttaaagctgtaagagtcagagatggagatttctaaactttcaaagaaaacttgattgcaaatgagaaacctgtgcatttttgaatgcttattgaatttgaatgtctgtgtgggccaaaaagaatcagagggacaaatggaaggcaggaaagaaaaggtgtaaattttagatgtgttttaaattaatgtatttaatgacatattagactcattacaattttattgactttccctttacatttgaatgtaattttttactagccgatgcaagctgcaaaatggcgagtcttctaaggtgcctttccttccctgggatcctcatcttagaatgagcagaggcacatcgataagaactggaccttgatttcacaacctcatacaaagccaggcaattcttgagccaaacaaagggggtgtaagctatttcatttattttgataatcctcctcttgcacgggagcattttgctgtctttgtcaaagtgaatgacaacaatttggccaactctctctgagctgcactcaacagtgacaggcaaattatcagaggccctgcacttcttattatcagaggagaagccatcagggggacgcatggaggatacctctcccttgtcactatttgtcagtgggacaagggccactgctatgggtagctgacaggtaatttcaacaataacaattactcctattactggtgtcataaacaattcgcccaaggcatgacaatagcaaagctttataattcaatgccatataaataaatgccagcaggtaacaagtaatttagctccaatcaagctttcaccccggcattaatattgttattgcaagaaaatggaaaattgaaaaaattcaatatgttaatgaattaagagaggttcaagggctagacaagacgagttggaaaaaggaaacaaaaattattgtggtatcatatttggtaccatcctggaggccaaacatcagtataattactttaagacaagaaggggaactggagtgccttagatctcagagcagggaaaaatgtgacatgagctttcaaaaaatccacctaactccaatttctgaagaatataaggagaaatatgagagtgtatatatataatgtagcatttcactggctttctttttctacctgaaatatttcatatgaagcagaagcatgagtatcaaagaaacgtttccatctgtttaagaaaattgtatcagcacctgcttcctttacattaagtctcataatgaaactattttaataatccttttttttttaatctggggtgaaggtaaagctgaaagtcatctttgctctccagctgtccaccttttggaagtggactagaggatacagtgttatcttcatacgtaaaacttcctgatcaagccaatttgcaattttagtatttgtccagcaagacaatgtgccatcatggtgacagcagtaaaagaatttgaaaatctctaattaggagagctgcacaccaattaacgcatgtcaaatttcacttcatcaagtgccactctaattttccctctaaaaattaatggattttttttcttttggtatgtgtgtgtgtccccttaaggcaatgttgattcaaatctgctcgagatgcagtgttgcacagctaagcatcttcttgattacaatccgccacacttctaactgcgctcattcgcactgccacggatactttgtcaacagtcaaattacaccacgctgataacaatgcataatggtgttcctcctccagtcccctgtcaggagaggggcttcataaaaatgtgatgttttcttctcaactgtatctaaaggaagtttgtatgaccaggtccccagtcaggtgttgatttttaaaattagtttgttaatttc

SEQ ID NO: 15355 - DNA, 3257 bp, Homo sapiens
  CDS (868)..(2493)
caggagggcccatgtgcttaccctgttttgcccacgaagaaacagctcagtgttgcgggtcaatgcccacatcacacagcatctagcacgtaactgcaccccgggagtcgtgggcatctgctggcctcctgccggtctcctgccctgctgacagcttgctgtgccgcctgcctgccccagtacgagcgggccctggacgtggcggcagagcccaagcacgagcggcagcgccgagcccagatacgcaagaacatcacggagactctggtgtccctgagggtccacactgtggatgacatccagcagatcgctgctgcgctggcccagtgcatggggcccagcagggagctcgtatgccgctcgtgcctgaagcagacgctgcacaagctggaggccatgatgcgcatcctgcaggcagagaccaccgcgggcaccgtgacgcccaccgccatcggagacagcatcctcaacatcacaggagacctcatccacctggccagctcagacgtgcgggcaccacagcgctcagagctgggagccgagtcaccatcgcggatggtggcgtcccaggcctacaacctgaccactgccctcatgcgcatcctcacgcgctcccgcgtgctcaacgaggagcccctgacactggcgggcgaggagatcgtggcccagggcaagcgctcggacccgcggagcctgctgtgctatggcggcgccccagggcctggctgccacttctccatcccctaggctttcagcagggccccggctaacctcagtgacgtggtgcagctcatctttctggtggactccaatccctttccctttggctatatcagcaactacaccgtctccaccaaggtggcctcgatggcgttccagacacaggccggcgcccagatccccatcgagcggctggcctcagagcgcgccatcaccgtgaaggtgcccaacaactcggactgggctgcccggggccaccgcagctctgccaactccgttgtggtccagccccaggcctccgtcggtgctgtggtcaccctggacagcagcaaccctgcggccgtgctgcatctgcagctcaactatacgctgctggacggccgctacctgtctgaggaacccgagccctacctggcagtctacctgcactcggagccccggcccaatgagcacaactgctcggctagcaggaggatccgcccagagtccctccagggtgccgaccaccggccctacaccttcttcatttccccggggaccagagacccagtggggagttaccgtctgaacctctccagccacttccgcctgtcggcgctggaggtgtccgtgggcctgtacacgtccctgtgccagtacttcagcgaggaggacgtggtgtggcggacagaggggctgctgcccctggaggagacctcgccccgccaggccgtctgcctcacccgccacctcaccgccttcggcgccagcctcttcgcgcccccaagccatgtacgctttgtgtttcctgagccgacagcggatgtaaactacatcgtcatgctgacatgtgctgtgtgcctggtgacctacatggtcatggccgccatcctgcacaagctggaccagttggatgccagccggggccgcgccatccccttctgtgggcagcggggccgcttcgagtacgagatcctcgtcaagacaggctggggccggggctcaggtaccacggcccacgtgggcatcatgctgtatggggtggacagccggagcggccaccggcacctggatggcgacagagccttccaccgcaacagcctggacatcttccggatcgccaccccgcacagcctgggtagcgtgtggaagatccgagtgtggcacgacaaagggctcagccctgcctggttcctgcagcacgtcatcgtcagggacctgcagacggcacacagcaccttcttcctggtcaatgactggctttcggtggagacggaggccaacgggggcctggtggagaaggaggtgctggccgcgagtcacgcagccctgttgcgcttccggcgcctgctggtggctgagctgcagtgcggcttctttgacaagcacatctggctctccatatgggaccggccgcctcgtagctgtttcactcgcatccagagggccacctgctgcgttctcctcatctgcctcttcctgggcgccaacgccgtgtggtacggggctgttagtgactctgcctacagcacggggcatgtgtccaggctgagcccgctgagcgtcgacacagtcgctgttggcctggtgcccagcgtggttgtctatcccgtctacctggccatcctctttctcttctggatgtcccggagcaaggtgggctggggctggggaccggggagtactgggaatggagcctgggcctcggcaccatgcccagagccgccactttccagtgctgcagccagagggaaaggtgtccaccaaaggctgctcgggaagggtcaacacacttgagcagccttagctagactgaccagggagaaagagagaagactcagaagccagaatcgtgaaagaacgagggcacttcgctaagcagacgccacggacaactgcacagcagcacgccagataactcagaagaagcaagcacgcggctgtgcacgcttccgaaatgcactccagaagaaaatctcagagccttcacgatagaatttttctaagcagttaaggaagaattaacaccaatccttcacagactctttccaagaatacagcaggtgggaactcttcccattcatacggaaacgggaggccgcaccccttaggaatgcacacgtggggtcctcaagaggttacatgcaaactaaccccagcagcacacagagaaggcgcataagccgcgaccaggaggggttgctcccgagtccgtggcaggaaccagaggccacatgtggctgctcgtatttaagttaattaaaatggaacgttggccgggcgtggtggctcacacctgtaatcccaacactttgggaggccgaggcgggcagatgagttgaggtcaggagttcgagaccagcctggccaacacaatgaaaccccgtctctactacaaatacaaaaacttagctgggcatggtggcgggcgcctgtagtcccagctactcgagaggctgaggcaggagaatggcatgaacccaggaggcggagcttgcagtgagccgagattgcgccactgcactccatcctgggcaacggagcaagactccatctcc

SEQ ID NO: 15356 - protein, 542 aa, Homo sapiens
MAFQTQAGAQIPIERLASERAITVKVPNNSDWAARGHRSSANSVVVQPQASVGAVVTLDSSNPAAVLHLQLNYTLLDGRYLSEEPEPYLAVYLHSEPRPNEHNCSASRRIRPESLQGADHRPYTFFISPGTRDPVGSYRLNLSSHFRLSALEVSVGLYTSLCQYFSEEDVVWRTEGLLPLEETSPRQAVCLTRHLTAFGASLFAPPSHVRFVFPEPTADVNYIVMLTCAVCLVTYMVMAAILHKLDQLDASRGRAIPFCGQRGRFEYEILVKTGWGRGSGTTAHVGIMLYGVDSRSGHRHLDGDRAFHRNSLDIFRIATPHSLGSVWKIRVWHDKGLSPAWFLQHVIVRDLQTAHSTFFLVNDWLSVETEANGGLVEKEVLAASHAALLRFRRLLVAELQCGFFDKHIWLSIWDRPPRSCFTRIQRATCCVLLICLFLGANAVWYGAVSDSAYSTGHVSRLSPLSVDTVAVGLVPSVVVYPVYLAILFLFWMSRSKVGWGWGPGSTGNGAWASAPCPEPPLSSAAARGKGVHQRLLGKGQHT

SEQ ID NO: 15357 - DNA, 1563 bp, Homo sapiens
  CDS (201)..(617)
tttgtgatgcagctcgccaggcctacggggaggtaaaggacttgccaggctgaagtaacttcagaagcagaaaaacggaggattaaaaccacaagtcgttgtgatgtgaaatttcgtggggcaagaaagggccggaagtaggtagtctgcacggctctgctagagagaggatcacaagatcacacaaatgtgatctacttatgactggaaaaaatgtgtactttcagagccagcttgaggcattccattgcctccaatatgagctcttcccttcaagattgactataaatctcttagttacaactcacatcccctttccccagacaaaaccccacatagcccggtgtgtatttactgaaagcagtaagatactgctggggctttgggtgcaagatggagagtgctcagagataatgacaggggcctggtcctgcagggccttacgtagaaagtcaaggaatttattctctgagcaattgaaaatcatcccgaaagatctgcattttagaaataccatgttgagtagttgcataagaaaccagttaggaggcccctttttattggaggtagagaataatgagagactgaactacagaagtggggaaggaagacagctgtagatccaagaaatagtatccggaagagaggcttgagaagtgatcaaggagaattccacagttatcagagaccctgtcttccttgttcaccactatattaccagaacataatacaaataatgctattgttattgggtggcattatttggttagtaggtactttttaaaatttttaaatttaattttagtattaaaatacatgtaaagatcaggaaaatgaacttttaaaaataaagggctttcactgggcatgataacacatccctgtagtcccagctactcccagctattcaggaggctgaggcggcaggatcacttgaaccaaggagttcaagtttagcctgggcagtatagtgaaaccctttctcaaaaacaaataaagggctactgaaataatgataatttatattcaggtcgtaggtacctaattactagttacacatacatggctttgatgggaaatcaaagaaacattctgacaatacagagattcatcaagcaatttgtctttgaaagttgattattcaaaaacagagcttgtagcaaaagaagcagaagttagatcccacagtcatcaagtttcagatcctaaggcttgcattcttacaccaatttcttctttgcttaaatcttaattttcatcagcattaattaagtgtctgggtactctgccagtcaggagagatgttaccaaaggtacaggatttgagaagtattgtcagaagagccaagttcataatcaggcccataggatcaataatttgggggagtgtttagagcagtttcaaagatgagagcagtagatcaaagtagaatttcaggactgagcacatgccaaggcacccttttatggatattcaacctgtaccagaagggaggagtcatttacttaaaagagttacacaagatgaaagagctagatccaaataaagacgctataaaaatt

SEQ ID NO: 15358 - protein, 139 aa, Homo sapiens
MTGKNVYFQSQLEAFHCLQYELFPSRLTINLLVTTHIPFPQTKPHIARCVFTESSKILLGLWVQDGECSEIMTGAWSCRALRRKSRNLFSEQLKIIPKDLHFRNTMLSSCIRNQLGGPFLLEVENNERLNYRSGEGRQL

SEQ ID NO: 15359 - DNA, 1574 bp, Homo sapiens
  CDS (271)..(1320)
gcggtaggtgccggttggggccggctgtgattgttatcttggtgctgcagaggacagcagaagaggagattgggtcagaaaactgccctgccgcaccagagcacagcgcactagtgggacaggggtcctgactcagacttaactggctgtgtctcgtggtttttcactgtcctggaaaaggcctgaagtggcactgaaatgaggcatagatgagtccccacgacagtccggtttgtagattccctgatctgcaattcttcccgttccttcatggatttgaaggctctcctttcttccttgaatgactttgcatccctctcgtttgctgagagttgggacaatgttggattactggtggaaccaagcccaccacatactgtaaatacactcttcctgaccaatgacctgactgaggaagtgatggaggaggtgctgcaaaagaaggcagacctcattctctcctaccatccgcctatcttccgacccatgaagcgcataacctggaacacatggaaggagcgcctggtgatccgggctctggagaacagagtcggtatctactctcctcatacagcctatgatgctgcgccccagggcgtcaacaactggttggctaaagggcttggagcttgtacctccaggcccatacatccttccaaagctcccaactaccctacagagggaaaccaccgagtagaattcaacgttaactacacccaagacctggacaaagtcatgtctgcagtgaaaggaattgacggtgtttctgtcacttctttttctgctaggactggtaatgaggaacaaacacggattaatctgaattgtactcagaaggctttgatgcaggtggtagattttctttcccggaacaaacaactttatcagaagacggaaattctgtcactggagaagcctttgcttctacatactggaatgggacggttatgcacactggatgaatctgtctccctggcaaccatgattgatcgaataaaaagacacctaaaactatctcatattcgcttagcccttggggtggggagaaccttagagtctcaagtcaaagtcgtggccctgtgtgctggttctgggagcagcgttctgcagggtgttgaggctgacctttacctcacaggtgagatgtcccatcatgatactttggatgctgcttcccaaggaataaatgtcatcctctgtgaacacagcaacactgaacgaggctttctttctgaccttcgagatatgctggattctcacttggagaataagataaatattatcctatcagagactgacagggaccctcttcaggtggtataattgcagaaacatcaggataacacattctacaaatcagctggatgccaacttaaatttgtaacatgagtcagtgggactggtgtgcttccagagagtgtcttcgagggtatcatcatttccggtttgttaatcttattcaccaaatgttctatcgctcgtaaggtaaaactgtaatataactaccatattaaataacaaatgttcattataaatctaggaaagattgaataaaatctgtttacttaacattc

SEQ ID NO: 15360 - protein, 350 aa, Homo sapiens
MDLKALLSSLNDFASLSFAESWDNVGLLVEPSPPHTVNTLFLTNDLTEEVMEEVLQKKADLILSYHPPIFRPMKRITWNTWKERLVIRALENRVGIYSPHTAYDAAPQGVNNWLAKGLGACTSRPIHPSKAPNYPTEGNHRVEFNVNYTQDLDKVMSAVKGIDGVSVTSFSARTGNEEQTRINLNCTQKALMQVVDFLSRNKQLYQKTEILSLEKPLLLHTGMGRLCTLDESVSLATMIDRIKRHLKLSHIRLALGVGRTLESQVKVVALCAGSGSSVLQGVEADLYLTGEMSHHDTLDAASQGINVILCEHSNTERGFLSDLRDMLDSHLENKINIILSETDRDPLQVV

SEQ ID NO: 15361 - DNA, 1966 bp, Homo sapiens
  CDS (237)..(1082)
attggagttcagctaccaaaaggaaaccttcctctgggtcctggagtatttggcctgaaattgggaactcggaagttgctgctccagggcgctccctgcggagctccgccgcccgcctctccgcccggcctttcccggcgtccccacgcggggcgcaaccgcgagaaagaaacgcaggtcgcaccgtcagcgcccagagcagcgccagtttccgggcccgggctgctctcggagccatgagctgcggccgcccccctcccgacgtggacggcatgatcaccctcaaggtggacaacctgacctaccgcacctctcccgacagcttgaggcgcgtgttcgagaagtacgggcgcgtgggcgacgtgtacatcccgcgggagccccacaccaaggcgccccggggcttcgctttcgtccgctttcacgaccggcgcgacgcccaagacgccgaggccgccatggacggggcggagctggacggacgcgagctgcgggtgcaggtggcgcgctatggccgccgggacctgccccgcagccgccagggagagccacgcggcaggtccagaggcggcggctacggacggcggagccgcagctacgggcggcggagccgcagccccaggcggcgacaccgcagccgatcccggggtcccagctgctccaggtcccgcagccgatctcgctataggggttctcgctatagccggtctccctacagccgatctccttacagccggtcgcgctacagccgctctccctacagcagatctcgctacagggaatctcgctacggcggatctcactacagctcatctggttacagtaactctcgctacagccgatatcacagcagccggtctcactcgaagtctgggtcctccactagctctcgctctgcatcaacctccaaatcgagctctgcgcgacgatccaagtcctcctcggtctccaggtctcgctcgcggtccaggtcttcatctatgaccaggagtcctccccgggtatccaagaggaaatccaagtcaaggtcgcgatccaagaggccccccaagtctcctgaagaggaaggacagatgtcctcttaagaaaatgatgcatcaggaagcaacgtgatggaggacttgggggaaaaggatcacatactcagtctatggaagcaacgtccctgttgcagtgcagagtgctgagctgcttcctgttttcttctgattgctcctggggaaaacacgccttgtcctgaagaacaaatggctgtccagtttattaaaatgcctgtcaactgcacttccagtcacccaggccttgcagataaataatggagcatgcggtgagcacatctagctgacgataatcacaccttttcccccgtcttttctgaaaaattgtaaatctgatcatatcaacatgtatgaacttaaaatatggagaatgttatggaagaaatagtttataagtttgttaagtacttataacatggtttatctttttgattattaattttttacgctaaccattgtttctgtagttaaaattgttttcttggtgttatcttttctcagaataaaattagaaacttttgatggaaagtaggttgttttattttctgtatgacttttggatatttgtacttttgagaaaattattagcaccaagtgtttctcaaaatataatttttaaaaaatccttaataggcttttagctatgtgctttattgttttatcacaatgcagtttatttgtagtttctctcttttttcctcacacctatggtttttttacttccaaaattattttcaaataatccatttttggctttcatcattatccctactagatgttatgtgttcttttgcaattgtttctgcttatacctttactagcaaagggaaaaataacaatttggtgtcaatgatctggtgacaataggattacattggagccaattgaataaatttattctttcaatc

SEQ ID NO: 15362 - protein, 282 aa, Homo sapiens
MSCGRPPPDVDGMITLKVDNLTYRTSPDSLRRVFEKYGRVGDVYIPREPHTKAPRGFAFVRFHDRRDAQDAEAAMDGAELDGRELRVQVARYGRRDLPRSRQGEPRGRSRGGGYGRRSRSYGRRSRSPRRRHRSRSRGPSCSRSRSRSRYRGSRYSRSPYSRSPYSRSRYSRSPYSRSRYRESRYGGSHYSSSGYSNSRYSRYHSSRSHSKSGSSTSSRSASTSKSSSARRSKSSSVSRSRSRSRSSSMTRSPPRVSKRKSKSRSRSKRPPKSPEEEGQMSS

SEQ ID NO: 15363 - DNA, 1659 bp, Homo sapiens
gagtgtccagtacaatggataaaaataaatccattatcaacacatcactaacatttcaaaatcttcatggagaagattctgtaagtttctggggagagagagaaaaaatacatcacatacagaggatcacttaccaggactgctttgaacttaatagcaatggtaaaagcaaacagacaagcaactacttcaaaatgttgaaaagaaaattatttccagctttcaattctatactcagacaagctatcaaacaaatagagggagccagccatttttagacatccagggtctcatttaccttccatgtacccttttcaagaagttaggatgtgctccacagaaacaaaaataaaaccaggaaatggaacactttggaatgtagaaaatgggataatcaacatagaggataggcaagaggaatttctgggagcatggtcaagtaggattccagcaccacagttgtgcttcttgatgtagagagcagtcagtccagaatcaagcagcatgactcacattgatggctattatcactaagatccctgctgccattgtatcatctttttaatctgaggacattatgcccaggcaagcctggctcagattcttaccggtatttgccttgtcttgaccatgtggtgatgaaattcctgctctcttctgtgctgtgctgactggaccaactgaggacactcatttttacccttctttttcaacctattcctgaaagctgatgttgggcgttggtgagcttaaagcagaaaatagccttcctccttcccatttttgctatgtattggccagaaatcaggtatcaattctacactttgatctttccacatgcttcagttgtgaggagcccagtattcactcatgacattgcaaattaacttctctaggagggatccagaaagcctggagaaggtaaagccagactagggctgtttggctttaattaacagcagcattgttgcccttttccttgctagattcgtgcttgctgctcaaattgccaaaattaaatatttagggcaatgttcatgagtgctgggaaaactaaagagaataagcaggaagtcattagaggctatcttggtagagatggggaaggagaagcaattggagaggggcacatgggggcttctaagacttttgtttcataacttgaatgatgggtacccagatgtatattttactttaatttgtacattcatattttatgcagtttctatgtctaatacgtataaaaatttcagattaaatgaaatacatgaaggcactggcaccctgcctttcaaattgtaaaaggtgtaaattttgcaaaatgcctaaaggggcaggtgaggtcacaatgagaatctacactattgtacttcggggttcaacccaaacagaagttaacaggagaacttaaattatgtagcgcatgatttttaattgagtatggtactgtaattttaatccacattttctgctagttaactataaaataacccttaaaactgatctaaaagcctattttaaaaatataagttgcggccgggcacggtggctcacgcctgtaatcccagcactttgggaggccaaggtgggtggatcacaaggtgaggagatcaagaccatcccggccaacatggtgaaaccccgtctctactgaaatac

SEQ ID NO: 15364 - DNA, 1906 bp, Homo sapiens
  CDS (158)..(1405)
gtgtgaacgtgctgccgccgatcagtcacccagtcggctggagtcggaggcgatatttctaggggtgtacttgttggggtcagggtaagcaccagccacaaaaacctacaaaagaagggaaattactgtctttaaatattaaaaaaaaacaagatccatgagtgggcatcgatcaacaaggaaaagatgtggagattctcacccggagtccccagtgggcttcgggcatatgagtactacaggatgtgtattaaataaattgtttcagttaccaacaccaccattgtcaagacaccaactaaagcggctagaagaacacagatatcaaagtgctggacggtccctgcttgagcccttaatgcaagggtattgggaatggctcgttagaagagttccctcctggattgccccaaatctcatcaccatcattggactgtcaataaacatctgtacaactattttattagtcttctactgccctacagctacagagcaggcacctctgtgggcatatattgcttgtgcctgtggccttttcatttaccagtctttggatgctattgatgggaaacaggcaagaagaaccaatagtagttctcctctgggagaactttttgatcatggctgtgattcactatcaacagtttttgtggttcttggaacttgtattgcagtgcagctggggacaaaccctgattggatgtttttttgttgttttgcggggacatttatgttctattgtgcgcactggcaaacgtatgtttctggaacattgcgatttggaataattgatgtgactgaagtgcaaatcttcataataatcatgcatttgctggcagtgattggaggaccacctttttggcaatctatgattccagtgctgaatattcaaatgaaaatttttcctgcactttgtactgtagcagggaccatattttcctgtacaaattacttccgtgtaatcttcacaggtggtgttggcaaaaatggatcaacaatagcaggaacaagtgtcctttctccttttctccatattggatcagtgattacattagctgcaatgatctacaagaaatctgcagttcagctttttgaaaagcatccctgtcttcatatactgacatttggttttgtgtctgctaaaatcactaataagcttgtggttgcacacatgacgaaaagtgaaatgcatttgcatgacacagcattcataggtccggcacttttgtttctggaccagtattttaacagctttattgatgaatatattgtactttggattgccctggttttctctttctttgatttgatccgctactgtgtcagtgtttgcaatcagattgcgtctcacctgcacatacatgtcttcagaatcaaggtctctacagctcattctaatcatcattaatgatgtaattggtatataggaacatcatgttttctgcaggaaagaaagtaacatattaaggagaatgggggtggataagaacaaatataatttataataatcaatgttgtataacttttattctttattattggtaacacgccctaactatcctgtgtgagaatgggaatttcaagtcccatcttgtaaattgtatatgttgtcatgcagggtttgggccaagaaagcatgcagaaaaaaatgccatgtgattgtaattatcctggattcagaataatactgtgatggggagccagatccgcagtggtggagagttctaatgttgactgtttgcaggccaaaagatgattgctttataattttaacaaatcattgtcttttagtaacatccttgtttagtgtcttctcaagctttctttactgaggaattcagcttgtgacacagatacatcccactagcttgtgaggtggaactagtaataaagaccttgaatttgg

SEQ ID NO: 15365 - protein, 416 aa, Homo sapiens [sequence omitted]

SEQ ID NO: 15366 - DNA, 1788 bp, Homo sapiens
  CDS (16)..(393)
agctagctttgcaatatggcggccgaggcggacggaccgcttaaacggctgctcgtgccgattcttttacctgagaaatgctacgaccaacttttcgttcagtgggacttgcttcacgtcccctgcctcaagattctcctcagcaaaggcctggggctgggcattgtggctggctcacttctagtaaagctgccccaggtgtttaaaatcctgggagccaagagtgctgctggattaaaaaaggaggatgaggcccgtcccgtgaggtctgcgtccatgagggttagaggtgggttaggggcatgggggcaccagcaaggggagggttgtatggagtgggagagccagggggcaggtagtgggtataggtgggcagcagttccccctggagcctagggtcactctgagggagggagcacggtgagggggcttccagtttgcagtgggaagagctgcagagagaaacaagaggttagagggcacttccctgggttggaggtgagtctggccagttctgggcagacagggtagagcgtgccacccacccagccctggctacccagcccgctgggcgcagcaggcatggaagccgaccccgggatggagagcccgcggccctgttggggcacgctcgggagcgggcttgcgtgctgcacggctgttttcctcttggggagtcaggccaggaaagggcagaatgagctcggcctctccttgccctgggggctgggagaggaagctgggtcacacacaggccagaagcaggggggaaacggggcatctaactaggacacagtcgcatccaggggtcagtcgcctgaccctacagggcccaccaccttcagactgagatggaaacgccctctgggagaaccctgatccgccccaccctacacaggccccggaggtactgggcctgcgcccgccacaccttggccgcgagtggcctctgcttgggtgggctcccgtcctccggcatccgcccccaccaaggctccagaagaggggcgcatgggcctccgtcttcggcccgcttcccaggcactcacccatagctgccaggcaggtaggctgtcgagtagctggggggtctgtacccaaagcctctgctcggttgggtggtcgcgtaccccggcccccagagcgggccgccgctggccaggttgcctcttccctgtccgcagcgggaaggtccggcgcccgagctcttggccttgcgccgaggccggtacttgtagtcggggtagtcgcgcaggtgtcgggcgcggagccgcttggcctcctccacgaagggccgcttctcgtcctcgtccagcagcttccactgcgcgcccaggcgcttggagatctcggagttgtgcatcttggggttctgctgcgccatctggcggcgctgagcggagctccacaccatgaacgcgttcatcggccgcttcaccttctccaggggcagcatcccggaccaccaccccaacccctttcctggtgcctgttgctcctcaaatcccagaactgcccctggggcaagaaaggccgaggagggagaccatttttgtttcctgagtcattcccagaagtaagaccatctttgggacaagagacaatgaagagaagtcagatgtggaggaacagaaaacaagagccaggggccagggcaggtcagtcctagagaaacaaatggaccaaactggggacaaagaaggcacaggagccagacagccatttggatttttttattctctttttaaatactgtacagtgaaaaataaatacgccttctcatccacc

SEQ ID NO: 15367 - protein, 126 aa, Homo sapiens
MAAEADGPLKRLLVPILLPEKCYDQLFVQWDLLHVPCLKILLSKGLGLGIVAGSLLVKLPQVFKILGAKSAAGLKKEDEARPVRSASMRVRGGLGAWGHQQGEGCMEWESQGAGSGYRWAAVPPGA

SEQ ID NO: 15368 - DNA, 1815 bp, Homo sapiens
  CDS (1)..(1623)
atgttgtcccctcagcgagtggcagcagctgcctcaagaggagcagatgatgccatggagagcagcaagcctggtccagtgcaggttgttttggttcagaaagatcaacattcctttgagctagatgagaaagccttggccagcaccctcttgcaggaccacatccgagatcttgatgtggtggtggtttcagtggctggtgccttccgaaagggcaagtccttcattctggattttatgctacgatacttatattctcagaaggaaagtggccattcaaattggttgggtgacccagaagaaccgttaacaggattttcctggagagggggatctgatccagaaaccactgggattcaaatctggagtgaagttttcactgtggagaagccaggtgggaagaaggttgcagttgttctgatggatacccagggggcatttgacagccagtcaactgtgaaagactgtgctaccatctttgctctaagcactatgactagttctgttcagatttataatttatctcagaacattcaagaagatgatcttcaacagctgcagctcttcacagaatacggtcgtctggcaatggatgaaattttccaaaagcctttccagacactgatgtttttggttagagattggagtttcccttatgaatatagctatggactccaaggaggaatggcatttttggataagcgtttacaggtgaaggaacatcaacatgaagaaattcagaatgttcgaaatcacattcactcatgtttctccgatgtcacctgctttctcttaccacatccaggactccaggtggccacaagccctgactttgatgggaaattaaaagatattgctggtgaattcaaagagcagttacaggcactgataccgtatgtattaaacccatctaagttaatggaaaaggagatcaatggctcaaaggtcacctgtcggggactactggagtattttaaggcatatattaaaatttatcaaggagaagatctgcctcaccccaagtccatgcttcaggccactgctgaagccaacaacttagcagctgcagcctctgccaaggacatttattataacaacatggaagaggtttgtgggggagagaaaccttatttgtctccagacattctagaggagaagcactgtgaattcaaacaacttgctctggaccattttaagaagaccaagaagatgggtgggaaggatttcagctttcgttaccagcaggagctggaggaggaaatcaaggaattatatgagaacttctgcaagcacaatggtagcaagaacgtcttcagcaccttccgaacccctgcagtgctgttcacgggcattgtagctttgtacatagcctcaggcctcactggcttcataggtcttgaggttgtagcccagttgttcaactgtatggttggactactgttaatagcactcctcacctggggctacatcaggtattctggtcaatatcgtgagctgggcggagctattgattttggtgccgcatatgtgttggagcaggcttcttctcatatcggtaattccactcaggccactgtgagggatgcagttgttggaagaccatccatggataaaaaagctcaatagcatcttaacgtgaagatcaaacaagaacacaacaagcccctactgatttctgggtttctgccacggccacaggttcatatccagaggaatggcagatctgagacgatccaggaagagctaaaacatggccctgtaataaatgagcagacctctcctgtggtttcaaattattaaacacacttccatttc

SEQ ID NO: 15369 - protein, 541 aa, Homo sapiens [sequence omitted]

SEQ ID NO: 15370 - DNA, 1671 bp, Homo sapiens
  CDS (317)..(985)
aggaagtgcgcgcggccccgcccccgccggttcgcgtctctctgctgcggcgcggggaccgctgtgctctcggaagccatcttcgacaagagcacagggaaggttgttttgaagacgttcagcctctacaagaagctgctgactcttttcagagctggccacgaccaggtggtggtcctgctccatgatgtccgtgatgtgagcgtggaggaggagaaggtccggtacttcgggaaaggctacatggtggtgctccggcttgcgacgggcttctcccaccccctcacgcagagtgcagtcatgggccaccgcagtgatgtggaagccatcgccaagctcatcaccagcttcctggagctgcactgccttgagagccccacagagctgtctcagagcagcgacagtgaggccggtgaccctgcaagccagagctgacagccccactgtgcctgagcccgtgcaccgcccacaggacccatggcacattcccggtgtgcctgagcccgtgcaccgcccacaggacccgtggcacattcccggtgtgcctgagcccgtgcaccgcccacaggacccgtggcacattcccggtgtgcctgagcccgtgcaccgcccacaggacccgtggcacattcccggtgtgcctgagcccgtgcaccgcccacaggacccgtggccttggcttcagttggtgcctccagccgagttggcctattgcctgctcatgctgctgcttgcacactgcatgaaacagcaggccagaccaggacatccagactttctccatcgtgaggcctgggcctgcctttctgcagccggaggtctcgccagccctggactcctgctttgggccacagcaagacctcgggcgagtggagaggcggggccaggccgggcccttgtgggtgctgatgctgcatgttgtccccgacacagcgtcctctccctggtggacatccccagcggtcaggtgcttccccaagggcagtgaggggtgaacatccagggcctacctggctgtgcacgctgcagccacactgtggaagctgcccctccccgaggacccgcctcccttgctgatgccaggatctcggcgcatagaccactctgccccagcggtcgtcacagaaaggtctctctgttcctcacactcagcttcagcataagctgtgaggccagaaaaaaggtcagctcttctagtatcgtgcagtgcttaaaaaccgggagctccagccgggcgcagtggttcatgccagtaatcccagcactttcggaggccgaggtgggaggattgcttgaggccaggagttcaagaccagcctgggcaacacagcaagatcctgtctttgtaaaaaaactaaccaaacaggtgcggtgtgcaccgagcgcgcctggcctgatgccctggcctgtgagctggggactcctgggccctgtgagcccctaggcggcaggcccaggaacggctgggtaggacagggaacacctttgccccacgtctggctgtgacctcggtgaaagccgacaggagagagatgggaccctcctcctcagtagtggctgccagtccctcgttgcaggacagggtcatcataaccataaataacccttcacgtgtcacctgcagcttccactctttatttccaaagaatcagtgtcacacatgcagatcac

SEQ ID NO: 15371 - protein, 223 aa, Homo sapiens
MWKPSPSSSPASWSCTALRAPQSCLRAATVRPVTLQARADSPTVPEPVHRPQDPWHIPGVPEPVHRPQDPWHIPGVPEPVHRPQDPWHIPGVPEPVHRPQDPWHIPGVPEPVHRPQDPWPWLQLVPPAELAYCLLMLLLAHCMKQQARPGHPDFLHREAWACLSAAGGLASPGLLLWATARPRASGEAGPGRALVGADAACCPRHSVLSLVDIPSGQVLPQGQ

SEQ ID NO: 15372 - DNA, 1979 bp, Homo sapiens
  CDS (459)..(1373)
agtaggaagccgcggggtggtggcgagagaggacccaggtgtcctagcagtgggcgccgcggggcacacgctgggccaaggtgcaggcggccagggtgggagactgttcgccccgccctgagtactcctatcttgtttctccacctgttcgggagttggagatgtgcacctaaaggaggcgcatctggggacggacacatctggcactgaggccctcgccacctgcctcgccacctggcgaccctgaccccaccacactgccttgaggtaggaaaaggaggctcctcaaccacaacttctgacctcccagggtgtctgaggcctctaaagagcttagtttgcccctctgggaagtgaatccttggcttatggtgccggggggaccctggaggccccctcacacgaaggctgcttcttgcagagtcgctcaaaagtagggccccagggctcgcagcagcatgggcaccgagaaagaaagcccagagcccgactgccagaaacagttccaggctgcagtgagcgtcatccagaacctgcccaagaacggttcttaccgcccctcctatgaagagatgctgcgattctacagttactacaagcaggccaccatggggccctgcctggtcccccggcccgggttctgggaccccattggacgatataagtgggacgcctggaacagtctgggcaagatgagcagggaggaggccatgtctgcctacatcactgaaatgaaactggtggcacagaaggtgatcgacacagtgcccctgggtgaggtggcagaggacatgtttggttacttcgagcccctgtaccaggtgatccctgacatgccgaggcccccagagaccttcctgagaagggtcacaggttggaaagagcaggttgtgaatggagatgttggggctgtttcagagcctccctgcctccccaaggaaccggcacccccaagcccagagtcccattcacccagggacctggactccgaggttttctgtgattccctggagcagctggagcctgagctggtttggacagagcagcgggcagcatctggaggaaagcgtgatcccaggaacagccccgtgccccccacaaagaaagaggggttgcggggcagcccgccggggccccaggagttggacgtgtggctgctggggacagttcgagcactacaggagagcatgcaggaggtgcaggcgagggtgcagagcctggagagcatgccccggccccctgagcagaggccgcagcccaggcccagtgctcggccatggccccttgggctcccggggcccgcgctgctcttcttcctcctgtggcccttcgtcgtccagtggctcttccgaatgtttcggacccaaaagaggtgactgtcagtggaggggtctctgcagccaactgagactatcttgctgtgccctgagccttcctagggtttagaagaacagcattcaaaattccccgtcctgtcagtgtttgccttcgcacctcctcccctaaagcagcgcggggggcaaataagaccccacccctccctgcagcttcacagggacgcttccttccctccccgcaaccaccccaggctcccctgggaggctgcagttgtggtacacgtccccggtgctgggttggccgtgactcgggggcggggcgatcgggtctcagcccctgccttccccagtctctgggtcacccgaattttcccacccctgcttctccccgaggaggttgagctcttgagcaagttgggacttgggctggggcctggaagaatgattggctgggaggccgcgggagggaggccaggaggcccggaccagttgggaggagtgagcaggccccgggggagggggatgagcgcagtttgctcgctttcctcccctgccggccccctccgcccccacacacactcgggacgtcttcattgaagattcacttacaaaggaatgtttcactaaataaaagaaaaccag

SEQ ID NO: 15373 - protein, 305 aa, Homo sapiens
MGTEKESPEPDCQKQFQAAVSVIQNLPKNGSYRPSYEEMLRFYSYYKQATMGPCLVPRPGFWDPIGRYKWDAWNSLGKMSREEAMSAYITEMKLVAQKVIDTVPLGEVAEDMFGYFEPLYQVIPDMPRPPETFLRRVTGWKEQVVNGDVGAVSEPPCLPKEPAPPSPESHSPRDLDSEVFCDSLEQLEPELVWTEQRAASGGKRDPRNSPVPPTKKEGLRGSPPGPQELDVWLLGTVRALQESMQEVQARVQSLESMPRPPEQRPQPRPSARPWPLGLPGPALLFFLLWPFVVQWLFRMFRTQKR

SEQ ID NO: 15374 - DNA, 1863 bp, Homo sapiens
  CDS (460)..(1233)
accctcggcgcgccgcgcgggatcagcgtcctccagccgcgctgccccggcccaccgtgcagctgtagccgcggcgcggtggcgcggtggcgcagggcgctgctgggccgcccattgttgagcgcgttgggccccgccggcgatgccgcgcgccgcctcctcggagcggcggcgaagtttgaacttggcgtcggcctggagccccgagcagcccgggggcggcggccgcgaggcgagcggcgatgagatgtgtgcacagacccaggccatgcagatactggtgcctctaacttcgtcagcccttagaacatgacttgctgtccccagtggagaagaaaccagaagctacagccaagtatgtcccctccaaagtccatttctgttcagtgcctgaaaatgaggaggatgcctccctgaagagacatctcacacctccccaaggcaacagcccacattccaatgagagaaagagcacccccacctcctccaccgagtcaggaaaccccggtgtatagcatggatgacttccctccacctcctccccacactgtatgtgaggcgcagctggacagtgaggatcccgaggggccacgccccagcttcaacaaactttctaaagtgacaattgcaagggaaaggcacatgcctggtgcagcccatgtggtaggtagtcagacactggcttccagactccaaacttctatcaagggttcagaggctgagtccacaccaccctccttcatgagcgttcacgcccaacttgctgggtctcttggtgggcagccagcacccatccagactcaaagcctcagccatgatccagtcagtggaactcagggtttagaaaagaaagtcagtcctgatcctcagaagagttcagaagacatcagaacagaggctttggccaaggaaattgtccaccaagacaaatctctagcagacattttggatccagactccaggctgaagacaacaatggacctgatggaaggtttatttccccgagatgtgaacttgctgaaggaaaacagtgtaaagaggaaggccatacagagaactgtcagctcttcaggatgtgaaggcaagaggaatgaagacaaggaagcagtgagcatgttggttaactgccctcagatttcattcccaaggctggggccctggctctgcccccaaacctcacgagtgagcccattcctgctgggggctgtactttcagtggtattttcccaacattaacctctccactttaacctcttctaaaatacccaaccaaaagatcactgtttctctcaacactatttaatctgaaaaatgtttcagtacaaaccactgtttgaactatctgggttattggtgtttgttcctgatgaaaggaaaaaaaattctctccaggaggaagcctttttccttcttgcccttcctgattgatcttctgagagctcgaatgctgctggacacgtacccctttctattattactttgtagtagaaagaaagttaatgaaactgagaactgattggagggtgtttgatcatttagtttttaacaggctgaggcaacatggatcagtgtgtgtccccctcaggaatgtatccacagtggccttccttgctggtgggcagtgtatcctgatggcagggtacaagtaccattaatgaagggtctgcaacataaagccttaaaaagacacacactaagaaaactgtaaaaccttgaacattgttatttatattttttaaaatggaaaagatcactatgtttgttgtgctaaccacttatttgattctgttttgtggtggacatagatgattacgtttgagctttgtattttgtgaaaaccttaatgaaatgaattccaaagat

SEQ ID NO: 15375 - protein, 258 aa, Homo sapiens [sequence omitted]

SEQ ID NO: 15376 - DNA, 1543 bp, Homo sapiens
  CDS (88)..(939)
actctgccccacagccacagcccctgactgccgcagcccccacagagcccgccgcgcaccccacgtcccccacgccagcgcccagccatggaggccatcaagaagaaaatgcagatgctgaagttggacaaggagaatgccatcgaccgcgcggagcaggcggaggcggataagaaagccgctgaggacaagtgcaagcaggtggaggaggagctgacgcacctccagaagaaactaaaagggacagaggacgagctggataaatattccgaggacctgaaggacgcgcaggagaagctggagctcacggagaagaaggcctccgacgctgaaggtgatgtggccgccctcaaccgacgcatccagctcgttgaggaggagttggacagggctcaggaacgactggccacggccctgcagaagctggaggaggcagaaaaagctgcagatgagagtgagagaggaatgaaggtgatagaaaaccgggccatgaaggatgaggagaagatggagattcaggagatgcagctcaaagaggccaagcacattgcggaagaggctgaccgcaaatacgaggaggtagctcgtaagctggtcatcctggagggtgagctggagagggcagaggagcgtgcggaggtgtctgaactaaaatgtggtgacctggaagaagaactcaagaatgttactaacaatctgaaatctctggaggctgcatctgaaaagtattctgaaaaggaggacaaatatgaagaagaaattaaacttctgtctgacaaactgaaagaggctgagacccgtgctgaatttgcagagagaacggttgcaaaactggaaaagacaattgatgacctggaagagaaacttgcccaggccaaagaagagaacgtgggcttacatcagacactggatcagacactaaacgaacttaactgtatataagcaaaacagaagagtcttgttccaacagaaactctggagctccgtgggtctttctcttctcttgtaagaagttccttttgttattgccatcttcgctttgctggaaatgtcaagcaaattatgaatacatgaccaaatattttgtatcggagaagctttgagcaccagttaaatctcattccttcccttttttttttcaaatggcaccagctttttcagctctcttattttttccttaagtagcatttattcctaaggtaggcagggtatttcctagtaagcatactttcttaagacggaggccatttggttcctgggagaataggcagccccacactttgaagaatacagaccccagtatctagtcgtggatataattaaaacgctgaagaccataaccttttgggtcaactgttggtcaaactataggagagaccagggaccaccctattcctatttattcagcaccacactacccaggaaatacactagcaaattgtgcaatggaataaaatccacactttagattcttgcaactgtatcatatgtaatagtatcactttttctacattttggtcaaataaatttttacataaactac

SEQ ID NO: 15377 - protein, 284 aa, Homo sapiens
MEAIKKKMQMLKLDKENAIDRAEQAEADKKAAEDKCKQVEEELTHLQKKLKGTEDELDKYSEDLKDAQEKLELTEKKASDAEGDVAALNRRIQLVEEELDRAQERLATALQKLEEAEKAADESERGMKVIENRAMKDEEKMEIQEMQLKEAKHIAEEADRKYEEVARKLVILEGELERAEERAEVSELKCGDLEEELKNVTNNLKSLEAASEKYSEKEDKYEEEIKLLSDKLKEAETRAEFAERTVAKLEKTIDDLEEKLAQAKEENVGLHQTLDQTLNELNCI

SEQ ID NO: 15378 - DNA, 1509 bp, Homo sapiens
  CDS (402)..(749)
tcatgtgctctgacgccctcccattaggtgcatccaagctgcaatgcccacttcctcctggcaggggggacccgcaggcaccttctgctcagaggtgcacttgtctggtggccctgctccttcctggtactgttgacctttctgtgtgtttgttttaaatctcttgcatggtaaatagctgcattttgttactgataagagtgagtttaaatccactgtcatatcttttgcgtctttgttacacattttgttttttaaaaatcttctttcttgtccttttttagattgacagtgtccctcttacctcactttctccactcagtttgtaatcctgcagtctgttgcttttcttttagcgtttgccctaaaggtggctgcatgtgtcctcactgaagtccagcatgggccccaaatgcaggctgaggtctgggtctggctgggctgctgggcgcccgagtcatcatgaccattgttcctgggcacagccggcgttgacttgtatttcctccgtgattaccgcctggctcatcaatcactgttttcgttttccgtggaggcgtggctcacacaaagggcaagcacggagtcactgggtcctgcaggactttccaggtcaaggcagaggaggtgtccggtccccagcaggctcctgtgtgcccctcagtcccctagagggtcacggccacctgaccgccaccactagaggttttggcgattgtgctgtgtggtgggtcttcccggcctctgcttagcacagcagtgctgctgcccatccttcctccttgccaggtagtgccgggtgctgctgcccatccttcctctgccgggcagtgccgggtgctgctgcccatcctttctccttgccgggtagtgccgggtgctgctgcccatcctttctccttgccggacagtgctgggtgccgtgtgggctgcactgtgtgtgtgtttctaggtgatggacattcagattgttttttggtttggggctgctggggatggcgatgctttgaatgttcctgggagtgtctgttggtgggtagagcatgcatttctctttcgtgtgtatataggagtggaatcaaggccgggcactgtggctcatacctgtaatcccagcagtgtgggaggctgaggcaggaggattacctgaggtcagaagtttgcgaccagcctggccaacatggcaaaaccccgtctctactgaaaatataaaaattggccaggcatggccaggcgcagtggctcacccctgtaatcccagcactttgggaggctgaggtgggtggatcacgaggtcaggagatcgagaccatcctggctaacatggtaaaaccccgtctctactaaaaatataaaaaattagccaggcgaggtggcaggcgcctgtagtcccagctactcgggaggttgaggcaggagaatggtgtgaacccaggaggcggagcttgcagtgagttgagattgcaccactgcactccagcctgggcgacagagcaagaactctgtctc

SEQ ID NO: 15379 - protein, 116 aa, Homo sapiens
MGPKCRLRSGSGWAAGRPSHHDHCSWAQPALTCISSVITAWLINHCFRFPWRRGSHKGQARSHWVLQDFPGQGRGGVRSPAGSCVPLSPLEGHGHLTATTRGFGDCAVWWVFPASA

SEQ ID NO: 15380 - DNA, 1802 bp, Homo sapiens
  CDS (923)..(1801)
caaggagaatgcgctcttcaagcggatcttgaggtgttatgaacataaacagtatagaaatggattgaaattctgtaaacaaatactttctaatcccaaatttgcagagcatggagaaaccttggctatgaaaggattaacattgaactgtttggggaaaaaggaagaagcttatgaattggttcgtagaggtttgagaaatgacttgaagagtcatgtgtgttggcacgtttatggccttcttcagaggtcagacaagaagtatgatgaagccattaagtgttacagaaatgcactaaaatgggataaagacaatcttcaaatcttaagggacctttccttactacagattcaaatgcgagatcttgagggttacagggaaacgaggtatcagttacttcagcttcgacctgcgcagagagcatcatggattggttatgctattgcttaccatttattagaagattatgaaatggcagcaaagattttagaagaatttaggaaaacacaacagacatcccctgacaaggtggattatgaatatagtgaactactcttatatcagaatcaagttcttcgggaagcaggtctctatagagaagctttggaacatctttgtacctatgaaaagcagatttgtgataaacttgctgtagaagaaaccaaaggggaacttctgttgcaactatgtcgtttggaagatgctgcagatgtttatagaggattgcaagagagaaatcctgaaaactgggcctattacaaaggcttggaaaaagcactcaagccagctaatatgttagaacggctaaaaatttatgaggaagcctagactaaatatcccaggggactggtgccaagaaggctgccgttaaactttttatctggtgagaagtttaaagaatgtttggataagttcctaaggatgaatttcagcaagggttgcccaccagtcttcaatactttaagatcattatacaaagacaaagaaaaggtggcaatcatagaagagttagtagtaggttatgaaacctctctaaaaagctgccggttatttaaccccaatgatgatggaaaggaggaaccaccaaccacattactttgggtccagtactacttggcacaacattatgacaaaattggtcagccatctattgctttggagtacataaatactgctattgaaagtacacctacattaatagaactctttctcgtgaaagctaaaatctataagcatgctggaaatattaaagaagctgcaaggtggatggatgaggcccaggccttggacacagcagacagatttatcaactccaaatgtgcaaaatacatgctaaaagccaacctgattaaagaagctgaagaaatgtgctcaaagtttacaagggaaggaacatcagcggtagagaatttgaatgaaatgcagtgcatgtggttccaaacagaatgtgcccaggcttataaagcaatgaataaatttggtgaagcacttaagaaatgtcacgagattgagagacattttatagaaatcactgatgaccagtttgactttcatacatactgtatgaggaagattacccttagatcatatgtggacttattaaaactagaagatgtacttcgacagcatccattttacttcaaggcagcaagaattgctatagagatctatttgaagcttcatgacaacccccttacagatgagaataaagaacacgaagctgatacagcaaacatgtctgacaaagagctaaagaagctacgtaataaacaaagaagagctcaaaagaaagcccagatag

SEQ ID NO: 15381 - protein, 293 aa, Homo sapiens
MNFSKGCPPVFNTLRSLYKDKEKVAIIEELVVGYETSLKSCRLFNPNDDGKEEPPTTLLWVQYYLAQHYDKIGQPSIALEYINTAIESTPTLIELFLVKAKIYKHAGNIKEAARWMDEAQALDTADRFINSKCAKYMLKANLIKEAEEMCSKFTREGTSAVENLNEMQCMWFQTECAQAYKAMNKFGEALKKCHEIERHFIEITDDQFDFHTYCMRKITLRSYVDLLKLEDVLRQHPFYFKAARIAIEIYLKLHDNPLTDENKEHEADTANMSDKELKKLRNKQRRAQKKAQI

SEQ ID NO: 15382 - DNA, 1769 bp, Homo sapiens
  CDS (78)..(851)
aaaacccagtgactcacctccgccgtgctaactcctcgctagctctccctctcacacacgctcacacccggctcgagatggcggcggcggcggcggcggcgggggactcggactcctgggacgccgacgccttctccgtggaagacccagtgcggaaggtggggggcggcggcactgccggcggggaccgctgggaaggcgaggacgaggacgaggacgtcaaggataactgggatgacgatgatgatgaaaaaaaagaggaagcagaagtaaaaccagaggtaaaaatttcagaaaagaaaaaaatagcagagaagataaaagagaaagaacggcaacagaagaaaaggcaagaagaaattaaaaagaggttagaagaacccgaagaacctaaagtgctaacaccagaagaacaattagcagataaactgcgactaaagaaattacaggaagagtcagacctcgaattagcaaaggaaacttttggtgttaataatacagtttatggaatagatgctatgaacccatcttcaagagatgactttacagagtttggaaagttactaaaagataaaattacacaatatgaaaagtcactatattatgccagttttttggaagtcttagttcgagatgtgtgtatttcattggaaattgatgacttgaaaaaaattaccaattcactgactgtgctttgcagtgaaaaacagaagcaagaaaagcaaagcaaagccaaaaagaagaagaaaggtgtggttcctggagggggattaaaagccaccatgaaagatgatctggcagattatggtggttatgatggaggatatgtacaagactatgaagacttcatgtgacattttatcttttcttggtgtcatctttatgttgcccacaatcccttgaacatgtagcacaacttcctttcctttcagttctgccaaatgctacaatcagaagtgcagtatcttttgtgctggttatttaaccccttgacacttaggtgctaatgtgcaaatgagggaacttggatcttgctgccaaggggttaaaattgggaacctaagttgctactaaatcatagttcaaaacctaataatgttgtcgttgttgctatctgatttcatagcagcagtcactaaattggaaacaaaaggttgcaacgtgacaaaaaaaattgtgtagtatttaccagcaccattcagtaatacagccttaaccatacctccttgaactacttcataacttgtcaagaaaagcagtttgcagcaagggcatgtggtgtgcacctagtattaaaattgctttgtcttaaaattgaacatgaggatattaaaaatacattgtgaagaagactgcttatctcagagtgaagatactgcggctgaaaagcactagtttgatataaaattaaaatgaccaaaaccctccaactttgaagctaaagaaggtaaacctttccattattgcattacatgttgtggaatctctcgagtgcaaagactgtctagttatttatcaggctatttctactgatgaactgcttcaggtgggggagggaaacttatttttatttgcctgatttaagtgtctgagaaacaaatctttgttctcttaggctgcaatggaacaactttaccagggttttggcatttcctttcctttcctttataaaacatgctcagcaaactgcaccagttaactacagtttggtaaattgttatgttaacaattatgacatctgcaatgttttataaagcaactaatttaat

SEQ ID NO: 15383 - protein, 258 aa, Homo sapiens [sequence omitted]

SEQ ID NO: 15384 - DNA, 2202 bp, Homo sapiens
  CDS (232)..(2202)
attctcgggagaggaatcggttaggagaagggggattcctcactcagctgtgcgctctgatttcgtgcgcttcctcgtccttcatgttggatggccagtttttcgtttgtgcgtcatcctctacctgagaaatggtcgcttgcccctagtctagacacgcattaaagggcagtatttaaagtcagttggcaagcagtggaataagatttttgtaaagaaaccttgtgcagcatggattctctaccagatgaattttttgtgaggcatcctgctgtggaggatcagaggaaggaagaaactgagaataagctagaaaaatcatctggtcaactgaacaaacaggaaaatgacatacctactgatcttgtccctgttaacctactattagaagtgaagaagttattaaatgcaattaatactctaccaaaaggtgtggttcctcacattaagaagttcttacaagaagatttttccttccaaactatgcagagagaagttgcagctaacagccagaatggtgaggaaattgttcctgctttgactttacgtttcttgattacacagctagaagcagcacttaggaacattcaagctggcaattataccgcacaccagattaatattggttattatttgacattactgtttttatatggagtagcactcactgaaagaggaaagaaagaggattatacagaagctgagaataaatttctggtgatgaagatgatgatccaagaaaatgaaatttgtgaaaactttatgtctttagtttattttggacgtggtttactgcgatgtgctcaaaagagatataatggaggactgctagaatttcataaaagcttacaagaaattggagacaaaaatgaccattggtttgacatagatcctacagaagatgaagatttacctacaacttttaaagatcttcttaataattttatcaagacaactgaaagcaatataatgaagcagacgatttgtagttacctagattgtgaacgatcttgtgaagctgacattttgaagaacaccagttataagggattttttcagttaatgtgcagtaaaagttgctgtgtttatttccataaaatttgctggaaaaagttcaagaatttaaagtatccaggtgaaaatgatcagagttttagtgggaaaaaatgtttgaaggaaggatgtacaggtgacatggtaaggatgctgcaatgtgatgtacctggaattgttaaaattttgtttgaagttgtgagaaaggatgaatatatcaccattgaaaatttaggagcaagttatagaaagttgatatctctgaaaataactgatactgatataagaccgaagatcagtttaaaatttaatacaaaagatgaaatgcctatcttcaagcttgattataattatttctatcatctgcttcatataattattatttctggtactgacattgttcgacaaatatttgatgaggctatgccacctcctcttttgaaaaaagagcttcttatacacaagaatgtgctggaatcctactacaaccatctttggaccaatcatcctttgggtggatcatggcatctgctttatcctcctaacaaggagttaccgcaatccaaacagtttgacttatgcctcctgttagctcttataaaacatttaaatgtgttccctgcacccaaaaaaggatggaatatggaaccgccatcttctgacatctctaaatctgcagacatcctgagactgtgcaaatacagggatatcctccttagtgagattttgatgaatggtctcactgagtcacagttcaattcaatttggaaaaaagtttcagatattcttctgcgccttgggatgatgcaagaggatattgacaaagtgaaggagaatcccattgagaatatctcccttgattaccatcagctatctgtctacctaggcataccagtaccagaaatcatacagaggatgttatcctgctatcaacaaggaattgctctacagtcaataacaggcagtcagcgtattgaaatagaagagttacagaatgaggaagaagaactaagtccacctctcatggagtacaatataaatgtgaaatcacaccctgagatacagtttgcagaaattaataaagatgggacctcaatacccagtgaatcttcaacagaatctcttaaagatctccaggaagttaagagt

SEQ ID NO: 15385 - protein, 657 aa, Homo sapiens
MDSLPDEFFVRHPAVEDQRKEETENKLEKSSGQLNKQENDIPTDLVPVNLLLEVKKLLNAINTLPKGVVPHIKKFLQEDFSFQTMQREVAANSQNGEEIVPALTLRFLITQLEAALRNIQAGNYTAHQINIGYYLTLLFLYGVALTERGKKEDYTEAENKFLVMKMMIQENEICENFMSLVYFGRGLLRCAQKRYNGGLLEFHKSLQEIGDKNDHWFDIDPTEDEDLPTTFKDLLNNFIKTTESNIMKQTICSYLDCERSCEADILKNTSYKGFFQLMCSKSCCVYFHKICWKKFKNLKYPGENDQSFSGKKCLKEGCTGDMVRMLQCDVPGIVKILFEVVRKDEYITIENLGASYRKLISLKITDTDIRPKISLKFNTKDEMPIFKLDYNYFYHLLHIIIISGTDIVRQIFDEAMPPPLLKKELLIHKNVLESYYNHLWTNHPLGGSWHLLYPPNKELPQSKQFDLCLLLALIKHLNVFPAPKKGWNMEPPSSDISKSADILRLCKYRDILLSEILMNGLTESQFNSIWKKVSDILLRLGMMQEDIDKVKENPIENISLDYHQLSVYLGIPVPEIIQRMLSCYQQGIALQSITGSQRIEIEELQNEEEELSPPLMEYNINVKSHPEIQFAEINKDGTSIPSESSTESLKDLQEVKS

SEQ ID NO: 15386 - DNA, 1727 bp, Homo sapiens
  CDS (127)..(1290)
attgagattacttcagtggatcttgctctgggcaatgagacgggaagatgtgtggttttaaattggcagggaggaggaggagatgctgcttcctcccaagaagccttacaggcagctcggtccacaatgatcatatccagagtcccaaacatttctgtacatctgctacatgaaccccctgcactgactaatgaaatgtattgtttggttgtgactgttcagtcccatgaaaagacccaaatcagagatgtgaagctcactgctggcttaaaaccaggacaggatgccaatttaactcagaagactcacgtgactcttcatggaacagaactgtgtgatgaatcctacccggctttactcactgacattcctgttggagacttacatccaggggaacagctggaaaaaatgttgtatgttcgctgtggaacagtgggttccagaatgtttcttgtatatgtttcttacctgataaatacaaccgttgaagaaaaaggaattgtttgcaagtgtcacaaggatgaaactgtaacaattgaaacagtctttccatttgatgttgcggttaaatttgtttctaccaagtttgagcacctggaaagggtttatgctgacatcccctttctgttgatgacggacctcttaagtgcctcaccctgggccctcactattgtttccagtgagctccagcttgctccatccatgaccacagtggaccagctcgagtctcaagtggacaatgttatcttacagactggagagagtgctagtgaatgcttttgtcttcaatgcccatctcttggaaatattgaaggtggagtagcaaccgggcattatattatctcttggaaaaggacctcagcaatggagaatatccccatcatcacaactgtcatcactctgccgcacgtgattgtggagaatatccctctccatgtgaatgcagatctgccgtcatttgggcgtgtcagagagtcgtcacctgtcaagtatcacctacagaataagaccgacttagttcaagatgtagaaatttctgtggagcccagtgatgccttcatgttctcaggtctcaaacagattcgattacgtatcctccctggcacggagcaggaaatgctatataatttctatcctctgatggctggataccagcagctgccatctctcaacatcaacttgcttagatttcctaacttcacaaatcagctgctcaggcgttttatacctaccagtatttttgtcaagccacagggtcgactcatggatgatacctctattgctgctgcatgatgttcaagaccggcccttggctgttgttacagagatgttgggcagagctatgcaggtgtttcattgtgaactctagctttgatcatggtaaaaagttaaccttttctattttttaatggatgttataccaactattcagaggaactcatacttcaaaaatattaggaaaatctgtcttatagtttctctaataaatatctgaaatctcagtacgacatgaaagaatgtcagaccattgttattgttgaaagtcatttgatgaatggtaaattctatgaaaagtaagtgatttgcatgtataatatcaggaaaattaagcatcccaagtgtgactggacaaagagagcagatgcaccagtgcctgtgccataaagttccgaatcccccatgtgtctctttcagagctggccagaccggaaataaatcattctcat

SEQ ID NO: 15387 - protein, 388 aa, Homo sapiens [sequence omitted]

SEQ ID NO: 15388 - DNA, 2374 bp, Homo sapiens
  CDS (66)..(1532)
gctccaactcctgcagagctgagccggaggggaatccggaagggacacgctgaacaggcacagaaatgaataaaagtcgctggcagagtagaagacgacatgggagaagaagccaccagcagaacccttggttcagactccgtgattctgaagacaggtctgactcccaggcagcacagcccgctcacgattccggctacggtgatgacgagtctccgtcaacctcgtctggcacagctgggacctcctctgtgccagggctacctgggttttactttgaccctgaaaagaaacgctacttccgcttgctccctggacataacaactgcaaccccctgacgaaagagagcatccggcagaaggagatggagagcaagagactgcggctgctccaggaagaagacagacggaaaaagattgccaggatgggatttaatgcatcttccatgctacgaaaaagccagctgggttttctcaacgtcaccaattactgccatttagcccacgagctgcgtctcagctgcatggagaggaaaaaggtccagattcgaagcatggatccctccgccttggcaagcgaccgatttaacctcatactggcagataccaacagtgaccggctcttcacagtgaacgatgttaaagttggaggctccaagtatggtatcatcaacctgcaaagtctgaagacccctacgctcaaggtgttcatgcacgaaaacctctacttcaccaaccggaaggtgaattcggtgtgctgggcctcgctgaatcacttggattcccacattctgctatgcctcatgggactcgcagagactccaggctgtgccaccctgctcccagcatcactgttcgtcaatagtcacccagcaggaatagaccggcctggcatgctctgcagtttccggatccctggtgcctggtcctgtgcctggtccctgaatatccaagcaaataactgcttcagtacaggcttgtctcggcgggtcctgttgaccaacgtggtgacgggacaccggcagtcctttgggaccaacagtgatgtcatggctcctctgctgtttaatggctgccgctctggggaaatctttgccattgatctgcgttgtggaaatcaaggcaagggatggaaggccacccgcctgtttcatgattcagcagtgacctctgtgcggatcctccaagatgagcaatacctgatggcttcagacatggctggaaagatcaagctgtgggacctgaggaccacgaagtgcgtaaggcagtacgaaggccacgtgaatgagtacgcctacctgcccctgcatgtgcacgaggaagaaggaatcctggtggcagtgggccaggactgctacacgagaatctggagcctccacgatgcccgcctactgagaaccataccctccccgtaccctgcctccaaggccgacattcccagtgtggccttctcgtcgcggctggggggctcccggggcgcgccggggctgctcatggctgtcgggcaggacctttactgttactcctacagctaattctgcagggcacagcccagagccatgtggatttgacttacgggagtaaagcgtaactttttactgcatctaatgagggtgttttaagtgacactcagtgtacacagatcccatcctctggctgctaggagagaagtgctgaatgttccgtgtggagatgctcaggaaagttatttgagttaaattgctggctgagagagcttggaagtccttttcataaaaggtacctctttccttttcttattgaattcttagaacttagttaaccctccctgccttttcttaacaaaaaggacttttctaaggactgaagattggcaaaaacgaaaagcttcttcctccaagagcccattgaagaagcccagtgatgagacggtgagatggtttgagtcctcggtgcctgggtagcaggaagaaagacctgcatcctgcatctgtacttggggaagccagcggagaggacggggaggttacttctctaagtttctgcagaaatattgaaggctggagtttggaatccttaaacttggccttctcaaactcagcagcagatctccgggattctgctgttattatccaaaggcgttggaaggaaagatggatcttcttacatgctagaagttttaaacggtccttaacatgcctttgttcaagcaccttccagaatgtaaggttcagcagctctggtttctattacggtgacttgaatgtcagattcaagggcccggcgtcaaaggaaattggttttgactttttgtaatctaggagcgacagttcgtgagatgtttattcagtgttaaagagcctgtttttctaccaaacaataaaaccaagagaag

SEQ ID NO: 15389 - protein, 489 aa, Homo sapiens [sequence omitted]

SEQ ID NO: 15390 - DNA, 1722 bp, Homo sapiens
gttgtatatgctttttttttttccaaataaacttgtcaccctgcatgcccttggcaaataagtgaagcagaaataggaacacagtccacattcaagttgaggaacagtgtatctttaagagctgacctttgggtgacctggaaagggggaaagatggctaagcatggagagaaacgaggcaagagacaagctatgatacaacaccgcttcagcccctgccctcaatagcacacaacccacatatcagctttctctagagaaggaacctactgtttagtgctcctcactttgcaatgtttgtgctacgccagaatttctccagtttttttcattatcatccccctgagaaaaaaattacattgaatttaaattttccctaataagagaaattaaatatgaaagaataggattttgttgggtaagattgagctttggaaggtcacgaaccattattctatctaaggtgtgtgttttgttttgtttttttttgtttttttttgtttttttttttgcaatccctctccccctgaaccaatttcacattgggaatgcaggacctagactgctgaataaaaagctacttcttctataattgtcaggttctctccaatttctcagcttcctcaaagacatggggtggagttgggtgtgccatcactgagagagctctggaacttttgactcttagtgacatttttagatttaggggttcatggccttccacatgttgccaccaactggtgatctctgccccttcatgctgatcaagaaagtagaaactcctcgtcgccttcaggtttgcagtcgcagaaacattgcctgctgtggactgtcagcacaaaactgggacactggtgtcatttagactgtcagcagtgcacatgattgtacgatagactccaggcaaccatgtgcatctgtgcaagatgacctctgccccaagagaagggttacggtctaattaaatgtttaccaagatggtaccagtgggctctccccgtgtcctttggtgttattggagctggtgtatgacagactcaaggaaattttttaaggaaaatgaagaagaaatcaacctttatggttctctttcattggaagaggagaataaggaaagaaatggcaggtagagagggagggggaaaggaatagaaatggcatgtctttgatgctgtggcttgtgtggggacaatgggaagagcacagcaggcacaacatatctgtgttagtgccacgtggtgtctgttaagtatggccagagcctcacatataagtgaagagagttaagacaattcttgctctttgaacaataatagtctatagaatttctattggcaaaccatcccagacaacctgacctatcaaacaaaagcaaataatccctgtctcagaactgctggtctaaaagctagaaggggcatgataatggaaattgctagaaaagagagaatgctctactctctttcctgtgcctacctacccccatcctaaaccctgtaaaacagaatttcaaaatagatgtcaaatatgaagtaattcagacttccaaagaaggaaagagttctgcccagggcagtatgagcaaatccacagggatgttaagatttggtccaactcaaaggtttatgggcagtgagcctagagtctcttgagagtaaacccttgcatttgggacaaggagaatatgtgaagttcaggagtgctcacactagagcaagatcc

SEQ ID NO: 15391 - DNA, 1782 bp, Homo sapiens
  CDS (124)..(702)
gagtctggcctgcctgggctcggggtggggggtgtttacagacgcaccaaggcaggagagatggaagccgcccagagaactgccactccatagcctgtgggcatccaggggtgagcggcagcgatggcgtcccatggaggaaacacactggaaatcgtgcagaagatgggaagatgcaggctggagtgcggagaaggactgagaccctgcctggtagacggcaccgtcacagcagccgtctgcctgctaggaggagcgtctccaccagcagcaggccggcccctgagggagacagcagagagctggagtcctggccagccaggcggggatccttcagcaggacacaggggacacagcaggcaacaggagctcagaacgctctcggcgaccttgctgagtaacttgtggactttgtcgtctggccagtcatgcaggatccggcacaggacgtacagctcagcgctggggagggggtccctgaaaaagtcacctggtttaaagacaaaacgagatacgtccgtcagagacagaagaggagacagacacagaggagaaggccacgtggagacggaggcagagactggagtgatgcggccacaagcccagggacgcctggagcccccaggagctggaagaggcgggaaggatcctcccctagagcctctcagaaagaatcaaacacaactgcaatgggttgggtggtgacgtccaaaagatctgtccaagtcctaagccccagaacctgggaatgggacctcatttggataaagtttctttgcagatgtaattaaggatctggagatgggatcatcctggagtagggtgggccctaaatgcaatggcaggtgtccttctaagagacagaagaggagacacacagaggagaaggccacgtggagatggaggcagagactggagtgatgcggctacaagcccagggacacccggagcccccaggagctgggagaggcaggaaggatcctcccctagagcctccagagggagcacagccctgagatgccttgatctcagacctccggtctgcaggacagggagaggataaatagcaagctatctggcaaatcagaagcacagctatcatgatgtcctgcaggaggagctgtagggtggttatgttttgttttttttaaaaactagaaaagcatccaggaacctccgggggaggggtgtggaggtccccagcacctgcgcccacaggcctggccgctgtcggatggtgctgagttacagcacgtcagctgtctctttttttatttttattttttttgagatggagttttgctgtgttgcccaggctggagtgcagtggcgcgatctcggctcacggcaagctccgcctcccgggttcaagcgattctcctgcctcagcctccgaataagtgggattataggcacccgccaccatgcccggctaatttctgtgattttagtggagatggggtttcaccatgttgctccggctggtctcaaactcctgacctcaggtgatccacccgcctcagcctcccagacggctgggattccaggcgtgagcctgggcacgtggcccaggcgtctcctgtcaatccgtcctggcctcagcagctgccacctggaagttctccttcaagtctaacctaaggccgccctgtgacggctctcgggtcagttccttctgtgacctcggcaccgtggatgcccatgaatgctgatctcggctgttccccatctccactcccctcccgtctcggctatttgcactgatgataacttcacacagcc

SEQ ID NO: 15392 - protein, 193 aa, Homo sapiens
MASHGGNTLEIVQKMGRCRLECGEGLRPCLVDGTVTAAVCLLGGASPPAAGRPLRETAESWSPGQPGGDPSAGHRGHSRQQELRTLSATLLSNLWTLSSGQSCRIRHRTYSSALGRGSLKKSPGLKTKRDTSVRDRRGDRHRGEGHVETEAETGVMRPQAQGRLEPPGAGRGGKDPPLEPLRKNQTQLQWVGW

SEQ ID NO: 15393 - DNA, 1772 bp, Homo sapiens
  CDS (350)..(1501)
acacggcgggggcgccctcggaggcaccggacctcagctctctggacttcccgggaacctggctccccgcgcgtggtcccgggatttagtcgggcgctccccacctctggcagctgcggccccggactccgccagcgctgtcttctctccctcaggtccagccgccgcagggaatgacgccggtgctcctacagccacggctccgggcggggaaggcgagccccacagccggccctgcgacgcccgcctgggcagcaccgataaggagctgaaggcaggagccgccgccacgggcagcgcccccacagcgccagggaccccctggcagcgggagccgcgggtcgaggttatggatccagcgggcggcccccggggcgtgctcccgcggccctgccgcgtgctggtgctgctgaacccgcgcggcggcaagggcaaggccttgcagctcttccggagtcacgtgcagccccttttggctgaggctgaaatctccttcacgctgatgctcactgagcggcggaaccacgcgcgggagctggtgcggtcggaggagctgggccgctgggacgctctggtggtcatgtctggagacgggctgatgcacgaggtggtgaacgggctcatggagcggcctgactgggagaccgccatccagaagcccctgtgtagcctcccagcaggctctggcaacgcgctggcagcttccttgaaccattatgctggctatgagcaggtcaccaatgaagacctcctgaccaactgcacgctattgctgtgccgccggctgctgtcacccatgaacctgctgtctctgcacacggcttcggggctgcgcctcttctctgtgctcagcctggcctggggcttcattgctgatgtggacctagagagtgagaagtatcggcgtctgggggagatgcgcttcactctgggcaccttcctgcgtctggcagccctgcgcacctaccgcggccgactggcctacctccctgtaggaagagtgggttccaagacacctgcctcccccgttgtggtccagcagggcccggtagatgcacaccttgtgccactggaggagccagtgccctctcactggacagtggtgcccgacgaggactttgtgctagtcctggcactgctgcactcgcacctgggcagtgagatgtttgctgcacccatgggccgctgtgcagctggcgtcatgcatctgttctacgtgcgggcgggagtgtctcgtgccatgctgctgcgcctcttcctggccatggagaagggcaggcatatggagtatgaatgcccctacttggtatacgtgcccgtggtcgccttccgcttggagcccaaggatgggaaaggtgtgtttgcagtggatggggaattgatggttagcgaggccgtgcagggccaggtgcacccaaactacttctggatggtcagcggttgcgtggagcccccgcccagctggaagccccagcagatgccaccgccagaagagcccttatgacccctgggccgcgctgtgccttagtgtctacttgcaggacccttcctccttccctagggctgcagggcctgtccacagctcctgtgggggtggaggagactcctctggagaagggtgagaaggtggaggctatgctttggggggacaggccagaatgaagtcctgggtcaggagcccagctggctgggcccagctgcctatgtaaggccttctagtttgttctgagacccccaccccacgaaccaaatccaaataaagtgacattccc

SEQ ID NO: 15394 - protein, 384 aa, Homo sapiens; identical to SEQ ID NO: 13997

SEQ ID NO: 15395 - DNA, 1928 bp, Homo sapiens
aatactatgtaagtgatgatgtactcttctcagtgtattggcttggagatacaggatgtcagtttgtcatgttattttattagaaatgataattctaatgccttagttgtgatggtgtcctttgggtttctgcactgcaaagttgctattttttcctttgtatttaataagtaatttgtggaaaggctaaatatcctgttcctcttcaaactttttagggattttagtgccagtgataattttttctttagtcagttattactgtaatggctgcaaaatagtgattatgtaactcttatttctcttaacatttattagttggcattctactttaaaaatgagctttcccactccgccacttatcacttagactcataaattcttattttatgtgtgagaaagtgtgtatgtgtgacttacaaatgtagcttatttgtatacatggtgtttaaaccgtatgtatgatttatatatactgtaattcattttgatgtgaacatcagattgttcctcttcaaacttgctctgtgacctttgatatgtctccatcatgtttttttttttagggtgtttttatagtttggcattaccaggatgttccaggcttatcttgtagtttccctgtttcttccttagaagcagccattttcaaaggcactctgattccttttagcggggaatggtaattaaaaaacaagatcagggtgctagctgtgctcctcatactagggcatccttatttccaggccttttcagcactcagagctaggaaagaattagcattttcaagatgaaatttccatgtgtgttttttaaaatacattttagtcatgaaatcatcatgtttcttttacttccatttgaacatcacaggattcttattcctatttctctttccctattccatattgcatctccttttttttccacaatgagaacgtggctcccagaatcttgaaatacacatataacagattcagaacttttactgttataagaaaacctattcagtagtttaggatttgtttacagttttttctttgtctctttttaggctaagggtatataattcagatattgggttcagaagtttcctacagagttgttatattaagaatttaaaatatataatttggtttattgtgtctgtttgtatgcagtcttagcatttatttttccttccatgttcactgatttattttttgcatatgtaaaacatctaacagttcgaaaggcaagagtatccaaaggtatatagaaacttgtcacatctttctctgtttctttcattcctgtcagaacagatttcatttcgtttctggtttgtttttcctgtgtttctttttacataaacaagcagatgcataaacatgtatatatatcctgttgctttgaaagagcatcttattagttctgtaaagtattggcaatattgcaaatatctgaactttttatgaagtatgtcaacagggataaaattaacttttttgggaactttactttgaaagagttattttgaaagggattttttataaaatagtataggtttttatgaaacacgtcagagtgttgctgttaactggttgcactaacaatacttatatccattgttgaagaatatagggaaagaaataccaaaatttttagtaagattttgtaaaattgcaaaaattaatattaagaattcatagaggcacagaaatgtattttttgattaatgtattgtaacctgatgtaaatccttagttcttttctcatttctgcattgacatcatactatgttgaagaatatttctaaaaatattctagagttaagaaagtgttgatagcacatctatatttaaatacttagtaccacagcaagtagtttatatgacttgagaatgatactgtaggaacatactaaaagactttagaaaaagcatgtc

SEQ ID NO: 15396 - DNA, 2361 bp, Homo sapiens
ggtaatgatgagggataggtagaaaagatgggaagggggtcagcttgtagataacctagactagcaggtgtatgacttctagtctctgaactggagccatctgagatcagtttgagatatggtgtcttataaatgtattgagagaggttgaggagttgtctatagaatggaatggagtgaggtcagagatcagtggcaaggaagaccacataaaggtttttgcacaaacttgccttgatggcaagtcctcaaaagtacaattatcaagctttctgtttaaacatgcataagtcagtaaatataaacattaaaatttgcccaagactcttaactcagttgtatttcataattaaagtgtacattaaaaagccaaactagtcatgaaagtattacatacagcaagggcagtttagataagttaatgttgctatgggaaccccagcagatctccttgtgtctccgtttaaaaatcatggcccaaggtggtttcaaaaacaacagaaggtaaaattattctcacattctcacacatgtaaattgtactgtctctctcagttctaaatagcggattcaagccagcctcttgactggcacagtaaaattcggcttcgtgtctttctataatgtattacagcatgtgagttaacctttagaagcttcaaaaatacatcaaccaaatttggactgtgagacacaaactggtctcttttgggctctgtccagcatagccttcctattccacatggctgcgcagcagggccatttccaccagtgtcttctgcttgcctggtcagtctttctgtctcttaacctacctacaacaacttccttctcggggtttgctgctagatagaaatgtagattttggcacagaaagaaaagggaaagacctatttggaattttgtccatagatgttaagaaatcatgaagcgttgcaaatgtaactgcttgggtattagtttaaaatatttgataactgcatgaaattctaatttacccctcacatccataaagctaggaccagttggttaggcagagtttgatatttaaaaattcatcttctgagagagctgaatttcaaaaggaccattttctttccaggagtaaaaggtatattctttcatcttcttacagtacagaaacaatggaatatattgtttaaatgcacccttcatttttttctccatttctaaaaattcacttttgagcatcgtccaaatgtaaaaattctcacacatgaggaactgtttccgaaggttgtgagaaagtcaagataacagtttctattattaaaagttttgcattcggtatgacacatttgcctgtattgaaacacccatttaacattgacttctgagaacttatttgctttgcctctctcgattccatatgctttgtctacaaattgtgaacacgtcccggtttctacccgtgtgtgattctaagtcgttgctgtactctagcttgtacgtgaaaattcacccatatgcagatagctgccctcttggaggcaaaacttaaagctatcagaaccatctggattgttaaaccccaaaacttccaactcatcaaagtcctgaagcctgaatagatcacacattgttacttctaattggttttgatgtttgttatgctcctcacaagtgcagataacttcacatttgcatcactaatcgacctctttcaaagcctctgctcctcctgcttcctgcctctgttagtcatcaggagacttagtgttggcgtgggtattttccccgcttgtgaaagtgcattgtcaattctagagcattaaatatatgtgaggtattgttattaatctacaaggcagtacacacagtattccagcaacagtgactttttcaaaggttttatgagacattgtaagaaagacagtatctttccatggaaaaaagtgttgcctcagagtcaaacaggaagcatgggtcctagttcctattgaactgcttagctactcttaatttagctctgaatgctagattttgtgtatactatacacattatttaatcctcaaactcctaggaattcattttgatgataaccatttacagaagagatgttgggtaacttgctcaggataccacatctagtaagtagcagagtcacaactcggacccagaactctctgattccaaaacctctacttgctgctctagtaatggatgggcccaaatgctgctgggaaaggcaccagggaagaaagagctttctgagtcaagcagaaaacgatagcagtggagaggagtttgtttcagacgaccttcaaggttatggctcattctagatccaatcattctagcaaataagtaggttacacttgtccacaattacaaattgg

SEQ ID NO: 15397 - DNA, 2103 bp, Homo sapiens
  CDS (211)..(972)
gatcagaaagagaaggccaccctcctgggcaacaagaaggactactgggattacttctgtgcctgcctggccaaggtgaaaggagccaatgatgggatccgatttgtcaagtctatctcagagctccgaacatccttggggaaaggaagagcatttattcgctactccttggtgcaccagaggttggcagacaccttacagcagtgcttcatgaacaccaaagtgaccagtgactggtactatgcaagaagcccctttctgcagccaaagctgagctcggacattgtgggccaactctatgagctgactgaggttcagtttgacctggcgtcgaggggctttgacttggatgctgcctggccaacatttgccaggaggacgctgaccactggctcttctgcttacctgtggaaaccccctagccgcagctccagcatgagcagcttggtgagcagctacctgcagactcaagagatggtgtccaactttgacctgaacagccccctaaacaacgaggcattggagggctttgatgagatgcgactagagctggaccagttggaggtgcgggagaagcagctacaggagcgcatgcagcagctggacagagagaaccaggagctgagggcagctgtcagccagcaaggggagcaactgcagacagagagggagagggggcgcactgcagcggaggacaacgttcgcctcacttgcttggtagctgagctccagaagcagtgggaggtcacccaggccacccagaacactgtgaaggagctgcagacatgcctgcaggccctggagctaggagcagcagagaaggaggaggactaccacacagccctgcggcggctggagtccatgctgcagcccttggcacaggagcttgaagccacacgggactcactggacaagaaaaaccagcattcagccagcttcccaggctggctagccatggctcatctctctgaataacagttacgtcttcatatcgataccagatgccttcttcatcatgccactgaagccactcaccaccttcaagaacatgccaacctctgtcagattcacttacccacaaacaaggaggcacgtttggcacaaagtgttgtcctccaggtccaagtggactctacagagtgcttgacctcaacacactggattccaggtggactggaccaagagcaggcaaagacacgggaactgaaaaactccacagggtttggagaatagaaatgaaaagccacgtcatataactcaagaataaatggtgttttggaaattttaaaattatcatcgaaggtggtgaaactatttcaggcccaaatgaaaggaaatcgccagttggggatgaaatcacagagcctgtgttttatgatatggttggatgtccactgatgaaattttaaaggagtttcatttttaaaagtgcgcatgattctacatatgagaattctttaggccaagaaactgtccttggctcagaggtgttgggaattaaagcagagagaagccattcgtgatgcttagaaccaaggatggtcatgtacacaaagaccatcgagacggccattcttgtttacaaaacacttaccaagaaagcactttgtaggggaactttagtaagttcttctcatttcattatgtttcttccaaggaaacaggagagactgaattaataattctctctttcctcttaagcacttttaaaataataaagtacatcttgaaatttgggggggcatctctgatttaaaaaaagaaaaaggctgcttgatgtatgttatgcagagacactctgcctctggtggctgcagagcaatacccaagcctcatttggaaggctcaacatttggaattgcactttaattgattaatcctcaattcatgtggccttacgggatggtgggtctgggaccccaattcattcttatctgccaaagaattatctagaagcacatcaaataccagcaccccacctgcacaatgggggtggaaaacttttgtatccctaagcatattatttcatagtgtctgccatgccatgtggaaatactttatttttaacctcaggatttaaataaagtaaacactatgacattt

SEQ ID NO: 15398 - protein, 254 aa, Homo sapiens [sequence omitted]

SEQ ID NO: 15399 - DNA, 2165 bp, Homo sapiens
  CDS (173)..(1081)
agagcggggtcccggcaccgcggcgctcgggtgtttttgggggcccgggtggagggcccgggtgccggggcccaaggtgcggcctcgctagcgggagagggagcgggatcaccggcccggagagagctctcagggccagagcggggcaggaggatgctttcccagccccaccatggagctgcgctgtgggggattgctgttcagttctcgctttgattcagggaatctagcccacgtggagaaggtggaatctttgtccagtgatggggaaggggtaggaggtggggcgtcagccctgaccagtggcattgcctcttcccctgactatgaattcaacgtgtggacccgaccagactgtgctgaaacggaatttgagaatgggaacaggtcatggttctacttcagcgtccggggaggaatgccaggaaaactcatcaagatcaacattatgaacatgaacaagcagagcaagctgtattcccagggcatggccccctttgtgcgcacactgcccacccggccacgctgggaacgcattcgagaccggcccacctttgagatgacagagacgcagtttgtgttatcctttgttcatcgtttcgtggagggccgtggggccaccaccttcttcgccttctgctaccccttctcctacagtgactgccaggaactgctaaaccagctagaccagcgctttccggagaaccaccctacccatagcagccccctggataccatctattaccatcgggagctcctttgctattctctggatggacttcgtgtagatctgctgacgatcacttcctgccatgggcttcgagaagatcgagagccccgtctagagcagctatttcctgataccagcacccctcgaccattccgtttcgcaggcaagaggatattcttcttaagcagtagagtacacccaggggagactccatctagctttgtcttcaatggctttctggacttcatcctccgacctgatgatccccgggcccaaaccctccgtcgcctcttcgtctttaagctgattcccatgttgaaccccgatggtgtggtccggggacactaccggtaagtggcttccccagcctgtctggactgttcccatttcccctcatgccctgcatctcagtgaaattctgtcagccttctggcttctgtgttcccagtcctcttgcaccctaataaaggcaagcccatctcatcttcctgagaaagcatgagatcatatctagtggcactcccagaaaggaaccaaactaggatgactgcaggcccatctgggtggaggcagctaccctgaggaagctccttagggttctatgcacagactcacgtggagtgaatctgaaccgtcagtacctgaagcctgatgccgtcctgcacccggccatctatggggccaaagctgtgcttctctaccaccatgtgcactctcgtctgaactcccagagttcctctgagcaccagcccagttcctgtctccctcctgatgctcctgtttctgacctggagaaagccaacaatctccaaaatgaagctcagtgtgggcactcagctgacaggcataacgctgaagcctggaaacaaacagagccagcagaacagaagctcaacagtgtgtggattatgccacaacagtctgcggggcttgaagagtcagcccctgataccatcccccccaaagagagtggcgttgcttactatgtggacctgcatggacatgcttccaaaaggggctgcttcatgtacggaaacagctttagtgatgagagcacccaggtggaaaacatgctatatccaaagctcatctccttgaattcagcccacttcgacttccagggctgcaatttctcagagaagaatatgtatgcccgagaccgtagagatggccagtctaaagagggaagcggccgtgttgcaatctacaaagcctcagggataatccacaggttgggtggaagctgagatatagttgatgaaatagcttccctaaagaaaacaccgtagctgggtgtggtggtgcatgcttgtaatcccagctactgaggaggctgaggcaggagaatcgcttgaacctgggaggcagaggttgtggcgagccgagatcgcgccattgcactccagcctgggcaacaagagcgaaactccgtctc

SEQ ID NO: 15400 - protein, 303 aa, Homo sapiens
MELRCGGLLFSSRFDSGNLAHVEKVESLSSDGEGVGGGASALTSGIASSPDYEFNVWTRPDCAETEFENGNRSWFYFSVRGGMPGKLIKINIMNMNKQSKLYSQGMAPFVRTLPTRPRWERIRDRPTFEMTETQFVLSFVHRFVEGRGATTFFAFCYPFSYSDCQELLNQLDQRFPENHPTHSSPLDTIYYHRELLCYSLDGLRVDLLTITSCHGLREDREPRLEQLFPDTSTPRPFRFAGKRIFFLSSRVHPGETPSSFVFNGFLDFILRPDDPRAQTLRRLFVFKLIPMLNPDGVVRGHYR

SEQ ID NO: 15401 - DNA, 2055 bp, Homo sapiens
  CDS (190)..(1350)
tttgatgctgtcttggaggccctgagccggggtgagcccgtggacctctcctgcctgccccctccacccgaccagctgcccccagacccaccgtcaccaccgtcgcagcctccgacccccgctacggcgccctccacaacagaggtgcccccacccccgaggaccctgctggaggcgctggagcagcggatggagcggtaccaggtggccgcagcccaggccaagagcaagggggaccagcggaaagctcgaatgcacgagcgcatcgtcaagcaataccaagatgccatccgagcccacaaggctggccgagccgtggatgtcgctgaattgcccgtgcccccaggcttccccccaatccagggcctggaggccaccaagcccacccagcagagtctggtgggtgtcctggagactgccatgaagctggccaaccaggatgaaggcccagaggatgaagaggatgaggtgcctaagaagcagaacagccctgtggcccccacagcccagcccaaagccccaccctcaagaactccccagtcgggatcagccccaacagccaaagcgccccccaaagccacatccaccagagcccagcagcagctggccttcctagagggccgcaagaagcagctcctgcaggccgcactgcgagccaagcagaaaaacgacgtggagggtgccaagatgcacctgcgccaagccaagggactggagcctatgctggaggcctcgcgcaatgggctgcctgtggacatcaccaaggtgccgcctgtccctgtcaacaaggacgactttgccctggtccagcggcctggcccgggtctgtctcaggaggccgcccggcgctatggtgaactcaccaagctcatacggcagcagcacgagatgtgcctgaaccactcaaaccaattcacccagctgggcaacatcactgaaaccaccaagtttgaaaagttggcggaggactgtaagcggagcatggacattctgaagcaagccttcgtccagggtctccccacgcccaccgcccgctttgagcaaaggaccttcagcgtcatcaagatcttccctgacctcagcagcaacgacatgctcctcttcatcgtgaagggcatcaacttgcccacacccccaggactgtcccctggcgatctggatgtctttgttcggtttgacttcccctatcccaacgtggaagaagctcagaaagacaagaccagtgtgatcaagaacacagactcccctgagttcaaggagcagttcaaactctgcatcaaccgcagccaccgtggcttccgaagggccatccagaccaagggcatcaagttcgaagtggttcacaaggggtgagctagagagagccatggccgctgggtgggctccaggggaggggagctcctctgaaccaaccatcctgtccccactatacacacatgcacacagggggctgttcaagactgaccgggtgctggggacagcccagctgaagctggatgcactggagatagcatgtgaggtccgggagatccttgaggtgagaggtggacattcatccgcgtgctccggtatggccatgctactcgttaacattattaaaacacttcctgccttgagccctctatgagcctgtctgttgacccagcccctcccctcagagcctcagacctccctactgcccagccctaaatacttgcagtaccccactccattatgatcaactggtatctcagccataccatgggctcatattttagaaaccactcttggccaggcatggtggctcatgcctgtaatcccagcactttgggaggctgaggcgggcagatcacgaggtcaggagatcgagaccatcctggctaacatggtgaaaccctgtttctactaaaatacaaaaaaattagccaggcatggtggcgggcgcctgtagtcccagctactcgggaggctgaggcaggagaatggcgtaagtaaacccaggaggcggagcttgcagtgagcccagattgcaccactgcactccagcctggacaacagagcgagactctatctcag

SEQ ID NO: 15402 - protein, 387 aa, Homo sapiens [sequence omitted]

SEQ ID NO: 15403 - DNA, 1848 bp, Homo sapiens
aaagaaagaatacatgtgaagaacttggaacagtgcctagaacatagtataggggttcaggtgttactaattataattatttataattgttatttttatttataattataattgttaacttttactgttaccattatttcctggctttacattggtttaagataatatctgtagggtatagtataatgttatccaaatattaaattacatatagtatgtttagttttatttagcattgttaagattactcagtgtcaaagggagcattttaaaattatttagtttttgagacggggtctcacactcacccaggttggagtatagtagcacaatctcagctcactgaagcctctgcctcctgggctcaagcagtcctcccacctcagcctcctgagtagcttgagaatacaggtgtgcacaccacactgcactgctttttaaattttttgtagatgtgaagtctcactgtattgaccaggctggtctcgaacttaggagatcaagcagtcttcctgcctcaccctccaaaggtgctgggattacaggcatgagctactgcacctggccagaggcaacattaaaaaaaaaaaaaaaagattgttgaggctttttaactcacaactcttggagacataaaacttctgttatctcaggcacttggtaaatctgaagcttcagagaaaagagggtcagggggtaggacatgatcaatttcagttatgttatagacttaatatgggaacaccttatatagtgcttgacattttatagaacattttttacttctgtttttagttaacatggatatttgtgtcagttcatcgataaggttctgaaatctagaaatataggtggtttctctcacttacacgattattatgtaatatacttgagcttaagaatccaagattctggatagcattgtttctttgggaaaatgtagattctaagttccgaacagttgatttcctaaatatctttcagttctcagccatttgtaagctgcgcttcacctgctactaatcttgctgttacttctgctatcccatctttaaatttttatcacaatttgaatgattggcaactatgatcatcttatgtctttagtaacagtaagcaaaatttacatgtttttaaaggaaaatttaatttctataaatattgttaaaaaggggttatttgtggatatgtaattttgttttggtgtatttttctgtaactttaaggaagcactaatctgtttagtgtttgttctgttttgccttgttgagaggttgattacttttaatatgaaataattttaaaaggaggctttttataaggttgtaggggctttttaaagttattgataccctttttttttttagtttgtagataactgctatagagatcagtaccattgcatattttgcatagtgtagaaccagtggtcattaatttttaaaactaccttatgcaagtgtagttttcaaggaaataaatacatagatgcatatacaattaaacaagaaaatgaaaacagtttaaaataggataaggaaatatacagatagaatactgagagtaataaatatggagagtgggtcagaattgtaacattgataggcattgcataaaccctgcagcatttttaagttaaacttgctctcattttgggtatcaagaaaattgcaggaaaacacaactagctctataatgagtattgcatataagaaaaagagactggacatggtggctcactcctttaatctcagcactttgggaggccaaggtgggagggtcacttgtggccaggagttcgagaccagtctgggtgacatagtgggacccctctctaaaaataaaatg

SEQ ID NO: 15404 - DNA, 1704 bp, Homo sapiens
  CDS (172)..(1359)
aggagagcgtccggattccctgctctaggtcgcggcgggacagtgccagtgggcgtgtggggcggggcagggcagggaagggaagggcggagctggggtgagggtccaaggggcccaggacttggccggcgtgatctcagctctgcagaccctgcggtgctgggagccaccatggagagtaggtgctacggctgcgctgtcaagttcaccctcttcaagaaggagtacggctgtaagaattgtggcagggccttctgttcaggctgcctaagcttcagtgcagcagtgcctcggactgggaacacccaacagaaagtctgcaagcaatgccatgaggtcctgaccagagggtcttctgccaatgcctccaagtggtcaccacctcagaactataagaagcgtgtggcagccttggaagccaagcaaaagcccagcacttcccagagccagggactgacacgacaagaccagatgattgctgagcgcctagcacgactccgccaggagaacaagcccaagttagtcccctcacaggcagagatagaggcacggctggctgccctaaaggatgaacgtcagggttccatcccttccacccaggaaatggaggcacgacttgcagcgttgcagggcagagttctaccttctcaaaccccccagccggcacatcacacaccggacaccaggacccaagcccagcagacacaggatctgctaacgcagctggcagctgaggtggctatcgatgaaagctggaaaggaggaggcccagctgcctctctccagaatgatctcaaccagggtggcccagggagcactaattccaagaggcaggccaactggtccttggaggaggagaagagcagactgctggctgaggcagcacttgagttgcgggaggagaacacgaggcaggaacggattctggccctggccaagcgactagccatgctgcggggacaggaccccgagagagtgaccctccaggactatcgcctcccagacagtgatgacgacgaggatgaggagacagccatccaaagagtcctgcagcagctcactgaagaagctgccctggatgaggcaagtggctttaacatccctgcagagcaggcttctcgaccctggacgcaaccccgcggggcagagcctgaggcccaggatgtggaccccaggcctgaggctgaggaagaggagctcccctggtgctgcatctgcaatgaggatgccaccctacgctgcgctggctgcgatggggacctcttctgtgcccgctgcttccgagagggccatgatgcctttgagcttaaagagcaccagacatctgcctactctcctccacgtgcaggccaagagcactgaagacaccctggtcctcccggaagggcagtcccacaggcagcggcacccatttctgggccccgccacaggacgtccgatgggagagcttgtctggctctactgatgatggataggccccttcctgagccttggtgtccctggaatgaggaaagattctccattcgagagaatgactgggagggaagaagtcggggccctcctattagaagcccagactggaagtgagaggcatgatggggagagaccagactgaatctacgggtgagccctgtaacctggctctagggcacaggcccctcccctggcacttagtgggtctaataaagtatgttgattcattgg

SEQ ID NO: 15405 - protein, 396 aa, Homo sapiens
MESRCYGCAVKFTLFKKEYGCKNCGRAFCSGCLSFSAAVPRTGNTQQKVCKQCHEVLTRGSSANASKWSPPQNYKKRVAALEAKQKPSTSQSQGLTRQDQMIAERLARLRQENKPKLVPSQAEIEARLAALKDERQGSIPSTQEMEARLAALQGRVLPSQTPQPAHHTPDTRTQAQQTQDLLTQLAAEVAIDESWKGGGPAASLQNDLNQGGPGSTNSKRQANWSLEEEKSRLLAEAALELREENTRQERILALAKRLAMLRGQDPERVTLQDYRLPDSDDDEDEETAIQRVLQQLTEEAALDEASGFNIPAEQASRPWTQPRGAEPEAQDVDPRPEAEEEELPWCCICNEDATLRCAGCDGDLFCARCFREGHDAFELKEHQTSAYSPPRAGQEH

SEQ ID NO: 15406 - DNA, 1843 bp, Homo sapiens
aaccaaaagagtcttcagaaactttgctagacctgaagtacttgaacctgtgtcccctgaatctttcttacagcatctgggacaaatccctggccctgtgacatccgaagcagaactgtgccctgctctctccttctgtgatgaccaaggatggtgaactcaagttgttctctacaagccaggccagcaacctaaatacttggagaggaacttttagaaactataatcctgacaaaatagaaaagtttcccataggggcataccataatactataataacctcccaggaactattgtttgccaaaatgtagttaatatattttaagatatatgcttttttgcataggactagaaccagaaaagacaccaaatgcccccttgacatcaatgtcctttctagtgggacaatttggtctccattaatgccaaacctttctgaacaggatacatggcttttaaagggcagatgtttctcctgctgctagaagttcctcagtttactagagcacaatgaggagagtattcaacctccctactgccaaggaattccctgcttctcccccaccgccatcatcttgtccaagctatcagaagcaaccttctagagataatctaacaatcctgattagaattgctcccatatccctggtgaccacaggcttcattcaaattgtccaaactggttaacatgtatgtgatggggtatctctgcatctgtatgtctgtctgcgaggttccttgtatattggctgtccgctgacttgggacagatctctctagaacttgggttcagttctctgacatagtccactcagccataggctgagtggctaaatatgcataaataagcatgcctaaataggcatatataggttggtgcaaaagtaattgcggtttttgccattaaaaatgatagcaaaaatctcaattacttttgcgtcaatctaatattacattgcttgatagattaagatggaatcccaccaggtttagggtaggactggatgctcaaaaaataaagaaggagaaaaatctgtggcagaggcatcctaatgagaacctgacttctccttgcttccctctgctctctcctgcgcctcagagacttgtccccattgcagaagcttcctccatgctaggccagaggatatcaaagtttagtttggtcaagatttgggccaagaaaattcctttttagaagagccctcatatctgaatcacatcactttgggccagttatctctggtcaccctcagacaaaccctcgtctctttttctcccttcctagaggaattcccagggaactttgcagaaataggtctccagagttgctacagaggttcatggctcctttcgaggagggacatgtatgaaatttgaacagatcaagacaggtgtttgtcttcaaccatgggggaagacctccagcttccattttcccctatacgtgtctgtgctgacatcctttccagcagtagaagactaaaaagatatatcttaacccattcctcaaaaggacatcttcctaaagccagagaaaattgtctgcgcttccccaccccaggaagaggcaaaagggaagtgagggcgtcacaaggtcttttgtaaatcactattgtgtttgtcacagcactgggcggagagctggatccacagagctctcagtttttctaagcactgtcctgtaatgtgctaatgtctgggggtgggagggctggggaggggtggggttagagggaagatgccaacctttgtatggagatgattttataaccatgcacttttgtaactgtgcagaatttttcataaatgtacattaataataaagagtgtatagtttaac

SEQ ID NO: 15407 - DNA, 1985 bp, Homo sapiens
  CDS (280)..(1857)
atttttggctgcctctgtcggtctgttcagttaccacgtgaaccgccgacggagacccgtagtgggggaggcggcggcagcgttaagtgagaaaggaaaaaagacaacgaggaaaaaggaggtgtccgggtagggcaacgcggcgacacccgaggcctggtggtggcggcggatcgagatattcaaggctgaagcagctacggaacggcagcggcggcggtcggacaaactgactgaccgagccgggtggtggcgggagcagcgggagcagccggaacgatgccggccgtgagcctcccgcccaaggagaatgcgctcttcaagcggatcttgaggtgttatgaacataaacagtatagaaatggattgaaattctgtaaacaaatactttctaatcccaaatttgcagagcatggagaaaccttggctatgaaaggattaacattgaactgtttggggaaaaaggaagaagcttatgaattggttcgtagaggtttgagaaatgacttgaagagtcatgtgtgttggcacgtttatggccttcttcagaggtcagacaagaagtatgatgaagccattaagtgttacagaaatgcactaaagtgggataaagacaatcttcaaatcttaagggacctttccttactacagattcaaatgcgagatcttgagggttacagggaaacgaggtatcagttacttcagcttcgacctgcgcagagagcatcatggattggttatgctattgcttaccatttattagaagattatgaaatggcagcaaagattttagaagaatttaggaaaacacaacagacatcccctgacaaggtggattatgaatatagtgaactactcttatatcagaatcaagttcttcgggaagcaggtctctatagagaagctttggaacatctttgtacctatgaaaagcagatttgtgataaacttgctgtagaagaaaccaaaggggaacttctgttgcaactatgtcgtttggaagatgctgcagatgtttatagaggattgcaagagagaaatcctgaaaactgggcctattacaaaggcttggaaaaagcactcaagccagctaatatgttagaacggctaaaaatttatgaggaagcctggactaaatatcccaggggactggtgccaagaaggctgccgttaaactttttatctggtgagaagtttaaagaatgtttggataagttcctaaggatgaatttcagcaagggttgcccaccagtcttcaatactttaagatcattatacaaagacaaagaaaaggtggcaatcatagaagagttagtagtaggttatgaaacctctctaaaaagctgccggttatttaaccccaatgatgatggaaaggaggaaccaccaaccacattactttgggtccagtactacttggcacaacattatgacaaaattggtcagccatctattgctttggagtacataaatactgctattgaaagtacacctacattaatagaactctttctcgtgaaagctaaaatctataagcatgctggaaatattaaagaagctgcaaggtggatggatgaggcccaggccttggacacagcagacagatttatcaactccaaatgtgcaaaatacatgctaaaagccaacctgattaaagaagctgaagaaatgtgctcaaagtttacaagggaaggaacatcagcggtagagaatttgaatgaaatgcagtgcatgtggttccaaacagaatgtgcccaggcttataaagcaatgaataaatttggtgaagcacttaagaaatgtcatgagattgagagaaaatcactgatgaccagtttgactttcatacatactgtatgaggaagattacccttagatcatatgtggacttattaaaactagaagatgtacttcgacagcatccattttacttcaaggcagcaagaattgctatagagatctatttgaagcttcatgactttttc

SEQ ID NO: 15408 - protein, 526 aa, Homo sapiens
MPAVSLPPKENALFKRILRCYEHKQYRNGLKFCKQILSNPKFAEHGETLAMKGLTLNCLGKKEEAYELVRRGLRNDLKSHVCWHVYGLLQRSDKKYDEAIKCYRNALKWDKDNLQILRDLSLLQIQMRDLEGYRETRYQLLQLRPAQRASWIGYAIAYHLLEDYEMAAKILEEFRKTQQTSPDKVDYEYSELLLYQNQVLREAGLYREALEHLCTYEKQICDKLAVEETKGELLLQLCRLEDAADVYRGLQERNPENWAYYKGLEKALKPANMLERLKIYEEAWTKYPRGLVPRRLPLNFLSGEKFKECLDKFLRMNFSKGCPPVFNTLRSLYKDKEKVAIIEELVVGYETSLKSCRLFNPNDDGKEEPPTTLLWVQYYLAQHYDKIGQPSIALEYINTAIESTPTLIELFLVKAKIYKHAGNIKEAARWMDEAQALDTADRFINSKCAKYMLKANLIKEAEEMCSKFTREGTSAVENLNEMQCMWFQTECAQAYKAMNKFGEALKKCHEIERKSLMTSLTFIHTV

SEQ ID NO: 15409 - DNA, 2085 bp, Homo sapiens
  CDS (24)..(1166)
gcgccgccaccgtctgaactaggatgtcccgacatgaaggtgtcagctgtgatgcatgtttaaaaggaaattttcgaggtcgcagatataagtgtttaatttgctacgattacgatctttgtgcatcttgttatgaaagtggtgcaacaacaacaaggcatacaactgaccacccaatgcagtgcatattaacaagggtagattttgatttatactatggtggggaagctttctctgtagagcagccacagtcttttacttgtccctattgtggaaaaatgggctatacggagacatctcttcaaggacatgttacttctgaacatgcagaaacatcaacagaagtgatttgtccaatatgtgcagcgttacctggaggcgatcctaatcatgtcacggatgactttgcagctcatcttacacttgaacacagagcccctagagatttagatgaatcgagtggtgttcgacatgtacgtagaatgtttcaccctggccggggattaggaggtcctcgtgctcgtagatcaaacatgcactttactagcagttctactggtggactttcttcttctcagagttcatattctccaagcaatagggaagccatggatcctatagctgagcttttatctcagttatcaggagtgagacgttctgcaggaggacagcttaattcctctggcccttccgcttctcagttacaacaactgcagatgcagctgcagctagaacggcagcatgcccaggcagcacggcaacaactggagaccgcacgcaacgcaacccggcgtactaacacaagcagtgtcaccactacaatcacacaatccacagcaacaaccaacatagctaatacagaaagcagtcagcagactctacagaattcccagtttcttttaacaaggttgaatgatcctaaaatgtctgaaacggagcgccagtccatggaaagcgagcgtgcagaccgcagcctgtttgtccaagagctccttctgtccactttagtgcgtgaagagagctcatcctcagatgaggatgatcggggggagatggcagattttggtgctatgggctgtgtagatattatgcctttagatgttgctttagaaaacctaaatttaaaagagagtaataaaggaaatgagcctccaccacctcctctttgatgacatcccaattcgcagacaatgtcctctgtgctgtatttgccaatgaaagtggacaacaactatcttgggtttgtttggtgattgtaatttcaggtctgtcactcttgttacattgtgtacattcaaaaggaagagagaaaatatatatgataatcatttccacttaactaatttttacttctagcaggtaaatgtaggtagcagtgcaggggtgatctctgcttcctgtaccttgacatgcaaaaggctctcctaatactccacattcaaactgaagaggaaaattgaaatctctaatgaagctgctgtgtgtatttatgaatattaatgaataaaaactgcttggatggtttaccttaactactgcatgaggttttttgcagcgtgcatgagttttagtgaccttgttatttaagaagttaaatacaaggagtaaaacttaaaaaaaaaatacaaagcccaaagctttcccaaacattattcaatggttacacgacgaagtagcttttgaataatgtctgcctgaatcacctttctttgtgtgcctcctacgcacaaagccagctctgcagtggaatctggggattatagccgggtgtggcactccgccctgtgtgactgtcctgtcgccctgttagtcatcttgcctgtgtggagctcagcctgtctctttaactcatctgtagaagacacaccagtaaagctactgttggaatctgctgcaggggcctttgtgtgccctaaaaacaaatcctgttcatgtttgtttaaagtttttactttttgtggttgtttaaaattttttcaattgttaaatatgttttattcaggtgtagatgaatttcatttattgactgttcaacagagttaacctgaattatgttgtctttgtttttaaaaatctcacattctc

SEQ ID NO: 15410 - protein, 381 aa, Homo sapiens
MSRHEGVSCDACLKGNFRGRRYKCLICYDYDLCASCYESGATTTRHTTDHPMQCILTRVDFDLYYGGEAFSVEQPQSFTCPYCGKMGYTETSLQGHVTSEHAETSTEVICPICAALPGGDPNHVTDDFAAHLTLEHRAPRDLDESSGVRHVRRMFHPGRGLGGPRARRSNMHFTSSSTGGLSSSQSSYSPSNREAMDPIAELLSQLSGVRRSAGGQLNSSGPSASQLQQLQMQLQLERQHAQAARQQLETARNATRRTNTSSVTTTITQSTATTNIANTESSQQTLQNSQFLLTRLNDPKMSETERQSMESERADRSLFVQELLLSTLVREESSSSDEDDRGEMADFGAMGCVDIMPLDVALENLNLKESNKGNEPPPPPL

SEQ ID NO: 15411 - DNA, 2490 bp, Homo sapiens
acaagcatgtgccaccacattcggctaattatttgtacagatggggtctccctgtgttgcccagctggtctcaaagctctgggctcaagcagtcttcccgcctcagcctccaaaactgctgaaactacaggtgtgagccactgtgcccagtctacacaatttaatcctaaaatactttgaagggaagaaagaggaaacgagtaaaaactgaaataatgcacaatttctagccttttgaaataaattctcagaaaactgggagagcgaagcacatttaagagtaaggtgactaaaaatgagccattggtaccaggtaccagtgacatttttgcctcaaatgttttatttatttcaaaaaattccaaatctacagaaaaactgaaagaatgatcctctatatatccttcatgtagactgatcaatcatgaacatgtgccacgtttccctcctctccctctctgtgtatactcacacacaatttttgctatgccatttgaaagcgatttgcagatatcacagcacttccctgctaaatgtttcagaagcatattctaaaaagtacgttttcgtacctatccataacaccattctcacataagaaacactgtcaccagtgactttttttttttaagctaaaagacaataaaagacaataaaagagggtggcaactagtgcttaacaaatcccagacagtcctctcaggactgaacacatattacacttccatgaagcaaatcatgttgtgaggacacttgagactcttctgaggttcaaataccttgctctttgccaccacacacttggtgagctctgatgtttggtgtcacacaagcacaggacagcactaagtctcctttggctcctcctcataggtgggccatgcagagatagacaccatgccctcaggatgccccctgaatgggcctcttccctcttaaccatgcttgctaattaggcgtttttccatcattgcctcaaaagaccctggacaaaggctctgagtaacatcacctgaatatgcaatataatacaccgccatttgaagtgggccctctctcttcccaatcacatgcagaccagccttccctgcttgcaaagtgccctccccaggatgctagtataagcacagagtaattcaatacattgagtaaccgactggttgactgggatctgggcctggacatggctagcctatcgaccttgtttcaaataaagcttgctttcagggtttatcagtatgctccataccatactgtaccagaaaaatataaaggataaaggatttgtgctaaaactcccacgttattaatatatttacatgacggcacacaccgcccccccccgcccaacatacacacaaaacccagaacctaaagctttccacagcttaagaaaacagtagtacttacgatgaatttagttaagttttcatttactttcaccacattcttggccatgtgctgcatgacttccaatacttcattctctgtgtatcctgtgtaatactgctgctttaagttctgaaacacaagaagcagacagacagacatgactgaggggcaagagaaaacctctgcttctttagaagaacacatcttgtacatgatgacattacttatgtaaaagctgtacaagaatattcttaccttctggaaattcaatcaaagccctaaccactctcacagtaccagcaacactaaagcagctggtaaatgcaagatgattctggccctgagaccagactaaatcaagtgccaaaggtcccataggatctttcaaagacgttgcacaggtaagagtccttcaagtaacaacactgaaaggggatggaaaaggagacacttaaaacaaagtgcccctttacagtgctggccacatctcacacaaccctgcatcaaagccctgcccagctgtccctgttatgagctcaagagcccaaacagacatactgtcagtcagggaaagatgttcggaaataagaaataaactgtgctacaagcaacaatctatcaaatccagaagaactaggactacctatgattctctcgttgaaccctgtgtagttaagcaccaaacagcagagagaacttagacactaccacaccaagccttgtgacctagcctcccaaagagtaaaattcaagtaaaagaacagctgtcaattgataataagatgtatcatgtaagaagatatataaatcggcggggcacagtggctcacgcctataatcccagcactttcggaggccaaggcaagaagatcgcttgagcttaagagtttcagaccagcttgggtaacattgggagaccctatctctatgaaaaatgaaaaattagccaagcttggtggtgtacacctatagtcccagttacttgaggagctgaggaggaaggattgcttgagcccagaagtttgaggtaatgagcgatattaacgccattgcactccagcctgggcaacacagtgagaccctgtctcaaaaaaaaag

SEQ ID NO: 15412 - DNA, 2034 bp, Homo sapiens
  CDS (73)..(1002)
aggtgcgcatgcgcagtgcgcgtctgcgagaccgacttggacggagccgagctgaggctcggcttcctgctgatggtcagggttttggcaactccccggtgtgagaggggtagggagtgctcccggcggcgacgggaccttaaggcctctgtgtggcagaaggatcagctggtgacacagccgcactggcaagaaaatggacccaccttttccagcacaccttaccgctaccaggcctgcaggtttgggcaggttccagaccagcctgctggcctgcgactcttcacagtgcaaattccccacaagcgccgggcgccagagctgtaccgggctccgttcccgttgtacgcgcttcaggtcgaccccagcactgggctgctcatcgctgcgggcggaggaggcgccgccaagacaggcataaagaatggcgtgcactttctgcagctagagctgattaatgggcgcttgagtgcctccttgctgcactcccatgacacagagacacgggccaccatgaacttggcactggctggtgacatccttgctgcagggcaggatgcccactgtcagctcctgcgcttccaggcacatcaacagcagggcaacaaggcagagaaggccggttccaaggagcaggggcctcgacaaaggaagggagcagccccagcagagaagaaatgtggagcggaaacccagcacgaggggctagaactcagggtagagaatttgcaggcggtgcagacagactttagctccgatccactgcagaaagttgtgtgcttcaaccacgataataccctgcttgccactggaggaacagatggctacgtccgtgtatggaaggtgcccagcctggagaaggttctggagttcaaagcccacgaaggggagattgaagacctggctttagggcctgatggcaagttggtaaccgtgggccgggaccttaaggccccctccctgctacctcacagcctgggatggctccaacttcttgccccttaagaccaagtcctgtggccatgaagtcgtctcctgcctcgatgtcagtgaatccggcaccttcctaggcctgggcacagtcactggctctgttgccatctacatagctttctctctccagtgcctctactacgtgagggaggcccatggcattgtggtgacggatgtggcctttctacctgagaagggtcgtggtccagagctccttgggtcccatgaaactgccctgttctctgtgactgtggacagtcgttgccagctgcatctgttgccctcacggcggagtgttcctgtgtggctcctgctcctgctgtgtgtcgggcttattattgtgaccatcctgctgctccagagtgcctttccaggtttcctttagcttccctgcttcctgggaatcaggagcctggacactgccatctctagagcagagtggaggcctggactccctttgctcactccattcgggtccacagctgaggttgcctctgacaagatgaatgggcactgcctgcccttctagtgaaaaggcttggctatggccctgtgtgactccaggtcccaggaaccttgccttcgtcatctgtggatccatccagaacagcggtatctgaagcccaggccatactccctgcctcctttcttctgcctaccagaggctccagagttgagcttgtcctttatctagaaacatgtgaagatgcccaagagcctggaggcactgctgtccttcctgcagaaacagtttctcctcctcccctcagccttgtggccagttcctcttcacatgaagcccctggcatttgctggggaagggactggcctggtacttgctgttagggcaggaaggggcaaaaggaagacttgggtagtaatctgggggttcagatgggtagcactaagccagctggcctaaagatgcaataagttcctaggtagtctacccttaccttgaggaatgggaaaatgaacctcagcccattaggcaggaaaagttgatatttaataaacaaggaaagagtgaactgagacccc

SEQ ID NO: 15413 - protein, 310 aa, Homo sapiens [sequence omitted]

SEQ ID NO: 15414 - DNA, 2036 bp, Homo sapiens
  CDS (66)..(1757)
ggttatacaaggtggagccacagctggctgaggaccagcccgtgcacggggaccttgacctcgtcatgaacctcatggatgcacacaaggttttccagaaggaactgggaaagcgaacaggaaccgttcaggtcctgaagcggtcaggccgagagctgattgagaatagtcgagatgacaccacttgggtaaaaggacagctccaggaactgagcactcgctgggacactgtctgtaaactctctgtttccaaacaaagccggcttgagcaggccttaaaacaagcggaagtgtttcgagacacagtccacatgctgttggagtggctttctgaagcagagcaaacgcttcgctttcggggagcacttcctgatgacacagaggccctgcagtctctcattgacacccataaggaattcatgaagaaagtagaagaaaagcgagtggacgttaactcagcagtagccatgggagaagtcatcctggctgtctgccaccccgattgcatcacaaccatcaaacactggatcaccatcatccgagctcgcttcgaggaggtcctgacatgggctaagcagcaccagcagcgtcttgaaacggccttgtcagaactggtggctaatgctgagctcctggaagaacttctggcatggatccagtgggctgagaccaccctcattcagcgggatcaggagccaatcccgcagaacattgaccgagttaaagcccttatcgctgagcatcagacatttatggaggagatgactcgcaagcagcctgacgtggaccgggtcaccaagacatacaaaaggaaaaacatagagcctactcacgcgcctttcatagagaaatcccgcagcggaggcaggaaatccctaagtcagccaacccctcctcccatgccaatcctttcacagtctgaagcaaaaaacccacggatcaaccagctttctgcccgctggcagcaggtgtggctgttagcactggagcggcaaaggaaactgaatgatgccttggatgaatttttagtgaaaaatgatccctgccgagcacgaggtagaactaacattgaacttagagagaaattcatcctaccagagggagcatcccagggaatgacccccttccgctcacggggtcgaaggtccaaaccatcttcccgggcagcttcccctactcgttccagctccagtgctagtcagagtaaccacagctgtacatccatgccatcttctccagccaccccagccagtggaaccaagacttcacttcagttctctcgctgttatgacaaaccctggttggtaaacagtaaagctggcacccctatcagggacagccattctcctgacctccagctgcccacccccgaggttatcccatcatcaggtagcaagttgaaacgaccaacaccaacttttcattctagtcggacatcccttgctggtgataccagcaatagttcttccccggcctccacaggtgccaaaactaatcgggcagaccctaaaaagtctgccagtcgccctgggagtcgggctgggagtcgagccgggagtcgagccagcagccggcgaggaagtgacgcttctgactttgacctcttagagacgcagtctgcttgttccgacacttcagaaagcagcgctgcagggggccaaggcaactccaggagagggctaaacaaaccttccaaaatcccaaccatgtctaagaagaccaccactgcctcccccaggactccaggtcccaagcgataacactgtctaagcacccccaagccactatccactttgaatcctgctccatacattgggtgtatatttattctgaacgggaggagttatattgttaaaagtgtaaaagaataattgtgttatgaagctgccttattttttttctttttgtaagttactattttcatgtgaatatttatgtagataaaatttgcctcctggtaaccctgtaatggatggggcccagaaatgaaatatttgagaaaaacaagtgaaaaggtcaagatacaaatgtgtatt

SEQ ID NO: 15415 - protein, 564 aa, Homo sapiens
MNLMDAHKVFQKELGKRTGTVQVLKRSGRELIENSRDDTTWVKGQLQELSTRWDTVCKLSVSKQSRLEQALKQAEVFRDTVHMLLEWLSEAEQTLRFRGALPDDTEALQSLIDTHKEFMKKVEEKRVDVNSAVAMGEVILAVCHPDCITTIKHWITIIRARFEEVLTWAKQHQQRLETALSELVANAELLEELLAWIQWAETTLIQRDQEPIPQNIDRVKALIAEHQTFMEEMTRKQPDVDRVTKTYKRKNIEPTHAPFIEKSRSGGRKSLSQPTPPPMPILSQSEAKNPRINQLSARWQQVWLLALERQRKLNDALDEFLVKNDPCRARGRTNIELREKFILPEGASQGMTPFRSRGRRSKPSSRAASPTRSSSSASQSNHSCTSMPSSPATPASGTKTSLQFSRCYDKPWLVNSKAGTPIRDSHSPDLQLPTPEVIPSSGSKLKRPTPTFHSSRTSLAGDTSNSSSPASTGAKTNRADPKKSASRPGSRAGSRAGSRASSRRGSDASDFDLLETQSACSDTSESSAAGGQGNSRRGLNKPSKIPTMSKKTTTASPRTPGPKR

SEQ ID NO: 15416 - DNA, 2142 bp, Homo sapiens
cccagaagatggaagccaatgccagctcagcaaaacaacagatgagtggtccagcctgagtagaggatctcaggccaggaagacttagttttttccatcatattagtcactcatttatcatccaaattctgaaagtgctgttaataaggcagaagttggccttagattcggatttcctagcacatgctgtccccctgtactgggaggtgctggctgtgttctaggcctgcctcatgggtatcattctggattcttgggccttccctgtccctcatcctgggaaccgcttttgttgcgttgcatgtttttctcttttttggttcagttccttgttttaagcagtggatctttcagtagctttctgaggaagagtctgtgggagttaaatttctcacatccttgtatgtttgtaatcgcttcattctaccctgattttttagagatagctgagctgggtacccttattctttagagatagttgagctgggtataaattcacgactggaaatagttcccctcaccatttcaaagacatttttctatttttatcttgcttcccatgttgaagacattcaacattgtgattccaaaatcattgtaggagacctgcttttttatctctggaaacttttaggatcttctcattatccctagatctggaattccgtgtgtgtgtgtgtgttctcatcatgctgggtatctgcagagggaggctttgattttgaagcaaatttccttcattcttggaagctctacttgtagcacaacttggataacttctcttgtgaatttcatgttttccctggaacttgggctagttccatggcccctggtgtgtgtgtctttttttctgttaatatttgcttattttgttcaacttatggagagattttctctacttttatcttctaaccccttctgttttcttgaattttaaaattttctgctgtcatttaaaaaaattgtccaccagctgcggtggctcacgtctgtagtcccagcaatttgggagcctgatgcgggtagatcacttgaacccaggagttcaaaaccagcctgggcaacatagcaagaccctgtctctacaaaaagatacaaaaattagccaggcttgagccactgcgccaggcctcattttagctttctgcagctccctctctcttcccggtcccccctccttctgcttgctggtgctgtgcccttcctctggttagaactccttaggcgtctggggaccctgaatgaagggaaccttatcaagccgatgggagctctgtgcactcatgagtgtttgtcatagcgggtgggcaggaaggttttgttagggggctgcccagattctgcaagactcacatccttggggatatagtaccagcatctggcgtttgggaagagggctgggctatcaccctttggggggcctgtccaacctcctccctgcgctcagtgtctttcagtctggagcctctctctagggtgaacctcccagctcctgccagctgggccaccctcagcctgttcagtgttgaggtctccctcagccctgcctctggaggtgcttggggcctctccagcacgagccttggcaggattctcttaggaaaaccacctcctcctcgtgggtatcacctcctcctaggagatcaaagcccgttcctgcacgttcatcccggcatctctccggaaatgccacggtctcccactgccgccctcccctttcccattctttgtgtccttcagggttgacacctgcgtccctcctttgctgtggttgcaggagggtcttgtgcatgagcgggcgcaggtgcatgtgctcagctgtcttgtgtcacccaaagtcagctagaaatgggagacccaggccagagacagtggctcacgcctgtaatcccagcactttgggaggctgaggtgggcggatcacctgaggtcgggagttcgagaccagcctgaccaacatggagaaaccccatctctactgaaaatacagaattagccgggcatggtggcgcatgtctgtaatcccagctacttgggaggccgaggcaggagaatcacttgaacccgggaggcggaggttgcggcgagccaagatcatgccattgcactccagcctgggcatcgacagtgaaactctgtctc

SEQ ID NO: 15417 - DNA, 1816 bp, Homo sapiens
  CDS (214)..(882)
agagtttcggaggcggtgaccgtgacgtagaaggtggagaccgcttcaccctgatcagggagtatcggctgcgggtgcgcaaggcgtccaggagtgacctggggctgtggagagcgacccgtggccttgtgtttcagagtttaccacctaggatgacttcagtgactagatcagagatcatagatgaaaaaggaccagtgatgtctaagactcatgatcatcaattggaatcaagtctcagtcctgtggaagtgtttgctaaaacaatctgccagttatcaagacaggaggcaatcctggcggcgagcaagtatgaaagaaacgaaccggcggaagtcgctgcatcccattcaccagggcatcacagagctcagccggtctatcagtgtcgatttagcagaaagcaaacggcttggctgtctcctgctttccagtttccagttctctattcagaaacttgaacctttcctaagggacactaagggcttcagtcttgaaagttttagagccaaagcatcttctctttctgaagaattgaaacattttgcagacggactggaaactgatggaactctacaaaaatgttttgaagattcaaatggaaaagcatcagatttttctttggaagcatctgtggctgagatgaaggaatacataacaaagttttctttagaacgtcagacttgggatcagctcttgcttcactaccagcaggaggctaaagagatattgtccagaggatcaactgaggccaaaattactgaggtcaaagtggaacctatgacatatcttgggtcttctcagaatgaagttcttaatacaaaacctgactaccagaaaaattacagaaccagagcaaagtctttgactgtatggagttggtgatggatgaactgcaaggatcagtgaaacagctgcaggcctttatggatgaaagtacccagtgcttccagaaggtgtcagtacagctcggaaagagaagcatgcaacaattagatccctcaccagctcgaaaactgttgaagcttcagctacagaacccacctgccatacatggatctggatctggatcttgtcagtgactttatgagagtttctgccacaaggtgcccaagaggagaggaatgggaagagtgccccagcacgtggtgactgcgtgatttctgctcgttgcctttgaagataactggcaggactgactgtagaacactttgacttttttcaaaaagtgatggaatttgtacatccaaatgaatattgtatagacaattttcccaggaatgtgcaaaatgcttgaaagttcaaacttcttttttgaaatgatcttcagatccagtggcccattcttttatctttatcctgtgaaggtgtttttcaggttttgaaacaatccaaaaatcatttaggaccaagtctaaggaaacattttagtggccaagttggattccgattgtaaaggaatgatactaattttctagcatggctctgaaggtgattttaggtagaagagttttgaggctgggcgcaatggctcacgcctgtaatcctagcattttgggtgactgaggcgggtggattgcttgagcccagaagttgaagaccagcctgagaaataaggtgaaaccctgtctacaaaaaatacaaaaagttagctgggtgtggtggcgtgtgcctgtagtgctagctactcagaaggctgaggtgggaggattgtttgagcccaggaggttgaggctgcagtgagttctaattgcgccactgcactccagcctgagcgacagagtgagacactgtcttaaaaaaaattaaaaattgt

SEQ ID NO: 15418 - protein, 223 aa, Homo sapiens
MIINWNQVSVLWKCLLKQSASYQDRRQSWRRASMKETNRRKSLHPIHQGITELSRSISVDLAESKRLGCLLLSSFQFSIQKLEPFLRDTKGFSLESFRAKASSLSEELKHFADGLETDGTLQKCFEDSNGKASDFSLEASVAEMKEYITKFSLERQTWDQLLLHYQQEAKEILSRGSTEAKITEVKVEPMTYLGSSQNEVLNTKPDYQKNYRTRAKSLTVWSW

SEQ ID NO: 15419 - DNA, 2174 bp, Homo sapiens
  CDS (148)..(1896)
agagcgtggagcgctgcgcggcgcggcggccgggccctcgagacggggacggacacaccagcccctcagataccacttggccactcccgctgaggccactcccactgcgtggctgaagcctcgaggtcaccaggcggaggcgcggagatgcccctgcatcagctgggggacaagccgctcaccttccccagccccaactcagccatggaaaacgggcttgaccacaccccacccagcaggagggcatccccgggcacacccctgagccccggctccctccgctccgctgcccatagccccctggacaccagcaagcagcccctctgccagctctgggccgagaagcatggcgcccgggggacccatgaggtgcggtacatctcggccgggcagagcgtggcgtgcggctggtgggccttcgcaccgccgtgcctgcaggtcctcaacacgcccaagggcatcctgttcttcctgtgtgcggccgcattcctgcaggggatgactgtgaatggcttcatcaacacagtcatcacctccctggagcgccgctatgacctgcacagctaccagagcgggctcatcgccagctcctacgacattgccgcctgcctctgcctcaccttcgtcagctacttcgggggctcagggcacaagccgcgctggctgggctggggcgtgctgcttatgggcacgggttcgctggtgttcgcgctgccccacttcacggctggccgctatgaggtggagttggacgcgggtgtcaggacgtgccctgccaaccccggcgcggtgtgtgcggacagcacctcgggcctgtcccgctaccagctggtcttcatgctgggccagttcctgcatggcgtgggtgccacacccctctacatgctgggcgtcctcttctttgccatagcctgcttcttatacaagcccctgtcggagtcccagttcagcctgagtgcctcagaagctgccaccttgtttgggtacctggtggtgccagcgggtggtggcggcaccttcctgggcggcttctttgtgaacaagctcaggctccggggctccgcggtcatcaagttctgcctgttctgcaccgttgtcagcctgctgggcatcctcgtcttctcactgcactgccccagtgtgcccatggcgggcgtcacagccagctacggcgggagcctcctgcccgaaggccacctgaacctaacggctccctgcaacgctgcctgcagctgccagccagaacactacagccctgtgtgcggctcggacggcctcatgtacttctcactgtgccacgcagggtgccctgcagccacggagacgaatgtggacggccagaaggtgtaccgagactgtagctgtatccctcagaatctttcctctggttttggccatgccactgcagggaaatgcacttcaacttgtcagagaaagcccctccttctggttttcatattcgttgtaattttctttacattcctcagcagcattcctgcactaacggcaactctacgatgtgtccgtgaccctcagagatcctttgccctgggaatccagtggattgtagttagaatactagggggcatcccggggcccatcgccttcggctgggtgatcgacaaggcctgtctgctgtggcaggaccagtgtggccagcagggctcctgcttggtgtaccagaattcggccatgagccgctacatactcatcatggggctcctgtacaaggtgctgggcgtcctcttctttgccatagccagctccagagcagcgtctgaccaccgcccgcgcccacccggccacggcgggcactcagcatttcctgatgacagaacagtgccgttgggtgatgcaatcacacgggaacttctatttgacctgcaaccttctacttaacctgcggtttaaagtcggctgtgacctcctgtccccagagctgtacggccctgcagtgggtgggaggaacttgcataaatatatatttatggacacacagtttgcatcagaacgtgtttatagaatgtgttttatacccgatcgtgtgtggtgtgcgtgaggacaaactccgcaggggctgtgaatcccactgggagggcggtgggcctgcagcccgaggaaggcttgtgtgtcctcagttaaaactgtgcatatcgaaatatattttgttattt

SEQ ID NO: 15420 - protein, 583 aa, Homo sapiens [sequence omitted]

SEQ ID NO: 15421 - DNA, 1931 bp, Homo sapiens
  CDS (40)..(801)
tttgctaaagccaccataaaggaaatagttgtgtggcccatgttgaggccagacatctttactggtttaaggggaccccctaaaggaattttgctctttggtcctcctgggactggtaaaactctaattggcaagtgcattgctagtcagtctggggcaacattctttagcatctctgcttcatccttaacttctaaatgggtaggtgagggggagaaaatggtccgtgcattgtttgctgttgcaaggtgtcagcaaccagctgtgatatttattgacgaaattgattccttgttatctcaacggggagatggtgagcatgaatcttctagaaggataaaaacagaatttttagttcaattagatggagcaacaacatcttctgaagatcgtatcctagtggtgggagcaacaaatcggccacaagaaattgatgaggctgcccggagaagattggtgaaaaggctttatattcccctcccagaagcttcagccaggaaacagatagtaattaatctaatgtccaaagagcagtgttgcctcagtgaagaagaaattgaacagattgtacagcagtctgatgcgttttcaggagcagacatgacacagctttgcagggaggcttctcttggtcctattcgcagtttacaaactgctgacattgctaccataacaccggatcaagttcgacccatagcttacattgattttgaaaatgcttttagaactgtgcgacctagtgtttctccaaaagatttagagctttatgaaaactggaacaaaacttttggttgtggaaagtaagtgggatacttggaatcaaggcatctctgtagtacagtcttctttattttttagcatagaaagttggggatgtgttaattgtatttttaagaatatattctaagttctgtacttcaaataatagcacagattttacatctgattgacatagtgtatgttaatgtaagttttgctttccagtgattacctgatacgtaagcctatttgaacaaagtgagaatgaacttttgtttctaagaagtctttatcttgaagctatataacatgaaaagtgagctcaaattttttttagttgaagattacatataaagttgtgtctgattaatattcatcttttattgaagaaagtgccttctgatggccacataattcttaatgtcagctagtataatggtttacatttggacaaagtattgcttagtgttatttaagtagatttaagatctcaaagctaaagtgccaatttttactttcttcagccaatttgttacctcttttatggttttaaatttttatcaggactaacattttcagaaatagcaaggtgtgatctagtattagattcacagaactgaaaggttaattaagaatgttggttattttcacgggagcgtgtgatatttaacattaatattttatttgacactacagcctgtaatactgctctctttcaaaaacaagttttcagatttttataacagacccattttgttttatgaaacatgttcattacagaaacatgagaaaatagagataagtaaaaagaataaaagtcactattatcctaccactttgcgggacacactattaatatttaagcatagattcttccagatgttttgttttatacagcagtaggattgtgtaatgtattctctcttgtagcctattcttcaaagcgtatcttcactttccatgttaacataaatgtccttttatgattgtctaggattccatggatggatggaatataattgagtcatctggtagagcgcatataggacaggacgctaggttgtttatcttttgtttattgtaaaggaactatgtgggatgcatttggtgatctttttaaaaaatgtataaatttcttgagtaattcctggattaaagaatatgcacttctt

SEQ ID NO: 15422 - protein, 254 aa, Homo sapiens
MLRPDIFTGLRGPPKGILLFGPPGTGKTLIGKCIASQSGATFFSISASSLTSKWVGEGEKMVRALFAVARCQQPAVIFIDEIDSLLSQRGDGEHESSRRIKTEFLVQLDGATTSSEDRILVVGATNRPQEIDEAARRRLVKRLYIPLPEASARKQIVINLMSKEQCCLSEEEIEQIVQQSDAFSGADMTQLCREASLGPIRSLQTADIATITPDQVRPIAYIDFENAFRTVRPSVSPKDLELYENWNKTFGCGK

SEQ ID NO: 15423 - DNA, 1902 bp, Homo sapiens
  CDS (238)..(555)
gctggaacccggcgccgagagtagagaaaaggggcctctggtgaccgcccctacctggcatccctctaacccaggaggagcgtggggaaaggggctgtgggcctctcggggagcgagctgcgggtagcggcgcactgggtacaggcgcgcgcttggctgtcgcctctgccgctgtgtttgggaggactcgaactggcgccaggaaatattaggaagctgtgattttcaaagctaattatgaaaacatttatcattggaatcagtggtgtgacaaacagtggcaaaacaacactggctaagaatttgcagaaacacctcccaaattgcagtgtcatatctcaggatgatttcttcaagccagagtctgagatagagacagataaaaatggatttttgcagtacgatgtgcttgaagcacttaacatggaaaaaatgatgtcagccatttcctgctggatggaaagcgcaagacactctgtggtatcaacagaccaggaaagtgctgaggaaattcccattttaatcatcgaaggttttcttctttttaattataagtaagcatctccaccctaatattgtctctgagtgaatggggggataaaaacccttgtgaactaagtatgctgttattttaggccccttgacactatatggaatagaagctatttcctgactattccatatgaagaatgtaaaaggaggaggaggtaagttttgaaccatctttgtgagttgtaattcaaaacaaaaaatgtagaagaaaaatgaggacagcaacattattgagcaatgcgtatacgtcatttttcagagacaggaagccttaactcttttacaaaaggagcaaaactcttttccataaatggtcatccgcatggagtaatgcaaattactttctaagaaaagggccttatatcaagcttttggctcatttctcctaaatcctcaaacaaagcaagcccatggtgattaggattttaatgtaagtgagcctgttctgccacagctacaaagaacaccaattagttcaaagcttaatccaacatagtggtctctccattgttatttacactatttgtctcttagttctcttataaagcactagaaggaaaaagaataattaagaatgatagtcagtggattacaaagttaattttaatatcaaagaactaaatccatgttactgtcgttctaactgccattgagttaaaacatgtagtacatgtagtcctaatcctgtttagattcagcctctgagtgatttccccattatcctgaccattcatattttactttatcaattgtgtgtttctgtcaacataaagtttcctacgtgttttgatagtacaagggtctatcagcctccagactctccgggatactttgatggccatgtgtggcccatgtatctaaagtacagacaagaaatgcaggacatcacatgggaagttgtgtacctggatggaacaaaatctgaagaggacctctttttgcaagtatatgaagatctaatacaagaactagcaaagcaaaagtgtttgcaagtgacagcataaagacggaacacaacaaatccttcctgaagtgaattaggaaactccaaggagtaatttaagaaccttcaccaagatacaatgtatactgtggtacaatgacagccattgtttcatatgtttgatttttattgcacatggttttcccaacatgtggaacaataaatatccatgccaatggacaggactgtaccttagcaagttgctccctctccagggagcgcatagatacagcagagctcacagtgagtcagaaagtctccactttctgaacatagctctataacaatgattgtcaaacttttctaactggagctcagagtaagaaataaagattacatcacaatcc

SEQ ID NO: 15424 - protein, 106 aa, Homo sapiens
MKTFIIGISGVTNSGKTTLAKNLQKHLPNCSVISQDDFFKPESEIETDKNGFLQYDVLEALNMEKMMSAISCWMESARHSVVSTDQESAEEIPILIIEGFLLFNYK

SEQ ID NO: 15425 - DNA, 1787 bp, Homo sapiens
  CDS (654)..(1391)
ctcggatgtccggaggctcctgggctgagccggcgacagagcccgggaaggcagcgagacgtgggcgccggcccagccccctcccgcgtccttcagccccaagccccgagcccctctgacccttccgcagccctccctccagccgcgcccggcctccggcagctccctgtacgcctccctccccctgcccgcccctccctcccacagccgcccatgacgccctctcggcacctcttcccactctgccacgcgtccttttcctgcaccttcgccccgcgtacctactcctgccccgccctgccattcctctcccctcccttctctctgcgacccctccctgttaggccccagcctcttctcccctcacaggtcttctctgtcctggcctcaccgccttatcctattcctctcccttgccctgtgtcttgtctcagagccccctcggggtgggagtaggttgtggagcagcacaactgggctcaccccaaagcagaacttctcaatccatgaggacaatggggaggcctttaggccggcccacatgtgacaatggagggctgcggcttccttgcggagagcacaagtgagctcactgccctggactccagggaatcagagttctggccgcggggtgacccagctcctctgctaccatgaatagggcccctctgaagcggtccaggatcctgcacatggcgctgaccggggcctcagacccctctgcagaggcagaggccaacggggagaagccctttctgctgcgggcattgcagatcgcgctggtggtctccctctactgggtcacctccatctccatggtgttccttaataagtacctgctggacagcccctccctgcggctggacacccccatcttcgtcaccttctaccagtgcctggtgaccacgctgctgtgcaaaggcctcagcgctctggccgcctgctgccctggtgccgtggacttccccagcttgcgcctggacctcagggtggcccgcagcgtcctgcccctgtcggtggtcttcatcggcatgatcaccttcaataacctctgcctcaagtacgtcggtgtggccttctacaatgtgggccgctcactcaccaccgtcttcaacgtgctgctctcctacctgctgctcaagcagaccacctccttctatgccctgctcacctgcggtatcatcatcgggggcttctggcttggtgtggaccaggagggggcagaaggcaccctgtcgtggctgggcaccgtcttcggcgtgctggctagcctctgtgtctcgctcaacgccatctacaccacgaaggtgctcccggcggtggacggcagcatctggcgcctgactttctacaacaacgtcaacgcctgcatcctcttcctgcctcttttataaggactccaaccctgttcatgagggcaccgcccccatgacccaatcagctccaaaggccccacctcctaatactgtcaccttgggggtgagaattccaatgtgaatttgcagggggagtgggggacacacacaaatttcggggccataccacccttcaccacaccctcctgcgctcagggtggcttgcagtccctggcccttctggtgggcatttggtatgtcctttctcttggggtgatttctgatgtttttactctatatagtgaaaagctagggagagcgggtcttctcccccctccctctccagtcccctcacaatcccagatgggttctaatgcagctgctggggcctgatgccctgagttgtttgtgattcaataaagaatccataag

SEQ ID NO: 15426 - protein, 246 aa, Homo sapiens
MNRAPLKRSRILHMALTGASDPSAEAEANGEKPFLLRALQIALVVSLYWVTSISMVFLNKYLLDSPSLRLDTPIFVTFYQCLVTTLLCKGLSALAACCPGAVDFPSLRLDLRVARSVLPLSVVFIGMITFNNLCLKYVGVAFYNVGRSLTTVFNVLLSYLLLKQTTSFYALLTCGIIIGGFWLGVDQEGAEGTLSWLGTVFGVLASLCVSLNAIYTTKVLPAVDGSIWRLTFYNNVNACILFLPLL

SEQ ID NO: 15427 - DNA, 2408 bp, Homo sapiens
  CDS (205)..(2238)
gttcaaaacttgttgaagtccgaagaggattcctcatataaacctgtgaagaaagcttgtactcaacttgttgataacctagttgagcacattcttaaatatgaggaatctctagctgactctgacaataaaggtgtgaattctggaagattggtggcttgcataaccactttgttcttattcagcaaaataagaccccagctcatggttaaacatgcaatgactatgcaaccataccttaccactaaatgtagtacgcaaaatgatttcatggttatctgcaatgttgcaaaaatcctagagctagttgtaccactgatggagcatccaagtgaaacttttcttgccactattgaggaagatctaatgaagctcatcatcaaatatggcatgactgtagtgcaacattgtgtgagctgtcttggagctgttgtaaataaagtgacacaaaattttaaatttgtgtgggcttgtttcaatagatactatggtgccatttcaaaattaaaaagtcaacaccaagaggacccaaataacacttcacttctaacaaacaaaccagcacttcttagatcccttttcaccgttggagcactatgtcggcattttgattttgatctggaagattttaaaggcaacagcaaggttaacataaaagataaagtacttgaactattgatgtattttacaaaacactcagatgaagaagtacaaacaaaagctatcattggtctaggatttgcctttattcagcatccaagtctaatgttcgagcaagaagtgaagaatctatataataatattttatctgataagaactcctcagtcaatttaaaaatacaagtgttaaaaaacctccagacctacctacaagaagaagatacacgtatgcagcaggcagatagagactggaagaaagttgcaaaacaggaagacttaaaagaaatgggtgatgtttcctcagggatgagtagttccatcatgcagctttatctcaaacaggtgcttgaggcattttttcacacccagtcaagtgtacgccactttgccctaaatgtcattgcattgactctaaatcaaggtcttattcatccagttcagagtgtgccatatttaattgctatgggcacagacccagaacctgctatgcggaacaaggctgatcagcaacttgtggaaatagacaaaaaatatgctggattcattcatatgaaagcagtggctggtatgaagatgtcttaccaggtacaacaggcaatcaacacatgcctaaaagatcctgtaaggggtttcagacaagacgagtcctctagcgctttgtgttcacacctttactccatgatccgtggaaaccgccaacacagacgagcctttcttatttctttactcaacctctttgatgacacagcaaaaacagacgtgactatgctcttgtatatagcagacaatctagcctgttttccataccagacacaggaagagccgttgtttataatgcatcatatagacattacactctcagtttctggtagtaacctactgcagtcattcaaggagtctatggtaaaggacaaaaggaaagagagaaaatcatcacctagtaaggaaaatgagtcaagcgacagtgaagaagaagtttccaggcctcggaagtcacggaaacgtgtagattcagattcagattcagattcagaagacgatataaattcagtgatgaaatgtttgccagaaaattcagctcctttaatcgaatttgcaaatgtgtcccagggtattttattacttctcatgttaaaacaacatttgaagaatctttgtggattttctgatagtaaaattcagaagtactctccatctgaatctgcaaaagtatatgataaagcgataaaccgaaaaacaggagttcattttcatccaaaacaaacactggacttcctgcggagtgacatggctaattccaaaatcacagaagaggtgaaaaggagtatagtaaaacagtatctagatttcaaacttctcatggaacatctggaccctgatgaagaagaagaagaaggggaggtttcagctagcacaaatgctcggaacaaagcaattacctcactgcttggaggaggcagccctaaaaataatacagcagcagagacagaagatgatgaaagtgatggggaggatagaggaggaggcacttcaggggtgaggcggaggaggagtcaacgtatttcgcagcgtattacgtaaaatgatttttatgtgcttatatatgtcagtctattaaatgtacaccaagtaatgtaatacttaaaagagaaaacattttgtagatagagattctctacttacccgtttatacatccttttgtagaaagtttaacataaaagacaataaaaaaacagaaatgagattt

SEQ ID NO: 15428 - protein, 678 aa, Homo sapiens
MVKHAMTMQPYLTTKCSTQNDFMVICNVAKILELVVPLMEHPSETFLATIEEDLMKLIIKYGMTVVQHCVSCLGAVVNKVTQNFKFVWACFNRYYGAISKLKSQHQEDPNNTSLLTNKPALLRSLFTVGALCRHFDFDLEDFKGNSKVNIKDKVLELLMYFTKHSDEEVQTKAIIGLGFAFIQHPSLMFEQEVKNLYNNILSDKNSSVNLKIQVLKNLQTYLQEEDTRMQQADRDWKKVAKQEDLKEMGDVSSGMSSSIMQLYLKQVLEAFFHTQSSVRHFALNVIALTLNQGLIHPVQSVPYLIAMGTDPEPAMRNKADQQLVEIDKKYAGFIHMKAVAGMKMSYQVQQAINTCLKDPVRGFRQDESSSALCSHLYSMIRGNRQHRRAFLISLLNLFDDTAKTDVTMLLYIADNLACFPYQTQEEPLFIMHHIDITLSVSGSNLLQSFKESMVKDKRKERKSSPSKENESSDSEEEVSRPRKSRKRVDSDSDSDSEDDINSVMKCLPENSAPLIEFANVSQGILLLLMLKQHLKNLCGFSDSKIQKYSPSESAKVYDKAINRKTGVHFHPKQTLDFLRSDMANSKITEEVKRSIVKQYLDFKLLMEHLDPDEEEEEGEVSASTNARNKAITSLLGGGSPKNNTAAETEDDESDGEDRGGGTSGVRRRRSQRISQRIT

SEQ ID NO: 15429 - DNA, 1989 bp, Homo sapiens
  CDS (380)..(955)
agtttttaagactgtgtgtgtatgagacaggtcgcgtcctagagcaaacggttttttttgtaaacagacggcatcctaacaggggcggtgctacccagtctgcggggagtcgctcgggatcgaagcacctcagagctccttcgagcgtatcccttcgggaaagccccacgccttccccgaggcgcctcctccggcctgcagcacgccctcgtcctgcacttcctcctcggaatctgcaagacagagtctagctctttcacccaggctggagtgaagtggtgcaatctcagctcagtgcaacctccgccccctgggttcaagtgattctcctgcctcagcctccccagtagctgggattacagtgatatcctgagagaagatgggaaagggctgcaaggttgtggtttgtggattgttatctgtggggaaaactgcaattttggagcagctcctttatggaaatcatactattggaatggaagattgcgaaacaatggaagatgtatacatggcttcagtagaaacagaccgaggagtaaaagaacagttacatctttatgacaccagaggtctacaggaaggcgtggagctgccaaagcattatttttcatttgctgatggcttcgttcttgtgtacagtgtgaataaccttgaatcctttcgaagagtggagcttctgaagaaagaaatcgataagttcaaagacaaaaaagaggtagcaattgtggtattaggaaacaaaatcgacctttctgagcagagacaagtggacgctgaagtggcacagcagtgggcaaaaagtgagaaagtaagactgtgggaggtgactgttacagatcggaaaactctgattgaaccattcactttattagccagtaaactttctcaaccccagagcaaatcaagctttcctttgcctgggaggaaaaacaaagggaactctaattctgagaactaaaaatcagtaatttccacaattgtatgttgaatagtgattgcctttaagtgtctgtgaacatggagtaatattactatttaaaataggccatttgtatctacctttggtccttaggaaaattcctaaggaagtcaattaatgcactttagatgttaaaagtatttgggctaaggttattattgcctgatatgaaataatatattcttattctcattgtttgaaacctgtctttgaaattagcacctttgttatttatgttgtacttgtgaaaacagtaaaatagtttggatagttatgcaaatgcacctatgtgtaacttccccccaaccccaagctgtttcggaagatatcataatcattctgtgtaacattatgcaaacttctaagcccaaacatgactttgtttttaaaaagttcattaatctaatgtctaggattataaaacatttttttgtgtctaaattggacccaaaacattgaacagtttggggtagtaagctaaatttcatcttgtggagattttgctaaacagactaagacccatgatttagctttgctcaaattagaatgtttagcatgagttgaggtaccaggtagtgttaagtaggttcatcacgctctaaggccgttttttccttagccagacccctgttgatagaccagatacttgagggcaaactgtttgctcctcctcttgaaaatgattaggcacttaaggacagtaaagctgtattttctggaaggaagactgtatcttctggaatagtcttctagaaaactagtcatatacaataaaagtatcaaaaatattgggctctaatttgatctgacttagatgtctgagtttgtgttgtttctctaaagattttggcaagactcaagcaatgtggctgactgtaactttattaatttaaaaggtaggaagtaagctacttagtggtttcacctgtgaaataactattttgactgaaatgtaaaataagctattcaacaaagaacatattaaaacatcaagtaatttgtaacatctt

SEQ ID NO: 15430 - protein, 192 aa, Homo sapiens [sequence omitted]

SEQ ID NO: 15431 - DNA, 2899 bp, Homo sapiens
  CDS (252)..(692)
aataatattcttcaagagatttacagagttccttgagtgaattgttggtttgttcttaatactgaatttcctattcaaatttatttagaagttcatttcttacagtgatctcatctcctattaagatattcttcaagatctggaggccatcctttaagcttcttgcaacagtctgggagcaaagagtttactcgccactgggtagtgggccatggacaccccagtctccaccagaagttcgggattgcaaaatgggactctggcagcaaatttcaaactgtatgccagacctggccctttgcaggtgtctggaaagatggctgaataggaacagctctgctctgcagctcccagcgagatcaacgcagaaggagataatttctgcatttccaactaaagtacccagctcatctcattgggactggttagacagtgggtgcagcccacagaaggcaagcagaagcagggtggggtgtcgcctcacccgggaagcgcaaggggtcagggaactccctcccctagccaagggaagctgtgagggactgtgccgtgaggaacggggcattccggcacagatactatgctttccccacggtctttgcaacccacagaccaggagattcccttgggtgcctgcaccaccagggccctgggtttcaagcagaaaactgggcagccatttgggcagacactgagctagcagcaggagtttttttcataccctagtagcccctagaatgccagcgagacagaactgttcactcccctggaaaggggcactgaagccagggagccaagtggtctagctcagcagatcccacccccacggagcccaacaagctaagacccactgggttgaaattctcgctgccagcacagcagtctgatgtccacctggaatgcttgagcttggtgcagggaggggcgtctgccattactgaggcttgattaggcagtttccccctcacagtgtaaacaaagctgctgggaagtttgaactgggtggagcccactgcagctcggcaaagttgctgtagcaagagtgtctctctagattcctcctctctgagcagggcatctctgaaacaaaggcagcagccccagtcagggacttatagataaaactcccatctccctgggacagagcacctgggggaaggggcagctgtgggcacagcttcaggacacttaaacgttcctgcctgctggctctgaagagagcagcagatctcccagcacagtgctcaagttctgctaagggacagactgcctcctcaagtgggtccctgacccctgtgcctccggagtgggagagaccttccagcaggggtcaacagacatctggtgggtgcccgtctgagacgaagcttccagaggaaggaacaggcagcaatctgtgctgttctgtagcctgcgctggtgatacccaggtaaacagggtctggagtggatctccaacaaactccagcagacctgcagcagaggggcctgactgttataaggaaaactaacaaacagaaaggaatagcgtcaacatcaacaaaaaggacatccacacaaaaaccccatccgaaggtcaccagcatcaaagaccaaaggtagataaatccatgaagatgaggaaaaaccagtgcaaaaaggctgaaaattccaaaaaccagaacaccttttctcctgcaaaggatcacaactccttgccagcaagagaacaaaactggatggagaatgagtttgacgaatttacagaaggaggcttcagaaggtgggtaataacaaactcctctgagctaaaggagcatgttctaacccaatgcaaggaagctaaaaatgaaaaaaggctggaggaattgctaactagaataaccactttagagaagaacataaatgatctgatggagctgaaaaacacagcacgagaccttcgtgaagcatacagaagtatcaatagctgaatcgatcaagcagaagaaaggatatcagagattgaagatcaacttaatgacataaagtgtgacgtcaagattagagaaaaaaagaatgaaaaggaacgaacaaagcctccaagaaatatgggactatgtgaaaagaccaaacctatgtttaattgatgtacctgaaagtgctggggagaatagaaccaagtttgaaaacactcttaggatattatccaggagaacttccccaacctagcaagacaggccaatattcaaatcagtaaatacagagaacaccacaaagatactcctcgagaagagcaaccccaagacacataatcatcagattcaccaaggatgaaatgaagaaaaaaatgttaagggcagccagagagaaaggtcggtttactcacaaagggaagcccattaaactaatagcagatttgtctgctgaaaccctacaagccagaatagagtggggggccaatatttaacattcttaaagaaaagaattttcagcccagaatttcatatccagccaaactaagcttcattagcaaagaagaaataaaatcctgagagacaagcaaatgctgagcgattttgtcaccaccaggcctgccttacaagagctccagaaggcagcactaaacacataaaggaaaaaccagtaccagccactgcaaaaacataacaaactataaagaccaccgacactatgaagaaactgcatcaactaacaggcaaaataaccaactagcatcataatgacaggatcagattaacacataacaatattaaccttaaatgcaaacgggctaaatgccacaattaaaagacacagactggcaaattggatagagtcaaaatccatcattgtgctgtattcaggagacccatctcacgtgcaaagacacacataggctcaaaataaagggatggaggaatatttaccaagcaaatgg

SEQ ID NO: 15432 - protein, 147 aa, Homo sapiens
MGLWQQISNCMPDLALCRCLERWLNRNSSALQLPARSTQKEIISAFPTKVPSSSHWDWLDSGCSPQKASRSRVGCRLTREAQGVRELPPLAKGSCEGLCREERGIPAQILCFPHGLCNPQTRRFPWVPAPPGPWVSSRKLGSHLGRH

SEQ ID NO: 15433 - DNA, 2100 bp, Homo sapiens
  CDS (127)..(1665)
aagtgcgcatgtgcgcgaggagtcgctcgggcacttattgagcgccgactgtctacgggcggccgggggtgatgggcagaggcttcagtgtccccttcgcctccgcaggagaggagaggcagcagcatggcgagtgtcctgtcccgacgccttggaaagcggtccctcctgggagcccgggtgttgggacccagtgcctcggaggggccctcggctgccccaccctcggagccactgctagaaggggccgctccccagcctttcaccacctctgatgacaccccctgccaggagcagcccaaggaagtccttaaggctcccagcacctcgggccttcagcaggtggcctttcagcctgggcagaaggtttatgtgtggtacgggggtcaagagtgcacaggactggtggagcagcacagctggatggagggtcaggtgaccgtctggctgctggagcagaagctgcaggtctgctgcagggtggaggaggtgtggctggcagagctgcagggcccctgtccccaggcaccacccctggagcccggagcccaggccctggcctacaggcccgtctccaggaacatcgatgtcccaaagaggaagtcggacgcagtggaaatggatgagatgatggcggccatggtgctgacgtccctgtcctgcagccctgttgtacagagtcctcccgggaccgaggccaacttctctgcttcccgtgcggcctgcgacccatggaaggagagtggtgacatctcggacagcggcagcagcactaccagcggtcactggagtgggagcagtggtgtctccaccccctcgcccccccacccccaggccagccccaagtatttgggggatgcttttggttctccccaaactgatcatggctttgagaccgatcctgaccctttcctgctggacgaaccagctccacgaaaaagaaagaactctgtgaaggtgatgtacaagtgcctgtggccaaactgtggcaaagttctgcgctccattgtgggcatcaaacgacacgtcaaagccctccatctgggggacacagtggactctgatcagttcaagcgggaggaggatttctactacacagaggtgcagctgaaggaggaatctgctgctgctgctgctgctgctgccgcaggcaccccagtccctgggactcccacctccgagccagctcccacccccagcatgactggcctgcctctgtctgctcttccaccacctctgcacaaagcccagtcctccggcccagaacatcctggcccggagtcctccctgccctcaggggctctcagcaagtcagctcctgggtccttctggcacattcaggcagatcatgcataccaggctctgccatccttccagatcccagtctcaccacacatctacaccagtgtcagctgggctgctgccccctccgccgcctgctctctctctccggtccggagccggtcgctaagcttcagcgagccccagcagccagcacctgcgatgaaatctcatcagatcgtcacttctccaccccgggcccagagtggtgccaggaaagcccgaggggaggctaagaagtgccgcaaggtgtatggcatcgagcaccgggaccagtggtgcacggcctgccggtggaagaaggcctgccagcgctttctggactgagctgtgctgcaggttctactctgttcctggccctgccggcagccactgacaagaggccagtgtgtcaccagccctcagcagaaaccgaaagagaaagaacggaaacacggagtttgggctctgttggctaaggtgtaacacttaaagcaattttctcccattgtgcgaacattttattttttaaaaaaaagaaacaaaaatatttttccccctaaaataggagagagccaaaactgaccaaggctattcagcagtgaaccagtgactaaagaattaattaccctccgtttcccacatccccactctctaggggattagcttgtgcgtgtcaaaagaaggaacagctcgttctgcttcctgctgagtcggtgaattctttgctttctaaactcttccagaaaggactgtgagcaagatgaatttacttttctt

SEQ ID NO: 15434 - protein, 513 aa, Homo sapiens [sequence omitted]

SEQ ID NO: 15435 - DNA, 2224 bp, Homo sapiens
ttttctgggctcggacctaggtcgcggcgacatggccaaacgtaccaagaaagtcgggatcgtcggtaaatacgggacccgctatggggcctccctccggaaaatggtgaagaaaattgaaatcagccagcacgccaagtacacttgctctttctgtggcaaagtaagtaaggcaaagtctctggtgagaggagagggagggcaggtttcttacccaagtgaggcctgacttcaaggtattttataagccgtgtgctggtgggcagttggaattactcataccgttgattatgagttttaagataaaagtgttgatggtaacttcagattttgtgagacgtttttcatttaaagaaaaccgcttaaacgttaatgggtaaaataatcatttgacagagtgcccccagcctaagccaaacctgctttgtgggaaatgattccatcagttttgtctactgatgtttctgcaccaactcccaaaatgtctgtgcatctaataccattctacttgttctgcgagggatttttgtttgataaaggtttgaacgtttatgtgcaaaatactgcattacagcaatccttgttttgtttttgagggagaaagggaggctttcacatccctgacaataaggtgaatccaaatttagacttctggatgcttgtaagagaaaatacttacttggttcatagtgaaaattggttctcttttatagaccaagatgaagagacgagctgtggggatctggcactgtggttcctgcatgaagacagtggctggcggtgcctggacgtacaagtgagtctagttccttgtggtatttggaagtgtgtggaccacataggcccaaattccaggttgctgctggatgggctagttttaacactttctcaggactgagagaataaggatgcctttgtattttcaggattcttccgtggtggtttattttcagttattgaaagagtaaacacaaaactaccaaaatagaagtcggaaatctaattcacagactactttagaatttgatggtcactgggcacattgttgtgaacattgtcatgatactgtgcaggtccattagtggggctgaatctactgaacgttgatttgcactgcaagttttgataaaaataggtgaaggggtcagttagttcaaaactgtatttggaacttgaggccatcaggaccaccacagtttcgtctttctgaacagtattagactgctgcaggtttgtgaatctgcaactcagtatcacctgacagggcgatactacaaacactatactacaaactagcatctagacctgtgttgtccaatacactaagcacatatatggctagtgtaattaaagaattggattttaaagtttcagtcaatttaaacttaaaccgaagcagtggaaaatgttgaaatatatatatattccttgtgggggtttttattagggcagaatggaaaatgggaactagagtgctttcttggttctgataggaaagtgaattatttatatacttacaatacaggatggtgattttcaggtatagttcctgaattttatggtaaaacttttgtagtcatttcaatagctgtctttcccaaaggcactttagtgtccgctcttatttccttaatcattgttctcactgtatcatcttgtaatttattcatttcttgtaatctgtccattcccttttaataagtttaggtcagcctcttagaaccatttctttttcatggatggggtagggggagttaaagcttgcttgtccacaactgagttacttataaaaaaaaaagcaactctggttgagaaatcagatgcatgagattgtatgtctaattctgcaagatcctgaaggcatggctcttaaaggatgccatcatgtagtttagaagccactaatttccgaggagtaatctaatgttggttagatctttggattgactgcagcaaagtattggtagagcagtctatctcagtataattctttctaggaaaatttgggaagcgactttaacacaaaaacgaggcagatttacttatttgccattttctatgttaacatgcttaattatgttggaaactgaatctttctttccagtaccacttccgctgtcacggtaaagtccgccatcagaagactgaaggagttgaaagaccagtagacgctcctctactctttgagacatcactggcctataataaatgggttaatttatgt

SEQ ID NO: 15436 - DNA, 2394 bp, Homo sapiens
  CDS (1134)..(2240)
ggccctgctgcacatcctgtgcaaccttgggcctctctcagccctgagggctggcagagaggaggtcctttttggccccaggtgactcttaactcccaggacagagcaaaggtcctgagcccttagttgcctggaggcttgagtcctgggagcccgctgtctgctgcctctgcaagtgggagaggtcactgcccgagggaggacagggcatgctgccaggctccaggggaggagccccagggagggagcctctggaggtggtgcccaggccgttctcctgcctcctgccctgtgcccgcctcacttcatgttcttcctcagatgagagggagggtgggcacccccaggaatctcttccctgcaccttggccccctgcccctggaggagcccagcttcttctccagagcctagcagcccagaatctgagagcagaggccctggtcccaggcccagccctgcatcgtcccaggagggcagcccgcagcttcaacaccacagctcaggcattttgcccaagtggacactagatgcttcacagtcttcactcttggagacggatggggaacagccaagttccttgaagaaaaaggaggcaggggaggccccaaaaccaggcgaggaagtaaagagtgaaggaacagccaggcctgcagagactggagacgtccagcctgacattcacctgacttctgcagaacatgaggatctgaggacaccgatgaactcttcttggcttcctgggagccctatgccccaagcacagtccccagaggaaggccagagaccaccagctggagacaagctagctaatggcgtcaggaacaacaaggtagcctggaacttggcctcacgcctctatcgcctggagggcttccggaagtctgaagtggctgcctacctgcagaagaacaatgactttagcagggctgtggctgaggagtacctgtccttcttccagtttggaggctagagtctggaccgagccctccggagcttcctccaggccttggtgctcagtggggagactcaggaacgggagcgaatcctctaccagttctccagacgcttccaccattgcaatccggggatcttcccctcagtagattctgtacacaccttgacatgtgcaatcatgctgcttaacacggacctgcatggacagaacattgggaagagcatgagctgccaggaattcataaccaacctgaatgggctgagggatggcgggaacttccccaaggagctgctgaaggccctctactggtctatccgcagcgagaagctcgagtgggccgtggatgaagaagacacagccagacctgagaaggcccagccgtccctgccagctggcaagatgagcaagcccttccttcagctggctcaggatcccacagtgcccacctacaagcagggcatcctggctcggaaaatgcatcaagatgcagacggcaagaagacgccatggggcaagcgtggctggaagatgttccacaccttactgcgagggatggtcctctacttcctgaagcagggagaagaccactgtctggagggggagagcttggtggggcagatggtggatgagcccgtgggggtgcaccactcgctggccacccccgccacgcattacaccaagaagccgcacgtcttccagctgcgcacggctgactggcgcctctacctcttccaggcacccactgccaaggagatgagctcctggatcgcgcgcatcaacttggctgcggccacgcactccgcgccgcccttccccgccgctgtgggctcccagcgcagattcgtgcggcccatcctgcccgtgggccccgcccagagctccctggaggagcagcatcgatcccacgagaactgcctggacgctgccgcggacgacctgctggatctacagaggaacctgccggagcggcggggccgtggccgcgagctggaggagcaccgcctgcggaaggagtacctggagtacgagaaaacccgctacgagacctacgtgcagctgctggtggcccgcctgcactgcccctctgatgctctggacctgtgggaggagcagctggggagggaagctggaggcactcgggagcccaagctcagcctgaagaagtcccactcgagcccgtccctgcaccaggatgaggctcccaccacggccaaggtgaagcgcaacatctcagagcgcagaacctaccggaagatcatccctaagcggaaccgcaatcagctgtgaagccagcaccacctcagagacactgttccctgctccagggtagacctgagatgaacctccctggaggagacttatttcaatgagtccaccatgacggatgaggcacctcctttccctgctgaaggacaaaccttgtttccctgtggccctc

SEQ ID NO: 15437 - protein, 369 aa, Homo sapiens
MLLNTDLHGQNIGKSMSCQEFITNLNGLRDGGNFPKELLKALYWSIRSEKLEWAVDEEDTARPEKAQPSLPAGKMSKPFLQLAQDPTVPTYKQGILARKMHQDADGKKTPWGKRGWKMFHTLLRGMVLYFLKQGEDHCLEGESLVGQMVDEPVGVHHSLATPATHYTKKPHVFQLRTADWRLYLFQAPTAKEMSSWIARINLAAATHSAPPFPAAVGSQRRFVRPILPVGPAQSSLEEQHRSHENCLDAAADDLLDLQRNLPERRGRGRELEEHRLRKEYLEYEKTRYETYVQLLVARLHCPSDALDLWEEQLGREAGGTREPKLSLKKSHSSPSLHQDEAPTTAKVKRNISERRTYRKIIPKRNRNQL

SEQ ID NO: 15438 - DNA, 2141 bp, Homo sapiens
caaaatgtgctttgaggtaggaagggacctcctgtagagcggctttggcatgaggtcgacccgccctggggtggctccttttccctgtgttggcttggggccactgccccttcatgtttggctcacatggtccagaagcatcagggctcttttaacccagaatagtcaagccttggtttccttacccctgcagttttccagagcagctaaaaaacatccaagctggcaaaccattcttcctactccaaacattaggagcttttaccagtaagcaaggggtgggaagcttttcctttcttgaagatgctgccagcgtagtttcccttgtagctgccatcctgggtgcatgacttgcaaaactgatatgtgagtgacaataagccagatggcctttgcaaaagctctgcttattttgatttttgtggttccttacaaaaggcgaagtgagcattgatctttgttggtgctgttgtagctcaacggcaacatcactgtgttgtttcctcattttatttttcctaaaacctttacccattatctgcagattttcacatctaagcaaaataggttcatatgagtccagttacctagacaattaataaaaaagagcaaaatgttgagtgactatgtcataggttacttattgttaagttacagctttgtaagcagcttgctttgtaaatttttcatcccctgatggatgctgattttagaaggtgagagacgtgttagaaggatgtgaatatcgttttatttattggccataattaagtgcctttgggctttttgggtacagggttaaactacagctcaacatttaaatcaaatccaaccataaaattctcttaagtacaaaaaaaccagatgaccaacctcagggagaacccaagaaaaggtgggctttcccagcattgctgtgcagcattctgagaatacagcttgatttttctacatctttgtatgggcaacagtggtactgggtcctgtctcttgggacaagtttcactgtgattttaaatttttgtttcaacttggattcttcacgattgaccgtcaagttgaaatcctggttttgactttcactactgtgggatgtgcacaggaagttttccaccaaattttccacgtcgttcccctggcttgtttaatgagagcttggatttcagttttactccaacacctaaatagcctgggtctctaccagcatgccactagggttttacttcatttcagcctcctgtgggcattggacacccggcactctgtgagggtaacatgaaagataggcccttttcttacccaagctgatgtctgaagtacccgttttcacatggctcggaattaggaattgccgtcagataacactgggctcttctcactcaccctttgcacttggagtttttgttttactgtttccttaacctgtcacagtcccttaattagaatgtattgctagaggacaggctgcgttgtccaactttgtgcgcattttatagaaacacacaaaatcaccagacaaagcagctgtagtgtgaactcatccagatgcgatactgaaattccccagaggggcatcttcattgttttctttctttgttccagaagcaaaggccgataatgaaccgagctgttcgccggcagctcaagaactgttgacaaggctgggatttttactgggagaagggatcccaagtgccacacacataaccattgaagacaaaaatgaaaccatgtgcacagctctgagtcaaggcatcagtccttgctccacactaacaagcagcaccgcatctcctagcaccgatagcccctgctcaaccttgaatagctgtgtcagcaagacggcagccaacaaaagtccctgtgagaccattagcagccctagttccaccctggaaagcaaggacagtggaattataggtaagaagcacactgctcggtaacataatggctcgaatctcatcaaccagagcattcaccaggcacttcctcagagggttttagcatggtctgtgaaggtcagtctgccagcgcctgctctgttctttgcaggcagcactgactccatgtgtagctgagagagtggagcattggcttttacattccttgatgtttactttataacagtcagctcatttgtt

SEQ ID NO: 15439 - DNA, 2203 bp, Homo sapiens
  CDS (91)..(564)
gtcgtctttctgtctcggctgaggcagccatctttctcttgccgcgtgctggtgttggaggaccctccctgcttcagatttaccaacagcatgaatcaagaaaagttagccaaacttcaggctcaggtccggatagggggcaagggtacagctcgcagaaagaagaaggtggtacatagaacagccacagctgatgacaaaaagcttcagagttctctaaaaaaactggctgtgaataatatagctggtattgaagaggtgaacatgattaaagatgatgggacagttattcatttcaacaatcccaaagtccaagcttccctttctgctaatacctttgcaattactggtcatgcagaagccaaaccaatcacagaaatgcttcctggaatattaagtcagcttggtgctgacagtttaacaagccttaggaagttagctgaacagttcccacggcaagtcttggacagtaaagcaccaaaaccagaggacattgatgaggaagatgatgatgttccagatcttgtagaaaattttgatgaggcatcaaagaatgaagctaactaaaagtttggtttttggaagctggcatggactagatttaacaaatcagctatgtggttccaaagttttacagacatggagaacatcacctgttactagttcagtaatataaatattttgtatattaataatgctgtttgttcagcatttttcggtcatttgattttgcattttgcacttcctcccaggatatttttttggtcaaaatatgaagtattggtgcagtttgagggtgttttggtttttgattcctggtttttttgttttttgtttggggtatttttggtgtatgtatgtttatgtatgtgtgtgggtatgtgtgtatacagtggagagcaaattggaaaacagttctatttatcctcctccctccccagtagaaataaaaaaaatctttacatttgttacttttcttttccccccgtaagacacagaattaatggaaagtgagtatcttggatttcaaatctgaagagatttttaccattagtggtttgattttaatttgcttggttaactatcatatttttcatacacttctctggatttaaaatatcttgaggtattttgccactggcttcatgctggagtaatgggtaacatatctttggtatggttgccttagattaacttacctagtcagacccagaagaacttcttttactagcttgcttcctaaatgccttttttcctctccttttggtctccaaatggcctggtcagcttttggtaatattcttcctcatcttccacctagcttgagaaggatgttctccatatagagtttagcgagtgcctaatccctccttttgtaagattttgttccctcagcttgaggaacaacttcatcttcaactttttatttctccctgatgttacagtttggtagatttcaaactggaatagctagcatgtgcttgctaaataattttatgccagccttatcctgtatcctagctgttcttaacagcaggtacaaaaatgcctgtttttcagcaaggttgaaattgggaatgtccttttgaatcagaagaaaataggccatagactcatctcccagcacaaatgggcattctatgaaatggtactggccctaggaggatttcctcaaccactctcctactcttggccttgaacctacctctgggttggatcttactattgtagctgctcactataccctcctgcatgcttagaataatgctttgaggggagcactggtaaaacacagtatttatttttttacctcctttaagaggacttggaggtaagttgcattcattcactcaagtttccctcttgctgtctaatagaagcttactttttgctatatcagcatttgttacagccaatatttaaggacaaaatttagaaaatatatcatttcctggcccatcatcaaactaatacagcttaaccttgcagctaccaatttttgtgtcaagctagatatctttatttgatatctaaggtgcaagaccaacaatatattaagagatctgtagacatgaaggcaaagctcttgtattttttttcatccaaacacctcaatttattttataaattcgttcatttttcctgttatgttttatataatatatggactaaacaaaataaaataacagtgcaaaagagaaac

SEQ ID NO: 15440 - protein, 158 aa, Homo sapiens
MNQEKLAKLQAQVRIGGKGTARRKKKVVHRTATADDKKLQSSLKKLAVNNIAGIEEVNMIKDDGTVIHFNNPKVQASLSANTFAITGHAEAKPITEMLPGILSQLGADSLTSLRKLAEQFPRQVLDSKAPKPEDIDEEDDDVPDLVENFDEASKNEAN

SEQ ID NO: 15441 - DNA, 2061 bp, Homo sapiens
tattgacaaacaatacagcaacaaataatttactatcactcaggattataaggctggtgttaagcagaacagccattaaatcagcatcaaaagaacaaatagtaaaatccaaagtattaattacagataacttttcaaaaattcatcattcacccttgatttaattatttctctggcaattatttaatagacttctcggagtctgttaagtacttaaaccaagaactaccattattcctactgggaaaacataaacatttctcaagtggaaagtaaacagtgttggcactatttttatatatggttaaagagacctgtcattgcaataaaagccagcattcacaaaatgaggaagataaggaaagtagcataaatattttctattaacatggctttacaactgctaaaacttatagtataaaaatgtactaacaaagactaattcaagaagttgcaggatacacaatttttaaaaatctcatttctacatcttagcagtgacaaactgcaatttaaaaagtgtgtttggttattaatatatatgagacttttaaagaaagttatataactacatagagataaattaagaaagatgcctaaatagaagcaagtttaaagagctatatttttaaacatgaacaaactcccatgggagccatgccagtgtagtggaaaagtagtacatggggagatggggagtttttttgaaaaccagaattacagttctcatttcactacttaccagttgtatactcttgggaaagtcactcctagtatctatttcaccatctacagaagagaaatacttcacagaattattgtggggattaagttagataatgtgttttaaaatataaagctacatccaaagaaatgccaatatgtgacattagtatgaaatttactacagctccatttaacattccaactggttgctgtgtggaatatggcataattgtaataaattatttaggaaagcaagcaaagatgtaagtttttttaatttagggggaaaaaatgggagccttgctctccaaatccttaaaacatgctattaagcaacctttctgaatattctgtggtgccaagtagaaagtttaactgaaattaataagccaatggaaagaaagaaatattaataactgctggtggaaagactagctagatgtcagtgtggaaagattagatccactttacatgtgatattccaaatgaattaaaatgttaagtataaaaagaaaaatactacaagtctcacaccaatagtggtataaaggaacttcatggcaattggcaaggtagatcaactaagagaaaaagttttaaatgtgtagtaaataggaaaaagacaaaacaagatggaatttaaaagaagctatatgcattacacatggatgcactcagttttcgtaaaactatatgcatatccataagggtttgtactcttaggcaaatttataaagcgatcgtgtataaatgatataaaaaatcaatttgaatggtattcaaatttcctaatattaaaaatgcaactttgacttagttcatgctattgtattagcaaaactgttttaattgcatgtgtccttatagcagcagcattgtgtattagtagccttttaagagaactgtgtagaagactataaaaagggctttataactgatcttttgacatactcactttgagtggcatatgcccaggaaaatatttaaaagaaagaaaagctatttgtacaaagttttctagcagttccactcagataactttaagggggaaaaaagcccaacgattggaaatggttaagtaaattttggtgtattgctagtgctatcacagaatgttatatagccattcaataatattgatatatgtcaaattgtatgcaaaaaagtgagattcaaaaatgttaataagaacataaattgtgtttactgatacatgtgaaaatttaggtctacattgaaaagaatcagaagataacatgtaattcagtttaacattaggggttctttatttttcttctgttaaatattgatgtatgcaataaaaaataaaagatt

SEQ ID NO: 15442 - DNA, 2266 bp, Homo sapiens
ttttctttcaactcgatgagaggaggactcctcctgggcctggtgcttcgaggtccagacgagcagacactggcgcctgtgaccctgcagcggacgcccttcaaagtccgcgtggccgcatttggaagcctgggcggcgtggagacggcgccttcagcttgagataaatgtggccccgtcccagagcaccacccgagacatcaggagcccatcgtgggctagggaagatcctccgggacctaacggcccaggtcttccacccttggccacctccccaggtgatgcctgaagctcaagggactgtgtccaccctcaggccctgcccgtggctctggatcggcggtccccatcagaggcctgggctgagtcctcaggtcaagaagtggcgctgacctggagcccctgcctggggctggccttcctcacagtgagctgggcctcctgccatcctggctctggagggcgtctgagtggaagaggctcagcctcacctccacaccctgaagactcactctctggccctgggctctgttgtgtgcaccgcctgtctgcagggcccagcctgcctcgagcactccctggggacagaagctcctgcgctggcctctcctgtcacctagccaccgggcatcctggagtgcagccctcatgccccgaggccacctgccatcgcccaggatgactcaagatgccacctgggtaagtctagcccagaacgagaaaggccgaatgagggaaactgagtcacatctgcttctcccaggtggggctgggggcccagggggagggcacttgtggtgacgaccagggtggactaggggcctgtctcccattctgtctctgccacacgttatagagcccgacctgtgggctgggtccccccatggtgagcactgcaggctctaggaggctgaagtcctggcctgggggacctgtgggggccaggctggggccattggaatcagtatggtggtccccacctgcactccagctccgatggctgatgacgggggccctggcagctgaccccttgcctcagtggggagaccatggctcacgagggcatgagacctgcccagagcatagcccagaggccggcctggattctcacagctccgcccactgggctgtcctgccccaccccctttttagcctgctgggaccatgagtcagaacccagtaggtgtgaggggacccagccagcccaggtggccagtccagcctgagggggtgggggtctcagagattaagtcaggagcccagagtgcgtgcttagggtgcaacccaccccacagcctcccccaaggcacctcccgggggtgcagatgggggcagacgcagggacactcagggtggaccacctgactgggagctgatcatgaggtgtgcgacagcctgagtcagcctcagctcagaggagctgggatggccttgatcttccccctccggccactcaccacagctgggagggtccaaggagaccctcagccactgtcccttcagccctcaccccaccctggctggctctgcccggacagtccttagggacatcttggtcctgcccaccagccaggggacccagaattggagcaggggagcaggacccccagaccctctcataccgcttttgttctgaggccttgagggaacacggggtcttcgcgaccccaggcgagatgatgctgggacagaggagggtcgggctgcatcggggccctcctggtccccactcctgggtgagtcagcatctcagtctccagttctgggtgggcggcaccaggtgtgagcctcagcggtctccttgctggctaaggacctgggatttgctccagtgcccctcgggagggagtaggacacgtgcccagagagcaagcagaccccctccccgaccaacttctgagagcaaagacacctagagctagagattcagcaccccctgagcctcagtttctccactatgaagtgggatccgtgatctcagccttaccagggctgtgaggattaaatggtccagcccagcctggggcctgcctggagtaggcagcctgctcaggatgggctgtggaaggagggctggggtagacctttcaagtccacttgggcatggggagctgagagctagcatgccgtttaacttggcaggaagcaggccgggcgcagtggctcatgcctgtaatcccagcactttgggaggctgaggcgggcggatcacgaggtcaggagatcaacaccatcctggctaacacggtgaaaccccctgtctact

SEQ ID NO: 15443 - DNA, 1998 bp, Homo sapiens
  CDS (1200)..(1580)
caaacatgaggcaaaagaaaaaatacatgtttttaagaaaacattgagcagagaactgcagccaggatgcgctcagcagacattcactctggctgctgggacatcagaaaacaaagtcttcatctctctctccagtttcacccaccccaccctttgctttcatttcaggtgtgttggtctatatgacagggaggagagtaaaggagagcaggagcaattggctgcctgcaaagccagctggaggtgaagtgcaggaaaggaaaggtcaccccattctactccatggcctctctgctcccagctgtggtaggctcacatagccagtgtgatcggtttttaagaggcagtgcttttcagcttttctccctgatatatccattttgcttcccagcactttttaggagtagtgagagcacttcctgcccttgttggaagccccagggtggacactcagcacgaaggtctctcccttaactgctgcccttccaagacttgctcccgagatggagtgggcgtggtcttccaggctggcccttccttctcctcaccgccaccttccctgccccagccccagcagccatgggtacatgggtccccagctcacctatggattcccgccagtctgcccagctgcagtactcacgccccatgggggatcttggtctgtttttcttgtgggagcctagtggagagcagacgtggctttttatgtgtcttgttggggaggtgacttgcatggtggggacaaggctgtcgtggcaaccttgggatcgagtttgagactaaaggatgtcatgagatccctggcttctccccatgttgttcccggacaagggcagaagggaggcatggcaagggacctctgctgtccttactcaacagtggtcctcatccctccccacctcccactgcttcctgcaagggcaccagttgtatgagaaagttggcctttggacttaggatttcttattgtagctaagagccatctgaagcagcaggttgcaggacaaatgcttcagtccgccgagagcagtaccgtgtggccaagaggtggactcagagccttccttgagctaaactcggccaaccaaggcacgcagcatgtcccctcaggtctccagtcagtccaggttgaccctcagttctggacgtgtgtatatagctgtatttaatacctcaaggtcattgtggctctggggatgccggggcaggaggacgagggtgcgctgtggacacagcagtccgcggaattccgttctgggaagccaatggtcgccggcaccccttgcttcctccctctgttgtctgcctgtgtgacacacatcaatggcaataacttcttccaactcctcgcagaagtgggagaggccggcagcctgcaccgagaggggctttcctccctcttgctccccgcttcgttctgttttggctgcagagagtggttcatccatactctcattccctcgcctccccttgtggacgggggtcttgccttttcaattcctgtgttttggtgtcttcccttatctgctaccctgaatcacctgtcctggtcttgctgtgtgatgggaacatgcttgtaaactgcgtaacaaatctactttgtgtatgtgtctgtttatgggggtggtttattatttttgctggtccctagaccactttgtatgaccgtttgcagtctgagcaggccaggggctgacagctaatgtcaggaccctcagcggtggagcctgctggggggacccagctgctcttggacaagtggctgagctcctatctggcctcctcttttttttttttcaagtaatttgtgtgtatttctaactgattgtattgaaaaaattcctagtatttcagtaaaaatgcctgttgtgagatgaacctcctgtaacttctatctgttcttttttgaggctcagggagaaactagcatttttttttttccaaactactttttgtcactgtgacagttgtaaataaagtttgaaaatgctttcc

SEQ ID NO: 15444 - protein, 127 aa, Homo sapiens
MPGQEDEGALWTQQSAEFRSGKPMVAGTPCFLPLLSACVTHINGNNFFQLLAEVGEAGSLHREGLSSLLLPASFCFGCREWFIHTLIPSPPLVDGGLAFSIPVFWCLPLSATLNHLSWSCCVMGTCL

SEQ ID NO: 15445 - DNA, 2775 bp, Homo sapiens
attaatattgggaaaattatgataaaatgctttaaaaattaatatgccagattaaaataactgaatagtttactatttcattcaagcatgtttaaaacaaataatttcctttcaccagtttttcttagtaaactcctgaaaaagtaggaaaggtggaaagtatatatcatttttataaattttaaattgtacatcagacttttaaaatctgtaatatacaagcaagcaaaattattttaaatgacttaattgtatgctaatactcatctgataataaatgcttcttaaagttgacatttaactgctatcacaaagttttatatgtagaaaagtggggtccttttgaataaaagatcattcaactaaaaatattaaaatttatttcactggatggtaatgtaaccttaaaagcatcataataggtaaagtctaatattagttcccttaacaaaatcctaactgtataccagaattaggtcactgaaagaacttgatttgaattacgtttagacaaaaatgatttaattgtaaattcttaaaactttctaaatgcataattggcaaaaaaaaaaacccactgttaccagtgtaggaagttacaagaaggcacatactgaatgctgaagtatacatatgctatttctcttaaacctcagagcaaccatatgagcattgtaattaatattcccattttacagatgaggaaactgaagctaagagaagctaagtaatatgcccaaggtccacatctagtaacagacaaagctgggatttcagtctatgtctgcctctctccacatctctttcatccataccacactgcctacatgccatatgacaggatgtgtaatgggctaacgtttatttaaaaagttcaggccaggtgcagtggcttatgcctataatccccgcactttgggaggccgagccgggtggatcatgaggtcagacgttcaacaccagcctggccaagatggtgaaaccccgtctctattaaaaatattttttaaaaattaactgagcgtggtggtgggcgcctgtagtcccagctactcaggaggctaaggcaggagaatctcttgaacccgagaggtggaggttgcagtgagctgagatcgcgccactgcactgcagcctaggcgacagagcaagactgcctcaaaaaaaaaacataaaaattcagtcactatactctggcacaattttcatttgtatatgagccaaaccacattaccttaatgatttgggaagttaggcaaatatgagatatgtagacatatctatgctgattgttgcttgagaaataattactaattctagacaaaactcaatcctgtatcttccatcatgaatcttaaaatcatttcacttcactcctaacatttcttacattgcagaactaatggtaaagtaaattttacggaaaaagttaagatagctttgggaacagagacctttccctaaattgattccatagcagatttgggggaattaacaaagaatttcagtctcatcaatcctttgaatccatcttcaaaacttctgcttttaataactttagaaaatttactaatctatagaactaattgagtaggatataggaaggatacaaggatataatgtcctttttataaaagtttagtatagcttctttacatgtatccacttgttccagaaaatgtgcattggttctgaatgtgaaaatatttaaagagagaaaggaacactcaagtaagtgtgggcttcagtgggaattatcacaaaacattggcaagtatttttatttaaattattttcaaatttgacttctacagccaagtggaattggtaggctgtagctgttacactgaaatttctagtctttgtaagtgcctcctgaaagtcatttaaaatggaaaaatatttcaatgagcttttccttttttcatatttatggacatgaatattttattggagatcattaactcctagaatttgagattatatttccatacaacattttataaagttatgttgaacttactacctgttatgtgcaggttattatgtaactattcacagattgcttcatatattgctttatcttcccatctaacttcttaaagttaaaatccggacacacatgttgattatctagaccagtcattctggaaattgtaacactcccacataaaccccaggagactttttcagaatgcaatgtttctaaatgtactgttactggcagtttactctccagcatataaggttgcattttaacttttagattatgaactgtgcaaactttacccaaaactatcttgcatgattccctcctaaatatattccttgattaagtaaatctggcaaatcactgtttgagctagttacataaaatttgttatcaagagaaggcttttctacaagtttccagattaacataaagaaaagagggaatcacagggcatttaagtgcaccttcccattactttccttaaatcacctcatagttaggctgggcgcggtggctcacgcctgtaatcccagcactttgggaggccgagacggtggatcacgaggtcaggggactgagatcatcctggctaacacgatgaaacctcatctctactaaaaatacaaataattagccaggcatggtggcacgcgcctgtagtcccagctactcgggaggcagagacaggagaatcgtttgcacccgggaggcggaggttgttgcagtgagccgagatcgcgccaatgcactccagcctgggctacagagtgagactccatctc

SEQ ID NO: 15446 - DNA, 1939 bp, Homo sapiens
aaatgtttttatgcctaaatcttaaatagaatggggaatgcatcagcaacccccacacccccctccagatcagccatggatgccaccaacaccaggcccaatggacattgttcctccttctgaagacagcaacagtcaggacagtggggaatttgcccctgacaacaggcatatatttaaccagaacaatcacaactttggtggaccacccgataattttgcagtggggccagtgaaccagtttgactatcaggtgaaagatattttgttgctttaatattgtagatgtgcacgtaatccattctttggaagtgtctcatcaagaatacctaagatacgtgtttcacttttcagacttgtataaataagcacattctgtctcagttatcaatttttgagtattaaaataattagaatttgttttctgattttttatttcattaggaaaatggtataaaagatcattacggaaaacttttgaaaaaattaaaaatgtataagtgcaatagctatatgatgttttattttctaatttatatttcaaaatggtatatttaaatgttaaagactagagaatgcacagtaattgaatatagctcatggttaagacatgaataaaaaatatagatcattttcctaagtgtaattccttgtgctatgtagaattatgactgtttttctagtgtcattttttttccattctgacatgacatgttaatggaattgtatataatttcctctgtagcatccaattcattcctagggacatagaactctgtggggaatagtgttgtatgttgggctttatttacttcattccctctgccagggtctacccttaaattatagtgctaggtgtcattttgaaataactgattgcaattattaacttataaactgctatcataatttaaaattttgaaagaattatttcatgaattctagggtagatttgataatggacatctagtattcaccttgagatggtaatcctctcattaataaatattcagatacttgtatacttggtatacagatacaacagtttttatgttgtttgaagaaatataatggcagggagcatctgcttaccctacttttgcatggtagatcccatgtaaacaagacaaagagctgtattggcagctggcctagaaaagcctctgaaaatagcaaaattgcagaaaatatttaatgattcattaacttctatctttgcttataaatgaatatatctgcaagattatagaaacagcttaagttgtttagttcactttttgttcactgtaagtaggatgttgaaattgacaaaaatgtctagttaaagagaaattagtatctatttgatgtcttagtgttggtaggattagcttgtaaatggattcagaatgaaaaatttcatatacttcttgaaagtagcttatcagctggcttttagaagcctctttgcatttacatagccggaaaatcttaagacaagtaagcctaggttcttgggaccatagaagtatcggtggatattagagccatggaattcttggatgtgctgcacacatggatttctactgtcccagttcataacacacgtgtgtcccagagagtatattgtattaatttgaagaaaaaataaactgcaatactctttcagcatggggctgcttttggtccaccgcaaggtggatttcatcctccttattggcaaccaggacctccaggacctccagcacctccccagaatcgaagagaaaggccatcatcattcagggatcgtcagcgttcacctattgcactccctgtgaagcaggagcctccacaaattgacgcagtaaaacgcaggactcttcccgcttggattcgcgaaggtcttgaaaaaatggaacgtgaaaagcagaagaaattggagaaagaaagaatggaacaacaacgttcacaattgtcc

SEQ ID NO: 15447 - DNA, 2839 bp, Homo sapiens
tacagagttaggttcctacaagcctctggtcacaacattttatctactgattaatatataaccacgtattatgtgtgtttctgtttaaagattcctcatttaatatatattgttgattcactaacattaagttcatggtcaacatcactctaactcatacctgaaccaagcttatctaatgtgcatatttttccccataaggcctttttgcacttaggaatgccagacagcactttggcactacatttgggggccattttaaacagtgaagccaccaaaaacacaaaaatgtggcaccaaacagatggtgaaagggctgttgtggatagtaagagctgaaactagaaagcagcagagatcacagagttcagcttcagctggggacgtgtgcatatggtaactcaaatattttgccactttgcacatgtctgcaatgaccacagaaataccacaagtattggtttgggggttacacatgaattttagcaaacaggcaaattcacaaatatggaatctgtaaatgatcaagatcaactgtatatacgcatgcatacactcatataaatatataggtttgtatgggctgttttaatttattatataatgtaaaaacattctgcagcatagtttttttaagttaatgatgtggcttgtagacgtttttatgaagctacactagatcagttgtattcttatgaagtgatacataattattcataatagggatctaccataatttaaccattcgtctaatgatagtgtaagtttcaatttcctcataggtaaatagtaaataaaaataaaagatgtgcctttgagagttaaatgagcttagtacattgccctacaacttaagcacttaatgagtgtgagttaataaaaattaaagggctttggagtcagacagacatgggttccacattccatctcttccctccctagctgtgagacttcactgaattactgaatctctttctgtgtaaaagaggtagatgaagaacaaaaatagtaataaccttaagattattgaatctctctaagtcatctcatctgaaactggagattataatacttcattgtttgtgtgacaatgaaatgtaatcatacctaaagtacctaccacacaggaactcagtgttttttccttcttagataatttgatctcaagaaaatggtgttactttataaagagtagcattacagaatcaatatcttcttttaaaaatataacacagcattgtacttctacatactcagaacgtaagagaaagaactaagccattttagtacagtgcttagactgtatactttcagtgaggtatagtctacaaacaaaagcaaagaaatgttgagtttggttggtagtggtacatatatagcaaatctagaactcttatgtattttaagttgagcaaatgagtacatatgatgttgctgggagtcagggttttcttggtggaagaaaggagatatggaatggaataagagaaggaagaatcctctggggctttaagaaattagaattaacaataaaagcatgaactataatagtgtaaaacaatgtatgcatatgataggcatatatgcataggcctagaaacaatgacaccctggcaattagcacagctgttcttgtttggtttttaaataatagtcacagctaaaagaaagtaggactccagagctgtgtaaagatgaatttggatatataccagaaagtaaggaagtaccccaaaattaatgggtacatttcaaaaagacacagaagccagctcaaaaaggctctcactggtcaaatctaggacaatatgagtatcagaatgaatgatgacagtaatgagtataacattgagcaagagaagaatccctgagtacacagtgatgcgaacaaataagtaaaatgggaggaggggaagaaacagctcttctttacaatagaatgtcaacaactgtagaaggagtcatagagtcagaaaatcaccatcatataactgataattgtttcagcaagaatcatcaatgattgctaaattattggatgcagggctgtgggagaacaggatatttacacagtctcaaactatctccctatcaatagtttattaattacaaaggtagaaaagaacacctttaccttggagaaacttggcatataccaacttaagtagatgatcaaagttaacatcatcagtattgggataaactgataccacatgccttctgaggtgatgcactgaggacacacaatatcacttctgtagcattcttgccaaaactgcataaactgaatctgatcatgaagaaacaatcaggcaacccaaattcaacacattccactcataagtgttctgtactcttcaaaaatattcattaaagtcaaagagaggctgaggaactatttcaaactcaggagacttggaaactaaatgcagtgtgtgatcttggattggattttagattagtaggaaacatgactgtaaaaaagtgactgaaaaataactggtattattgggacatcaatgttaaatttcatgaatttaatatatattggttatgtaagttaatgttcttgttctgagctgaaattagtttgagcctatagggggcaaagctgtctaaaactcccaaatagttctgcaaaaagattttcagtggggtacacacatggagagagacagagagagagagagagagagaacatatttgatgaaacattaattgatgagatgaatctaagtgaaggctatatggggtgttcattgcacaattcttgaaacttttctgtgggtttgaaatttttcaaaataaaaagttgaaaaagaagcaatttggaaatttc

SEQ ID NO: 15448 - DNA, 1599 bp, Homo sapiens
attacatgggttattcaaatcctgggtcctgagctgctgtttccaatcatgaagaaaaacagtgaatccagtgaacagggattctccaagcagtcatttcagggggctcctgctgaccccgccactcagcagtgcactccccggatcacagcagggcgtttacatagaaagacgttttggtctcgattagctccgatgctttgcgctgaagttgcaaaagatctgtgcactgaacagtgaaggtggcttccggcacactccccgctgccccggaagagacatcctttgaccctctcagcaagtctgtgtgtgtgcgtgtctgtgcgtgtgcgcgcgtgtgtgcatgtgtgtcaaaattgccagtgttgtttaggcaatgtaacatttaccggctgtgtacagcaaacaagctattttttagaaaccgacgtttcagggaagaggggagagagccgcggggtcctgcccgtggttactatgaatgtattgctgttggaggacatctcgatccaaagaacagccgttcctgtgcggcccttcgttgccctcctgctttcattttttaaagaaatcttgagtgcttgagggccttggaactgattttttttttttgttccagccaaattagcagtgtataaatggcacctaggtaagagcagagctgcggctcggtgacttgatacttggggcagcccgatgctgtgtgtggggcaggggaggcatccttactggagaggcagggcccagccattgggcacctctgggaaggggaggggaccatgaggcagccagcccctggcaggggcgactgtgccaccgcaggcagcgctccagtcgggaatggccaggatggcgccctcttgttggagtttttggttagcttttacgttttcttctccacccacggcacaggtgataaaataggatccttggtgcggagcttaaaattatgccagaaagccaacagctcccctcgtggggccttgccttaaacttgcctggtttgtacattttttgccggacgcatcaagaagcaatctgtgacaaagtctgagggtcttcctttatgcttgccctccacactaagagaagttggcgtctccctcctgggaattgttttgcctttctgttcatctgtgaactgttttttgtttttaattactctgtaccccatccgaatcagggcttctaccactgctgatgcaaaaccacaaagggacctacctgagccaccgtcctagccaagcgagcaaacctgcagggggtttggaagtggacttggtcaccgcagaagcgtgtgcgccgttgggggaagagctgcgtcacagccagagggacaaagtgtgggtgatcctggagacgccagtttccgagattgttctgcatattcatttgcacattgttgtctgggttggacatgcgtgtgggcttcagtgtgaggcttttaatatgtatatcctgttatcaataaaacaattatccaagtggttgaatcctgtgagacttggcaagtgtgtgcaaatcaagtatacttgacttttcaacctcttctttcaatgtaacttttatatgaaataaagtaatcaattaacagttctc

SEQ ID NO: 15449 - DNA, 2041 bp, Homo sapiens
tcgcagttcaaacctggtatgccatcagaaaattcatacaggagaaaagccttacaaatgtaatcaatgtggcaaggtctttaatcaagcatcataccttacaagacatcaaataattcatactggagagaggccttacagatgtagtaaatgtggcaaagcatttcgagggtgttcaggccttactgcccatcttgcaatccatactgaaaagaaatctcatgagtgtaaagaatgtggcaagatcttcactcagaagtcttccctcaccaatcaccatagaattcacattggagagaaaccttacaaatgcaccctgtgcagtaaggtcttcagtcacaattctgaccttgcacagcatcagagagttcattcatgagagtccctacaaactgtgtatggcaaaaccatcatcatgagttctagcattaatcaacatcagtgagtccatactaagtggaaatcatataaatgaaatgtatgtgacacaggctttatcaaggcctgccaaatcactggacatcaccacatcactgtggaggatgaaagcacacagatgaattgtgtgtacttgggctattattcaaggaccattgctatagaacacgataggatttacacaagaagtaactctgtctctggttctctgatactaatctatgatattgcatgatgcagaataatgctaagtcaaaatatgttgaatctcatgacctgatgtatatcaaaggtgcaacggcttgtaaatgaccagttttattcaggctataaagcattcaattatttggggcttatagaaaaggctactttactctttgtgacttcgaaatcttttcatgtgccttccatacaggccattcactgtggtccctgggaaagaatcagtaggatgacagggctgacttcattagctgaggattatttctatccaatttcctgatgaaggacattgccttttgagattaaatattgtctgatttagagagcatggaggtgggcagagtaacataaaactgatgaccgtcatcatactgttgcagttagcacactttctcctgacataagtgcacagagcttcagtgtccaccaactgaccatgaaatagagtatgctgtaatcttaaggcataggttattagtgggaagagagtaataggttgctagtgtctgattatatggtagaaataatgcaaggaaaaaggtagccaccttctccattgaacagcagtacctgctgtttagcaaagactgatgagaagtagacttttttttttttggagatagagtctcactctgttgcccaggctggagtgtagtggtgtgttcttggctcactgcaccctccgcctcctgggctcaagcagtccttctgccttagcctcctaagtagctgagactacagacgtgcgccaccacacccagttcatttttgtatttttagtagagacagtgtttaccatgttggccaggcaggtctccaactcctgacctcaagtgatatgttcacctcagcctcccaaagtgctgggattacaggcatgaaccatggtgcccagcctcatttttgaaatggaatagagaacagttatatcacagttgagagtttaatcaaaatgaccggatcagcatattctttttttagatgagacagagtttcgcccttgtcacccaggctgtagtgcggtggcgcgatctcggctcactgcaacctccgcctcccgggttcaagcaatgctcctgcctcagcctcccaagtagctgggattacaggcgtgtaccaccatacccagctaatttttgtatttttagtagagatggggtttcaccacgttggccacactggtctcaaactcctgacctcaggcgatccatctgcctcagcctgaaagtgctaggattacaggcgtgagccaccacacctggccagctcagcatattcttaagtaggattcacatttaattcttggtattataagttgcaaccatttgatttagaatgtatgcagctctcatgtttgtagtaataaagtttcatttttcct

SEQ ID NO: 15450 - DNA, 1939 bp, Homo sapiens
gatgagcacctaggaggactttcctcatgtttgccttttcacacacatgcaaatgtttcattgaaaatcttctgaaagccgcaatcttgccagaatccccagtaatgagcttcgttcttagtatactaagaatttagtttatgtgaacttagaaactattgcactccccccacaagtaaaaagctgtaagatcatttctgaaataattaaaataactcaaatttaagcaagatgataaaaacatacatgaaaacttaaaaatataaatgtaaatgataaaatttttcatttgtgtgaagcactgcaaaaaattttcccaaaaaaagctgtgcgaaaaaacacgtagtagtaataggaacccaaaaaacttaatcacctttccagataccagagcaaaatcataaaggaacctgccccatagactgtcacccaaatggtgcgtgctactgccagaatggaccttagccattggttccttcattctggctttgcagaggaagtttcatgtcagatactgagcccagctgcagctaccccagcagagcctcaggcctttcccgcactgtcttgggaaacatgggcgtactttgaggtctcctgcaaccgtgttgtttggtgtcccccaaatgaacaaccaccttgttgacttgcttttgctgacccagctgtgcggggcagggttgccatttagcacctcatcctcctaccaagtgaggctcagctccctgtgggccctggggatgggaggagggtgtgcacagaccccgaaacttggtggtgcgcagggacgaaagagaagtgcagcctgggccctgttgtaggatggatgttaatatcagcgtcctttctccatgtcccccacacacgtttccgtcctacccctccctccctgttaatctgtgttaatatttggcttgaatatgtattctgctttttaaaaaaattacatgtaaggaaaacaaaatctcaatttcttggatagtgtcgacattctttttgttactgatacgtttaattgttttgtttgcaaggttccagaatatcttaaccatgtaagtaaacgcttagaggaagagggagacagagtaatcacttacttggaccacagcacacagtaagtaccgtttgctcgctgagcgttcgtatcttcaccgtggctggaaggttctcctggctggttattgaaataaagggtgtctttgtcaattcattcagtactaagagtgtttttgcacctagcatattttactttgttatttgtcattatttggcattcacaaattacagtttttacccagtgccttgtcatgagttacgtctaaagagagtaaatcttgctgagatacttggcatctttgagttttgagacggtctatttatgttaatggagtatcactgaatattaggttattttgattgtgcattctctgttacacattttatatcgctttaattttatttatggtgctgtcacacaattttctcttttcatcttatgtttttttcctgcaaacctgaggttgatgagtagctagggaaacaaaaagggagagattatgtgagcgtgtgtgtcaggcacagtgtgtccatatgatgggaggcaaggacagaggcagaggggacagcaagggagagaaatgaaaatgatacagtgtgcagctgggcgcggtggctcacgcctgtaatcccagcactttgggaggctgaggtgggcagatcacaaagtcaggagatcgagaccatcctgaccaacatggtgaaaccccgtctctactaacaatacaaaaaaattagccgggcgtggtggcgggaacctatagtcccagctacttgggaggctgaggcaggagaatggcatgagcccgggaggcagagcttgcagtgagccgagatcacgccactgcactccagcctgggcgacagagcgagactccgtctc

SEQ ID NO: 15451 - DNA, 2244 bp, Homo sapiens
  CDS (7)..(1896)
gcttccatgactaacttggtcaagatgggctttccttctaaaacagacagccctagctgtgaatattctcggtttgattttgatagcgatgaggacttcaatgctttcttcaactcctcccgagcacaacaaggagaggtgatgaggttggcatgtcgtttggatcccaaaactagcttccagatggctggggagtggctaaagtatcaactatcaacttttcttgatgctggttctgtgaattcttgttctgcagttggaactggagaaggaagcctctgttccgtcttctcaccttcattcgtgcagtgggaagccatgactctttttttggaaagtgttatcacccagatgtttcgaacactaaatagagaagaaattcctgttaatgatggaatagagctattgcagatggttctgaactttgataccaaggatcccctcatcctgtcctgcgtccttactaatgtctctgcactctttccatttgtcacctacagaccagagttcctgccccaggtcttctctaagctattttcatctgtcacttttgaaactgttgaagaaagtaaggcccccagaacccgggcagtgaggaatgtgaggaggcatgcttgttcctccatcatcaagatgtgtcgtgactacccccagcttgtgctgcccaattttgacatgctttataaccatgtgaagcaactcctctccaatgagctactcctgacacaaatggagaagtgtgccctcatggaagccctggttctcattagcaaccaatttaagaactacgagcgtcagaaggtgttcctagaggagctgatggcaccagtggccagcatctggctttctcaagacatgcacagagtgctgtcagatgttgatgctttcattgcgtatgtgggtacagatcagaagagctgtgacccaggcctggaggatccgtgtggcttaaaccgtgcacgaatgagcttttgtgtatacagcattctgggtgtggtgaaacgaacttgctggcccactgacctagaagaggccaaagctgggggatttgtggtgggttatacatccagtggaaatccaatcttccgtaacccctgcacagagcagattctgaaacttcttgacaatttgcttgcgcttataagaacccacaatacattatatgcaccagaaatgctagccaaaatggcagagcctttcaccaaggctctggatatgcttgacgcggaaaaatctgctatattaggattacctcaacctctcttggaactcaatgactctcctgtcttcaaaaccgtcttggaaggaatgcagcgtttcttctctaccctctatgaaaactgttttcatatcccagggaaggcaggcccttccatgcagcaagacttctatactgtggaggaccttgctacccagcttctcagctcagcctttgtcaacttgaacaatattcctgactaccgactcagacccatgcttcgggtctttgtaaagcctctggtgctcttctgtcccccagagcactatgaagccctggtatcccccatcctcggacctcttttcacctacctccatatgaggctttctcagaaatggcaagttatcaaccaaaggagcctgctgtgtggagaagatgaggctgcagatgaaaacccagagtctcaagagatgctggaggagcaactggtgaggatgttaacccgagaagtcatggacctaatcacggtttgctgtgtttcaaagaagggtgctgaccacagtagtgctcccccagcagatggagacgatgaagaaatgatggccacagaggtcaccccctcagctatggcagagcttacagacctgttgtccatccagtccactgacaagagggtttccccgagagccgaagtggactgaagctacagtttttagctggtgcgggccacaggcagggtcagattgagaagaagcaaagctggggaagcagaagttgggagtcttgtgttgctccctcttcctgtgtggtgctctgggtttctgtggatcgtgaaggcgatctcaagagtgtttccctccaaacctgatagctgcctattcctgtctggttggggctgtggaggatgtagttgtatttattgcattgtaatatttttaacatcctgtgacttcatgctagaaattttctattgtttatagaaactttttgtagaaacattaactctaaagcacatctgcatgtcagtaaaaatctcagtttcgtac

SEQ ID NO: 15452 - protein, 630 aa, Homo sapiens [sequence omitted]

SEQ ID NO: 15453 - DNA, 2014 bp, Homo sapiens
  CDS (63)..(1688)
agacgttgttgcttgggcgcttctccgctgcgtgtaggtgaagggggcttcctgaccgagacatggatttaggtgctattacaaaatactcagcattacacgccaagcccaatggactgatccttcaatacgggactgctggatttcgaacgaaggcagaacatcttgatcatgtcatgtttcgcatgggattattagctgtcctgaggtcaaaacagacaaaatccactataggagtcatggtaacagcgtcccacaatcctgaggaagacaatggtgtaaaattggttgatcctttgggtgaaatgttggcaccatcctgggaggaacatgccacctgtttagcaaatgctgaggaacaagatatgcagagagtgcttattgacatcagcgagaaagaagctgtgaatctgcaacaagatgcctttgtaattattggtagagataccaggcccagcagtgagaaactttcacaatctgtaatagatggtgtgactgttctaggaggtcaattccatgattatggcttgttaacaacaccccagctgcactacatggtgtattgtcgaaacacgggtggccgatatggaaaggcaactatagaaggttactaccagaaactctctaaggcttttgtggaactcaccaaacaggcttcttgcagtggagatgaatacagatcacttaaggttgactgtgcaaatggcataggggccctgaagctaagggaaatggaacactacttctcacagggcctgtcagttcagctgtttaatgatgggtccaagggcaaactcaatcatttatgtggagctgactttgtgaaaagtcatcagaaacctccacagggaatggaaattaagtccaatgaaagatgctgttcttttgatggagatgcagacagaattgtttattactaccatgatgcagatggccactttcatctcatagatggagacaagatagcaacgttaattagcagtttccttaaagagctcctggtggagattggagaaagtttgaatattggtgttgtacaaactgcatatgcaaatggaagttcaacacggtatcttgaagaagttatgaaggtacctgtctattgcactaagactggtgtaaaacatttgcaccacaaggctcaagagtttgacattggagtttattttgaagcaaatgggcatggcactgcactgtttagtacagctgttgaaatgaagataaaacaatcagcagaacaactggaagataagaaaagaaaagctgctaagatgcttgaaaacattattgacttgtttaaccaggcagctggtgatgctatttctgacatgctggtgattgaagcaatcttggctctgaagggcttgactgtacaacagtgggatgctctctatacagatcttccaaacagacaacttaaagttcaggttgcagacaggagagttattagcactaccgatgctgaaagacaagcagttacacccccaggattacaggaggcaatcaatgacctggtgaagaagtacaagctttctcgagcttttgtccggccctctggtacagaagatgtcgtccgagtatatgcagaagcagactcacaagaaagtgcagatcaccttgcacatgaagtgagcttggcagtatttcagctggctggaggaattggagaaaggccccaaccaggtttctgaagataattttcatattcctgagaaactggactttttacaagtctttacaaaactgtcaataataatggcagtactaagagatttataatcataatgtttacaatgcagcctactggattgtctctagatctgtttttcttaaacactaacagaataattctttataaataggtaagccttacacttgttaaagaaatttacctctaatttcagtctcactaatgtaaaatactgggacttaagtatacaattcagtcactaactgtacagttttatgtggggaacaattcatgcaggctactggaaaattaaatcttattacc

SEQ ID NO: 15454 - protein, 542 aa, Homo sapiens [sequence omitted]

SEQ ID NO: 15455 - DNA, 1260 bp, Homo sapiens
  CDS (16)..(549)
acattaaccggcaggatgtcggaggtgcggctgccaccgctacgcgccctggacgactttgttctggggtcggcgcgtctggcggctccggatccatgcgacccgcagcgatggtgccaccgcgtcatcaacaacctcctctactaccaaaccaactaccttctctgcttcggcatcggcctcgctctcgccgggtacgtgcggccacttcatacgctcctgagcgcgctggtagtggcggtggccctcggcgtgctggtgtgggcagctgagacccgcgcagctgtgcgccgctgccgccgcagccaccctgcagcctgcctggccgcagtgcttgccgtcggcctcctgatgctctgggtcgcgggcggcgcttgcaccttcctgttcagcatcgccgggccggtgcttctgatcctggtgcacgcctcgttgcgcctgcgcaaccttaagaacaagattgagaacaagatcgagagcattggtctcaagcggacgccaatgggcctgctactagaggcactgggacaagagcaggaggctggatcctaggcccctgggatctgtacccaggacctggagaataccaccccacccccagcccataattgggacccagagccctttcccagcacttaaaacaggagcctagagccccctgcccaaacaaaacaggacatctgtgaccgtcctacccccacgccagccccaaactaagatatccctcacacccagcccccattacctagggacaagagtcttccccagccttgaacctaggaccaagagccacctacatccagccccaaaactggggcttcaggccagagcatccatggccaatttcaaattgtgaacccagagacactcccatccacccttctccatgctcatccccaaactggggcctggagcaaggcactctcaaatcttgaaccctggaccaaagcttttccagaccccaccctaccttccaacccaggtcaagacattgccaaatcttgaactcagaacccaagtgttccatgcccctgtgtggatggagtcgggtatcctgactgttggacccctggtccaggtgatcccgaccctcaccagtcccatttgcctccctccagctctgcttaggcattttacccctcaccccaatgttccacaccatcgacaaccaaggggtgaggtggggacaggcctcagcagggaatggggcgtatatgttagtgttgctgcaacaataaagcctgttgcatctctcatgcc

SEQ ID NO: 15456 - protein, 178 aa, Homo sapiens [sequence omitted]

SEQ ID NO: 15457 - DNA, 2724 bp, Homo sapiens
  CDS (402)..(2678)
aagaagatgtctcagagtctgttggagcatctggtcaacgccctgttttctgccctgtacacaaacaagaacagttgaaacttttctgtgaaacatgtgatagattgacatgtagagactgtcagctattggaacacaaagaacataggtatcagtttttggaagaagcttttcaaaatcagaagggtgcaattgagaatctactggcgaaacttcttgagaagaagaattatgttcattttgcagctactcaggtgcagaataggataaaagaagtaaatgagactaacaaacgagtagaacaggaaattaaagtggccattttcacccttatcaatgaaattaataagaaaggaaaatctctcttacaacagctagagaatgttacaaaggaaagacagatgaagttactacagcagcagaatgacatcacaggcctttcccggcaggtgaagcatgttatgaacttcacaaattgggcaattgcaagtggcagcagcacagcactactatacagcaagcgactgattactttccagttgcgtcatattttgaaagcacggtgtgatcctgcccctgctgctaatggagcaatacgtttccattgtgatcccaccttctgggcaaagaatgtagtcaatttaggtaatctagtaatagagagtaaaccagctcctggttatactcctaatgttgtagttgggcaagttcctccagggacaaaccacattagtaaaacccctggacagattaacttagcacagcttcgactccagcacatgcaacaacaagtatatgcacagaaacatcagcagttgcaacagatgaggatgcagcaaccaccagcacctgtaccaactacaacaacaacaacacaacagcatcctagacaagcagcccctcagatgttacaacaacagcctcctcgattgatcagtgtgcaaacaatgcaaagaggcaacatgaactgtggagcttttcaagcccatcagatgagactggctcagaatgctgccagaataccagggatacccaggcacagcggccctcaatattccatgatgcagccacacctccaaagacaacactcaaacccagggcatgctggaccctttcccgtagtatcggtacacaacaccacaatcaacccaacgagccctactacagcaactatggcaaatgcaaaccgaggtcccaccagcccatctgttacagcaatagagctaatcccctcagttaccaatccagaaaaccttccatcgctgccagatattccacccatacaggcaaacgttgttccgatgatgcactcctggtatgagtttggagccagagagaagacccaggaccaaaatgtgttggaagatgctggctcaagtagtttagataatctactaagtagatacatctcaggcagtcacctacccccacagcctacaagcaccatgaatccttctccaggtccctctgccctttctccgggatcatcaggtttatccaattctcacacacctgtgagacccccaagtacttctagtactggcagtcgaggcagctgtgggtcatcaggaagaactgctgagaagacaagtcttagtttcaaatctgatcaggtgaaggtcaagcaagaacctgggactgaagatgaaatatgtagcttttcaggaggtgtaaaacaagaaaaaacagaggatggcaggaggagtgcttgcatgttgagcagtcctgagagtagcttgacaccacctctctcaaccaacctgcatctagaaagtgaattggatgcattggcaagcctggaaaaccatgtgaaaattgaacctgcagatatgaatgaaagctgcaaacagtcagggctcagcagccttgttaatggaaagtccccaattcgaagcctcatgcacaggtcggcaaggattggaggagatggcaacaataaagatgatgacccaaatgaagactggtgtgctgtctgccaaaacggaggagatctcttgtgctgcgaaaaatgtccaaaggtctttcatctaacttgtcatgttccaacactacttagctttccaagtggggactggatatgcacattttgtagagatattggaaagccagaagttgaatatgattgtgataatttgcaacatagtaagaaggggaaaactgcgcaggggttaagccccgtggaccaaaggaaatgtgaacgtcttctgctttacctctattgccatgaattaagtattgaattccaggagcctgttcctgcttcgataccaaactactataaaattataaagaaaccaatggatttatccaccgtgaaaaagaagcttcagaaaaaacattcccaacactaccaaatcccggatgactttgtggccgatgtccgtttgatcttcaagaactgtgaaaggtttaatgaaatgatgaaagttgttcaagtttatgcagacacacaagagattaatttgaaggctgattcagaagtagctcaggcagggaaagcagttgcattgtactttgaagataaactcacagagatctactcagacaggaccttcgcacctttgccagagtttgagcaggaagaggatgatggtgaggtaactgaggactctgatgaagactttatacagccccgcagaaaacgcctaaagtcagatgagagaccagtacatataaagtaaaatgacatggatttaaatcaattgtttaaaaaaaaaaaaaacg

SEQ ID NO: 15458 - protein, 759 aa, Homo sapiens [sequence omitted]

SEQ ID NO: 15459 - DNA, 2279 bp, Homo sapiens
  CDS (181)..(1380)
cgcatgcgcagaaacactgggcacagggggaggtaactgcagtaagtcccgcttggccctggagtccacgcggattttcgaagctggggctggcaagaggccgctggacaccacgctccagtcgtcagcccacttcctagctgaacagcgcgaggcggcggcagcgagccgggtcccaccatggccgcgaattattccagtaccagtacccggagagaacatgtcaaagttaaaaccagctcccagccaggcttcctggaacggctgagcgagacctcgggtgggatgtttgtggggctcatggccttcctgctctccttctacctaattttcaccaatgagggccgcgcattgaagacggcaacctcattggctgaggggctctcgcttgtggtgtctcccgacagcatccacagtgtggctccggagaatgaaggaaggctggtgcacatcattggcgccttacggacatccaagcttttgtctgatccaaactatggggtccatcttccggctgtgaaactgcggaggcacgtggagatgtaccaatgggtagaaactgaggagtccagggagtacaccgaggatgggcaggtgaagaaggagacgaggtattcctacaacactgaatggaggtcagaaatcatcaacagcaaaaacttcgaccgagagattggccacaaaaaccccagtgccatggcagtggagtcattcatggcaacagccccctttgtccaaattggcaggtttttcctctcgtcaggcctcatcgacaaagtcgacaacttcaagtccctgagcctatccaagctggaggaccctcatgtggacatcattcgccgtggagactttttctaccacagcgaaaatcccaagtatccagaggtgggagacttgcgtgtctccttttcctatgctggactgagcggcgatgaccctgacctgggcccagctcacgtggtcactgtgattgcccggcagcggggtgaccagctagtcccattctccaccaagtctggggacaccttactgctcctgcaccacggggacttctcagcagaggaggtgtttcatagagaactaaggagcaactccatgaagacctggggcctgcgggcagctggctggatggccatgttcatgggcctcaaccttatgacacggatcctctacaccttggtggactggttccctgttttccgagacctggtcaacattggcctgaaagcctttgccttctgtgtggccacctcgctgaccctgctgaccgtggcggctggctggctcttctaccgacccctgtgggccctcctcattgccggcctggcccttgtgcccatccttgttgctcggacacgggtgccagccaaaaagttggagtgaaaagaccctggcacccgcccgacacctgcgtgagccctaggatccaggtcctctctcacctctgacccagctccatgccagagcaggagccccggtcaattttggactctgcactccctctcctcttcaggggccagacttggcagcatgtgcaccaggttggtgttcaccagctcatgtcttccccacatctcttcttgccagtaagcagctttggtgggcagcagcagctcatgaatggcaagctgacagcttctcctgctgtttccttcctctcttggactgagtgggtacggccagccactcagcccattggcagctgacaacgcagacacgctctacggaggcctgctgataaagggctcagccttgccgtgtgctgcttctcatcactgcacacaagtgccatgctttgccaccaccaccaagcacatctgtgatcctgaagggcggccgttagtcattactgctgagtcctgggtcaccagcagacacactgggcatggacccctcaaagcaggcacacccaaaacacaagtctgtggctagaacctgatgtggtgtttaaaagagaagaaacactgaagatgtcctgaggagaaaagctggacatatactgggcttcacacttatcttatggcttggcagaatctttgtagtgtgtgggatctctgaaggccctatttaagtttttcttcgttactttgctgcttcatgtgtactttcctaccccaagaggaagttttctgaaataagatttaaaaacaaaacaaaaaaaacacttaatatttcagactgttacaggaaacaccctttagtctgtcagttgaattcagagcactgaaaggtgttaaattggggtatgtggtttgattgataaaaagttacctctcagt

SEQ ID NO: 15460 - protein, 400 aa, Homo sapiens
MAANYSSTSTRREHVKVKTSSQPGFLERLSETSGGMFVGLMAFLLSFYLIFTNEGRALKTATSLAEGLSLVVSPDSIHSVAPENEGRLVHIIGALRTSKLLSDPNYGVHLPAVKLRRHVEMYQWVETEESREYTEDGQVKKETRYSYNTEWRSEIINSKNFDREIGHKNPSAMAVESFMATAPFVQIGRFFLSSGLIDKVDNFKSLSLSKLEDPHVDIIRRGDFFYHSENPKYPEVGDLRVSFSYAGLSGDDPDLGPAHVVTVIARQRGDQLVPFSTKSGDTLLLLHHGDFSAEEVFHRELRSNSMKTWGLRAAGWMAMFMGLNLMTRILYTLVDWFPVFRDLVNIGLKAFAFCVATSLTLLTVAAGWLFYRPLWALLIAGLALVPILVARTRVPAKKLE

SEQ ID NO: 15461 - DNA, 2125 bp, Homo sapiens
  CDS (466)..(1851)
aatgaaggcccatgtagcaaaatactgattcaatgtaaagcaaactttgaaaataagctaatagtccttaaagaaaaacttatttcagatagcaaaagacaagccaatgaactcattagttttaaaaaccaaagtcaagaaaggctgaataagaaaaagacagattatgaaaaagaattattggaaaaaagccggaagttggctttaactgtaaagggcaaagaattgagtgaggaagagttacatgagaaattcaatcaactttggaaaaagtgggtgtgtgatgtatccacaactctcccgcaagttacagagcctgacattgatttggattctgaaaacatcctttgggagtatttcaaaaacaagacgaatgtcgtgggtctactgacaaattctgcagagaagtttcaaatcaattatgataaacatatcaaggtgaataagaaatataaccatatcccaatgacattaacagtctttgagaaagagttcattaatatgactactgactacattgtttcaagatttaataaaattattaacaacatgtggaaacaacagtgtggttacaatccaaattatttccatgagattctaaagacaatagaagaagaagtgaaatctgcctctactcagaagagatacacatttacaaatacatttatcattgacttatgtgtgtgtttatttcaaagagcaagagagaattttaaggaaatgcacagggcattcaagagagcaaatgatcctgtaaactacctagaaagtaagaaagatgatttcttcacgagttttaagatctcctgtcaaggagcaacctccatcaaaacatttgttgatattctgtggtataagctcactcctgcagtctccactactatatgggaggacatgacctttaaaattgcgggggacatgcgagctacctgccctgcgttcaatggaaacaggactaacctggagaaacacattctcttctctctggcagaagaagaaaactttgataattactgggaataccttcataattcaaaatcgttttttaggagttacatcaaaaatcatattaaaagatattgttcagacaatggaggtgaaaaaatgaagactttttttgaaaaaagcttaattgatatcaagaataccatcctctctgccatccatgaatccacatcagtagctaaagataaaagcagcactgcttctgagtggttggatttattctgtgattgcctggggtgcaacttgatctttccacgaagggacttgataagcattgaacaccaggagataaaacatactgaatttcttaaagaagccatgagtgcagctttggatctcacaatgaagaaaatagaacagaattattcaagtaagcctatagaagcaatggtttctaaaattgagaaaatgctctctgaacatctctgtggctgctggaaacagtgtcccagctgtggagcaatttgtacaaacacaattcctacacatgaaggagaccatagtgttcccttccaccgtcctcaggctgtcaatggggaggaatggtatgaaacagatgattttgtcattgattgctgtactagtttggttgcaagtgattgtttgttggttttgagggatggcaggaatttcccatttaagaactatcgacaagcaggaggggattatgccatgtggagcatcaccccagatacctccatccagctatactggaaatggtttgtctctcacttcagatcaaatctagaagaaaaatatcagaaaaaatttgcaggtaaaggtaaaatccccaatgcatgggccaaaatcacaaagcaagatgtgcttgaagacttgaaaaaacagtaatactcagtgaccacaaaagagccccagtgtctgaagaaaagaggcagtgtacctgaacaatccaaaaacaactactcattacaattagaaccttcatcatttccatgtttaaaatgaaatgtgtaaaaatcaatcaattaacacattaagagatgaaaatttccagtaaaaggacttcatttctctctgcctcaattcctctagtttaaaaacaacttactaaaatctgttaatatatgatgaaatcaaataacattcattttagaaacct

SEQ ID NO: 15462 - protein, 462 aa, Homo sapiens
MTLTVFEKEFINMTTDYIVSRFNKIINNMWKQQCGYNPNYFHEILKTIEEEVKSASTQKRYTFTNTFIIDLCVCLFQRARENFKEMHRAFKRANDPVNYLESKKDDFFTSFKISCQGATSIKTFVDILWYKLTPAVSTTIWEDMTFKIAGDMRATCPAFNGNRTNLEKHILFSLAEEENFDNYWEYLHNSKSFFRSYIKNHIKRYCSDNGGEKMKTFFEKSLIDIKNTILSAIHESTSVAKDKSSTASEWLDLFCDCLGCNLIFPRRDLISIEHQEIKHTEFLKEAMSAALDLTMKKIEQNYSSKPIEAMVSKIEKMLSEHLCGCWKQCPSCGAICTNTIPTHEGDHSVPFHRPQAVNGEEWYETDDFVIDCCTSLVASDCLLVLRDGRNFPFKNYRQAGGDYAMWSITPDTSIQLYWKWFVSHFRSNLEEKYQKKFAGKGKIPNAWAKITKQDVLEDLKKQ

SEQ ID NO: 15463 - DNA, 2002 bp, Homo sapiens
  CDS (116)..(1186)
ctggggaaatttcctatcgcacgtctgctgcagcagtctcctgtttctcctcctaccttctccatttttctagtccctgcagggcataattggaatatcatttggagaaagtgtcatggaagttctgcgtccacagcttataagaattgatggccggaattacaggaagaatccagtccaagaacagacctatcaacatgaagaagatgaagaggacttctatcaaggctccatggagtgtgctgatgagccctgtgatgcctacgaggtggagcagaccccacaaggattccggtctactttgagggcccccagcttgctctataagcatatagttggaaagagaggggacactaggaagaaaatagaaatggagaccaaaacttctattagcattcctaaacctggacaagacggggaaattgtaatcactggccagcatcgaaatggtgtaatttcagcccgaacacggattgatgttcttttggacacttttcgaagaaagcagcccttcactcacttccttgcctttttcctcaatgaagttgaggttcaggaaggattcctgagattccaggaggaagtactggcgaagtgctccatggatcatggggttgacagcagcattttccagaatcctaaaaagcttcatctaactattgggatgttggtgcttttgagtgaggaagagatccagcagacatgtgagatgctacagcagtgtaaagaggaattcattaatgatatttctgggggtaaacccctagaagtggagatggcagggatagaatacatgaatgatgatcctggcatggtggatgttctttacgccaaagtccatatgaaagatggctccaacaggctacaagaattagttgatcgagtgctggaacgttttcaggcatctggactaatagtgaaagagtggaatagtgtgaaactgcatgctacagttatgaatacactattcaggaaagaccccaatgctgaaggcaggtacaatctctacacagcggaaggcaaatatatcttcaaggaaagagaatcatttgatggccgaaatattttaaagttgtttgagaacttctactttggctccctaaagctgaattcaattcacatctctcagaggttcaccgtagacagctttggaaactacgcttcctgtggacaaattgacttctcctgaggtggatcttggaaagcactagaaactaaacatcttcaccaggtgctgaagaaaagtgtcttcgttttaattgccaagcagggatgtggacatttggatggtgacttccctgggtggttccccatagattcaccattgcctctaatggtgtctacacccgtcatactaccagctgagatggtggtgggcataaggagaatttgtgcctataacccttagtgtgttctggtttttttttcttttaatttttaaatcgtcgtaaaatactcataaaacatactgtcttcaccatttttaagtgcacagttcagtaacgttaactgttaatacattcataatgctgtgtggccgtcaccgccgtccatctccataggcttctcagcttgtaaaatggaaactgtacccattaaacagtaattcccactcctcccagcccccgcagccaccattctgctttctgtctctctggttttgactattctcagtatctcatataagtggaatcatacagtgacttgtctttttgtgactggcttatttcacttagcataatgtcctcaaggttcatccatgttgtgtcaggtgacaggatttccttcctgtattatacatataatggaatgttccgttacatgtgcgtaccacactctgttcctccatcagtgaacacttggcttgcttcctcttgactattgggagtagtgctaatacagacacgggggtgcaaatatctctttgagactctgcctttaattcctttaccacccagagttttatctttagcaaaataaccattaaagttgtttgcctttt

SEQ ID NO: 15464 - protein, 357 aa, Homo sapiens
MEVLRPQLIRIDGRNYRKNPVQEQTYQHEEDEEDFYQGSMECADEPCDAYEVEQTPQGFRSTLRAPSLLYKHIVGKRGDTRKKIEMETKTSISIPKPGQDGEIVITGQHRNGVISARTRIDVLLDTFRRKQPFTHFLAFFLNEVEVQEGFLRFQEEVLAKCSMDHGVDSSIFQNPKKLHLTIGMLVLLSEEEIQQTCEMLQQCKEEFINDISGGKPLEVEMAGIEYMNDDPGMVDVLYAKVHMKDGSNRLQELVDRVLERFQASGLIVKEWNSVKLHATVMNTLFRKDPNAEGRYNLYTAEGKYIFKERESFDGRNILKLFENFYFGSLKLNSIHISQRFTVDSFGNYASCGQIDFS

SEQ ID NO: 15465 - DNA, 1696 bp, Homo sapiens
  CDS (62)..(898)
actgcggtgtggactcgagggctgggcgcggggccggcgcagaagccgccagctggagacgatggtggaccacttggccaacacggagatcaacagccagcgcatcgcggcagtggagagctgcttcggggcctcggggcagccgctggcgctgccaggccgagtgctgctgggcgagggcgtgctgaccaaagagtgccgcaagaaggccaagccgcgcatcctcttcctctttaacgacatcctggtgtatggcagcatcgtgctcaacaagcgcaagtaccgcagccagcacatcatccccctggaggaggtcacactggagctgttgccggagacgctgcaggccaagaaccgctggatgatcaagacggccaagaagtcctttgtggtgtcggccgcctccgctacggagcgccaggaatggattagccacatcgaggagtgcgtgcggcggcaactgagggccacgggccgcccgcccagcacggagcacgcggcaccctggatccccgacaaggccacggacatctgcatgcgctgcacgcagacgcgcttctctgccctcacgaggcgccaccactgccgcaagtgcggcttcgtggtctgcgctgagtgctcgcgccagcgcttcctgctcccgcgcctgtcccccaagcccgtgcgcgtctgcagcctctgctaccgcgaactggccgcccagcagcggcaggaggaggcggaggagcagggcgcggggtccccagggcagccagcccacctggcccggcccatctgcggagcgtccagtggagatgacgatgactccgacgaggacaaggagggcagcagggacggcgactggcccagcagcgtggagttctacgcctcgggggtggcctggtctgccttccacagctgacccccggcctgcagaacatctgtccccaagccagctccactgcccaggcccctaagagggcagctccagaagctgcccagggctccgggaccccatcccatggtggcaggtgcagcggtggggagtggctctttctggactcccagtgcctttttgctggacactgtgtccttatggcttcactgcaggtaatgcctttcccttcaggaagccccagaacacccacaggtcttggtaacaaacgccaccttacactctgcaggctgcagcggcagctccagatggcctcctgagctggacgaccccaggtctccagacatctagggaccagagcaggtttgggaacacagagggaagacaggatgggagtgtagccacagaacccacctgcaccctgacaggcacaccccactgaagagcctgagtcccaggaggcctcctggaagcccaggactgcccacccaccacgctggtgcccaccgcctggccagccaagccctgccgatcagacatgtgggctccccgaagcccagccagagactgccgtgctgtgggtgccaccaggcccagggactgcagcctgagctccccgaggcccagggcagccgggtgaggactctgtcctgtgtcacctctctccaggtgtccagctgtctcatgcctttttgtcctgtcctcagctctccgtgtggtcagcgaaaccattgttttctgttaggactcagttgcaagaacagaaaccctgcccccacttaataataaaaaagaaagtttattgatgggtggttgcaaaac

SEQ ID NO: 15466 - protein, 279 aa, Homo sapiens [sequence omitted]

SEQ ID NO: 15467 - DNA, 2142 bp, Homo sapiens
  CDS (120)..(2141)
gaagttggcgcatgcgcctaaagctgacgggtttgaaatggcttcgatgttagccgggacccgactcagatcgatgctatagaagacaaacaagggaaggttttttttccttttgcatcatggctcaatttggaggacagaagaatccgccatgggctactcagtttacagccactgcagtatcacagccagctgcactgggtgttcaacagccatcactccttggagcatctcctaccatttatacacagcaaactgcattggcagcagcaggccttaccacacaaactccagcaaactatcagttaacacaaactgctgcattgcagcaacaagccgcagctgcagcagctgcattacaacagcaatattcacaacctcagcaggccctgtatagtgtgcaacaacagttacagcaaccccagcaaaccctcttaacacagccagctgttgcactgcctacaagccttagcctgtctactcctcagccaacagcacaaataactgtatcatatccaacaccaaggtccagtcaacagcaaacccagcctcagaagcagcgtgttttcacaggggtggttacaaaactacatgatacatttggatttgtggatgaagatgtattctttcagcttagtgctgtcaaagggaaaaccccccaagtaggtgacagagtattggttgaagctacttataatcctaatatgccttttaaatggaatgcacagagaattcaaacactaccaaatcagaatcagtcgcaaacccagccattactgaagactcctcctgctgtacttcagccaattgcaccacagacaacatttggtgttcagactcagccccagccccagtcactgctgcaggcacagatttcagcagcttctattacaccactattgcagactcaaccacagcccttattacagcagcctcagcaaaaagctggtttattgcagcctcctgttcgtatagtttcacagccacaaccggcacgacgattagatcccccatcccgattttcaggaagaaatgacagaggggatcaagtgcctaacagaaaagatgatcgaagtcgtgagagagagagagaaagacgtagatcgagagaaagatcacctcagaggaaacgttcccgggaaagatctccacgaagagagcgagagcgatcacctcggagagttcgacgtgttgttccacgttacacagttcagttttcaaagttttctttagattgtcccagttgtgacatgatggaactaaggcgccgttatcaaaatttgtatatacctagtgacttttttgatgctcaatttacatgggtggatgctttccctttgtcaagaccatttcagctgggaaattactgcaatttttatgtaatgcacagagaagtagagtccttagaaaaaaatatggccattcttgatccaccagatgctgaccacttatacagtgcaaaggtaatgctgatggctagccctagtatggaagatttatatcataagtcatgtgctcttgctgaggacccacaagaacttcgagatggattccaacatcctgctagacttgttaagtttttagtgggcatgaaaggcaaggatgaagctatggccattggaggccactggtctccttcgttggatggaccagacccagaaaaagatccctctgtgttgattaagactgctattcgttgttgtaaggctctgacaggcattgatctaagtgtgtgcacacaatggtaccgttttgcagagattcgctaccatcgccctgaggagacccacaaggggcgtacagttccagctcatgtggagacagtggttttatttttcccggatgtttggcattgccttcccacccgctcagagtgggaaaccctctcccgaggatacaagcagcagctggtcgagaagcttcagggtgaacgcaaggaggctgatggagaacaggatgaagaagagaaggatgatggtgaagctaaagaaatttctacacctacccattggtctaaacttgatccaaagacaatgaaggtaaatgacctccgaaaagaattagaaagtcgagctcttagttccaaaggattaaaatcccagttaatagcccgattgacaaaacagcttaaagtagaggaac

SEQ ID NO: 15468 - protein, 674 aa, Homo sapiens
MAQFGGQKNPPWATQFTATAVSQPAALGVQQPSLLGASPTIYTQQTALAAAGLTTQTPANYQLTQTAALQQQAAAAAAALQQQYSQPQQALYSVQQQLQQPQQTLLTQPAVALPTSLSLSTPQPTAQITVSYPTPRSSQQQTQPQKQRVFTGVVTKLHDTFGFVDEDVFFQLSAVKGKTPQVGDRVLVEATYNPNMPFKWNAQRIQTLPNQNQSQTQPLLKTPPAVLQPIAPQTTFGVQTQPQPQSLLQAQISAASITPLLQTQPQPLLQQPQQKAGLLQPPVRIVSQPQPARRLDPPSRFSGRNDRGDQVPNRKDDRSRERERERRRSRERSPQRKRSRERSPRRERERSPRRVRRVVPRYTVQFSKFSLDCPSCDMMELRRRYQNLYIPSDFFDAQFTWVDAFPLSRPFQLGNYCNFYVMHREVESLEKNMAILDPPDADHLYSAKVMLMASPSMEDLYHKSCALAEDPQELRDGFQHPARLVKFLVGMKGKDEAMAIGGHWSPSLDGPDPEKDPSVLIKTAIRCCKALTGIDLSVCTQWYRFAEIRYHRPEETHKGRTVPAHVETVVLFFPDVWHCLPTRSEWETLSRGYKQQLVEKLQGERKEADGEQDEEEKDDGEAKEISTPTHWSKLDPKTMKVNDLRKELESRALSSKGLKSQLIARLTKQLKVEE

SEQ ID NO: 15469 - DNA, 2190 bp, Homo sapiens
  CDS (37)..(1026)
tagctttcctcacctcaggattctagcttttgttctatggaaagagatgaggaagactctataatcgtctcagaaggaataattgaggaatacctagcattcgatcacatagatatagaagagggatttcatgggaagaaatcagaagcagctacagagaaacagaaattagggtatcctcccattgctccattttactgcatgaaagaagatgtccttgcttatgtgtttgacagtgtatggtgcaaggttgtgagctgtatggagcagttgacacgtagtcactgggaaggatttgcctctgatgatgagagtaatgttgcagttaccagacccgattcagaaagttcctgtgtgctgagtgaactacatcctttggtgttaccgcgagtgccacagtctaaggtgctgtacattacctcaaatccgatgagtctctgtcaagcaagcagacatcagccaaatgtgaatgatctcttggttcatggaatgcctctacagccaagaaatctctccctaatggacaagctcctagatcttgatgacaagctacttatgaggcctgggtccagtaccatcctttcaactcgaaattggccaaatcgagctgtggagtttagtacatcatctctgtcatacacagtgcagtccaccaggagacgcaatccaccaccacgaactcttcatccgatcagcacgagccattcatgtgctgaaacaccaagatctgtggaagaaatcctcagaggagcccgagtcccagtggcacccgactcgctctcctctccctcaccgacgcccctgagtcgaaataatctgctaccacctattggcacagctgaagtggaacatgtgagcactgtggggccacaaagacagatgctggatacacagtatcgtcgctcatgtgcagttgagtatcctcatcaggcccgacctggcaggggatctgcaggtcctcagttacatgggtctacaaaatctcaaagcggaggcagaccagtctctcgaaccaggcagggaccataaggcaaatgagaagaatctatcaggctgcaggaaacacgagatttcatgaagcagtattcagtcatcaagtgatgcagagcttgtatagaagatcgactagaaatcatcttcatgaagagtgattttggcacaagtgaccgaagaacaaaacaccatagcagccaaaaatgacatgagtgttgtttctatctccagttactgtctctttcagcagaaattaacctatcccattggaaaggcaagtttgtacccaaagatgcaacagtgaataatacccaaatcactgctcatgttatctcttaacaatgatcagttcaatcatataggatttgatgagctcacacatacacaaaaagcagcaaatcatcagtgacaatatcactggcttcagaatacttcagcctgtgttcatttctggagagttgtactcagttttaagtcattttgctgttgaaaatctgacctcatcaaatagatgtcattcctaaaactctctttagatgtcctaccctatcagcagattaaaatggaaggggtgtgtaactaaaaacataaatgttaagcattagtataaagtaacttctgtaataaattatatcgcatattttttcagataggacagctcaaccttacgatgcctacctgatgccaggtgatgcttattttcttcctaaagtaggttactggtcatatcttttttccaaatattaaatgcaccttgccagatattctcctgcagctctaaggaaaggaaatcaatttaaaaataatttgtagaatctactattgagccaccaaagtataattccctaaaagtttaagaaaccctggcaattaattcagcataaacatatcctataaacagcaggagaggttcagctttctgattttactgtggaccttttcctaagggcattcatgaatgcagcaacagttttaactatggcttacatttattttaaatttcactaaatacaaatcttgattgtcatgccagttttagatcttattaattttcagaatggataaattcaaataatcataaattacggtaactttttattataccaaggtgttctaatgccatcatatgaagacagatgcttcaaacaacctgcattaaattatatttttaataaaattaaaatctatttttaacct

SEQ ID NO: 15470 - protein, 330 aa, Homo sapiens
MERDEEDSIIVSEGIIEEYLAFDHIDIEEGFHGKKSEAATEKQKLGYPPIAPFYCMKEDVLAYVFDSVWCKVVSCMEQLTRSHWEGFASDDESNVAVTRPDSESSCVLSELHPLVLPRVPQSKVLYITSNPMSLCQASRHQPNVNDLLVHGMPLQPRNLSLMDKLLDLDDKLLMRPGSSTILSTRNWPNRAVEFSTSSLSYTVQSTRRRNPPPRTLHPISTSHSCAETPRSVEEILRGARVPVAPDSLSSPSPTPLSRNNLLPPIGTAEVEHVSTVGPQRQMLDTQYRRSCAVEYPHQARPGRGSAGPQLHGSTKSQSGGRPVSRTRQGP

SEQ ID NO: 15471 - DNA, 1787 bp, Homo sapiens
  CDS (1199)..(1546)
tctctccacacaccaagcaagcactcctccagcagacacaagctgggtgtcgtgtagttcaattcaatcctaacactgtgtacctggagataacatcagaccccacaggttgagtgctcagtcccccaagagtgtcctccacttcagatgccaactgcaagccccaggttgtggcctgtgcttccgacagagcagccataaatcagggttcccatgactctccttctcagtttctgttaacttactagaggttctcacataactcagggagacacttacatttacccacttattatgaaggacattataaaaaatacagatgaacaaccagatggaaaagtgtatagattaaagtatggaagaagggacatggagctttcatgctctcactggcacattactttccagaaactttcacatgttcagctacccagaagctgttccaaactctgcctttttgagtttttatggtggcttcattgcataggcatgattgattatatcattggccattgttgatggccaactcaatcttcagcccctctcccttctccataggttagggctgaaagtctcaatcctctaattatgtcttggtctttctggcaaccagctcccatcctgaagctatctagggttccacacctactggttatctcattaacatacaaaagataatccatcatttctgaaattctaagggttttagtatctgtatgccaggaaacagggaagaagaccagatatatatttcacaataccacaatggctttcctgggtctccaggtaaatggcagaacataggacatcttagcataatctcatgagctaatttcttactaatttcttataatacatctctctttatgtgtacacacatgcacacacacacccctattataggttggtgcaaaagtaattgtggttttaccactaaaagtaatggcaaaaaccgcaattacttttacaccaacctaatagtcctgtttctctggaaaaccctaactaatacaaagtttcaccccatggagctttgattctcccacattttggacttgtacatatgtgaatgccaaggaatcatgtggtggcatcttatgccttagcattaaaagagaatcccaggatgggaggagaggtgctagcagtttgtaccttgtgaagtcacacaagtcacacatacctgtatgttgctgcaatggctgttggaataagtacacagagtccccaaagactagtgaggccaagatgtgtgagtcattttccatcacacacaaaaaacccaattgttctaagtatgtattttaccaagcagctttatagaaagaaaaacaaacaaacaaaccaaacaacaacaacaacaaaaaaccttggccaggcacagtggcttacacctgtaatcccagcattttgggagattcaggcgggtggatcctttgagcttgggagtttgagatcagcctgggtaatgtggcgaaacctcatctctaccaaaaatataaaaactagccaggtgtggtggtgcacgcctgtagtcccagctgcttaggaaactgaggtgggaagattgcctgagcccaagaggtagaggtttcagtgagccgtgggaagattgcctgagcccaagaggtagaggtttcagtgagccgtgggaagattgcctgagcccaagaggtagaggtttcagtgagccaagattgtatcactgcacaactgttgcctgggcaacagagccagatcctgtctcaaacaacaaaaacagtccttatatttaatctctcacagat

SEQ ID NO: 15472 - protein, 116 aa, Homo sapiens
MAVGISTQSPQRLVRPRCVSHFPSHTKNPIVLSMYFTKQLYRKKNKQTNQTTTTTKNLGQAQWLTPVIPAFWEIQAGGSFELGSLRSAWVMWRNLISTKNIKTSQVWWCTPVVPAA

SEQ ID NO: 15473 - DNA, 1749 bp, Homo sapiens
  CDS (46)..(1407)
atcccacggatcagcatcagcaacgtgcagctggcagacactgtcatgttcaccattggagctctgtctgaatggctggctgaccaccccgtcatgatcaacagtgttctgcccttggtactgcatgccctaggcaatcctgagctgtctgtctcttctgtgtccaccctcaagaagatctgccgagagtgcaagtatgacctgcctccctatgctgccaacattgtggctgtgtcccaggatgtgctgatgaaacagatccacaagacaagccagtgcatgtggctgatgcaggcgctgggcttcctgctgtcagctcttcaagtggaggagatccttaagaacctgcactcgcttatctcaccctatatccagcaactggagaagctggcagaggagatacccaatccctccaacaagctggccattgttcacatcttggggcttctctccaacctcttcaccacactggacatcagtcatcatgaggatgatcatgaaggccctgagcttcggaagctgccagtgccacagggacccaaccccgtggtggtggtgctgcagcaggtcttccagcttatccagaaggtgctgagcaaatggttgaatgatgcccaggttgtggaggcggtgtgcgctatctttgagaagtctgttaaggcgctgctggatgactttgcccccatggtgccacagctgtgtgagatgctgggtcggatgtacagcaccatcccccaggcctctgctcttgacctcactcgacagctggtccacatctttgctcatgagcctgcccactttcccccaattgaggccctcttcctgctcgtcacctccgtcacactcactctcttccagcaagggcccagggatcatcctgatattgttgattcatttatgcaactcctggcacaggctctgaagcggaagccagatttgttcctgtgtgaacgattggatgtcaaagctgtgttccagtgtgctgtgctggccctcaagttccctgaggcacctactgtcaaggcctcctgtggcttctttacagagctgctgcctcggtgtggggaagtagagtctgtgggaaaggtggtacaggaagacggtcgtatgctactcatagcagtgctggaggccattgggggccaggcctcccgcagcctcatggactgctttgccgatatcctgttcgccctgaacaagcactgcttcagcctcctgagcatgtggatcaaggaggccctgcagccacctggtttcccctctgcccgcctcagccctgaacagaaggataccttcagccagcagatccttcgcgagcgagtgaacaagaggcgggtgaaggagatggtgaaggagttcacactgctgtgccggggtctccatggcacagattacacagctgactactgaggggtgcccccatcccatccaccccttctcttcatccttccctattcccaaagagtaaacctggaccctcactgctgtctctgcctcctttctgctgtcaccaccacctaactgaaagcctgggtccagaaggcctgggggaaggatgggaggatgcttggacccaggccttgggagggaatggtgggaacatcctctagctcccaggttggaagagatactactgtagccaagccacctaggctggagcccttcagaatactgtcattgtccttggggcggggtggttgcagtagtgtcatcaacccccccatccccattaaattaatcccaacatgc

SEQ ID NO: 15474 - protein, 454 aa, Homo sapiens [sequence omitted]

SEQ ID NO: 15475 - DNA, 1885 bp, Homo sapiens
  CDS (359)..(919)
tgttgaatgggtctatgaatagaagaagcaagtacaggtcacaatggaggtatagaggagggacatttaacacagactggaggagacgacacttgtgctaggggttgaaggaaatgtaggtgtgagccaggcaaagaatgggaggaagatgtttttcagggatcaagcccaaatccattcattggtaggccaagaattcattgtcagtaaatctttgggtctcctgttgagaagaacaatgattgtattagtcagttctcatgctgctaataaagacgtacccaagtctgggtaatttataaagaaaaagaggtttaacggactcacagttctacatggctggggaagcctcacaatcatggtggaaggcaaaggaggagaaaggcacatcttacacagtggcaggcaagagggcgcttgtgcaggggaactcccttttataaaaccatcagatctcatgagacatattcattatcatgagaacagcatgggaaagacccacccccatgattcaattacctcccacgacatgcgggaattatgggagctacaattcaagatgagatttgggtggggacacagccaaaccatatcaatgatgctaaatcaacccattggtaacactcagagaagtaactggatcactgagtctccatgtgggttaaataagactgcccttttctgtaatggaaaatatttgaaccttagggcttctcagaagggttttgtgagagctttgccatcattcttactcaagccttcaggacagcctgctgagcttaagttcatgctctttttctcttggtttctctgccaattttggtgtgtttaccttcataatttaaatgtgaggtttagaacagagaccatttggtcaggaaatttgtattccttctcattatgcatttcttcatgcagatgagggcacagtgtgatgtttttgtttaaaataaaataacattttaactttttatgtggatgttatgctcaaattacactttttctttacatagattttttttggagaaactaatgcatctggcattgaaaaaatgtgcatttttgttttttttttaaaaagagaatgaagaagttcagttttgaaacagtttctaaatgttcttagttttcacaaaaatgtttgcttgaattctattgtaattttttattttttcccctttaaaccaacataggtaatatccttaagattaaaacttcagaaacttcaggaagatgcagttgagaatgatgattatgataaaggtgagttttaatttgtttattgattgttttgtcatcatgtcccaattttctttccatctttactcatatctaccttttgaatcccaaaagaattgtacaatctgttcctctgatcatctctaccagggaatagttgactcttttacagcattattgttttgtagatttcaaagtacttcatgaacattaatcctttgggttataaatataaccttatcaattgtccagaaacacttagcatactcacacaataaaaattatattagcttgccacctgtcggcccatggtgtgatgtatctataatccacttgttcataaaaaatattcgtctgacacctatgatatgctagggaatatgggagacaataggaaagtaagacagacatggtatctgcccttgtgatgccagtaaacttaagccttcatggggctctctgacttcataatttccagaaccagagataggaaatgaggtgaatttgagaaatgtcagactgtgccaaagggggtcacatgcatcaaatttccacatacatggcctaaaatacccaagagaaaaagaagttacaacattagaccagagatagagggactgatctgaggccaggaaaacaaacaaac

SEQ ID NO: 15476 - protein, 187 aa, Homo sapiens
MVEGKGGERHILHSGRQEGACAGELPFIKPSDLMRHIHYHENSMGKTHPHDSITSHDMRELWELQFKMRFGWGHSQTISMMLNQPIGNTQRSNWITESPCGLNKTALFCNGKYLNLRASQKGFVRALPSFLLKPSGQPAELKFMLFFSWFLCQFWCVYLHNLNVRFRTETIWSGNLYSFSLCISSCR

SEQ ID NO: 15477 - DNA, 2197 bp, Homo sapiens
tcctttgtcaaagatcagttgaccatatttatatggatctatttctgggctctctgttctgttgcattgctctctatctgttgtccttcctttcactgctaccatactgtctttgattcctatagctttacagttagtcttgaagtcacaaaagcatgggatcccccattagtggatcgtcctggaatttttaactctcagatttgtacacacctagccttcagcaatttgtgaattacagttcagattttcctaccctagcactggttcccaaagaggtttctgttaaagtatgttgtgattctctccatctacgactttctcttcctatttttgggacagaggtttgtcttgtgacctcacttctcttacagatctaagagtaatggttgatttttcagtttgttcaactttttacttgttaggatagagtggtgacttccaagcttcatgcagaaccggacaacagaaattgagagggaaatttctatgacagaagagagaaagaagaaaattgctggaataatgaccttgaatagaggaaatgggatatcatctggtaagcaaatagagaagctggctttagataagagcctggacaattcattcatagaatagcagaaaaggcagaatttatgtccatagatgcaagtggtatagtagatatagtgatgggagtttgtaaaagttaccttctaattgctattttttttaatgaaataagaaacaaagtcatcaactcaaagtgagtaatatgtaggaggtgattattgtttgaggagagaggagaatgtgtgatatcttttgttaattatggtaaaatataacacaaaatttgccattttaaccattttaagtggacaattaagtgtcattaattacattcacactgttgtacatctgccaccactatcttcttctaaaactttttatcacctcttatagtttaaattgtgcccccacagaagatatgttggagtcctatcccttaatattaatgtgaccttatttggagataggatctttataaaggtattcaaattaacatgagatcattagggtggaatcctaatccaatatgattagtgtccttataaaaaggggaaatttggacacagaggcaagcacacagggagagtgccaagtgaagatgaagaaaaagatcagagtgatacaaagaagtcaaagaacaccaaagattgccaacaaaccaccagaagctaggagaaaggcctgaaacatatccttcccgcatgccttcagagggagcgtgggcctgcagacactttgatctcagacttctaccctatggaactgtgcaaaaataaatgtctgttgtttaagccattcagtttgtgttacagcacaaatgtattctatttagaatacatcattctaaatagaaattttttaataattaagtattttcctctccttggagcacttggtaacttctaattctactttctatctctattaatttgcctattctagatatatcaaatgagtgaaataatacaatagttgtctttttgtgtctggcttcttttactttgcataatgttttcaaggttcattcatgttgtagcatgtatctgaacttcattctttttctggctgaaaattttattatatgtatgtatcacattttgtgtctctattcatcacttgatggatatttggatagatttaagtcatttgtcttttgtgaatagtgctattaatattatgaacacttgagtacaagtttttgtttaaatacctcttttcttttttcttggatgtattatctaggtgaagaatggcaagacatatggtaattctatttagctttttgaggaactgccaaacctttccacaatgactgcacaattatacatttccagtagggttccagtttatccatattctcaccaatgcttttatttttctgttttttaaaattatactgatcataggaggtgtaaagcagtatttcagtttggttttgatttgcatttccctaatgattaatgatgttgagaatcctttcacatgcttattgaccatttttatgtcattttgggaaaatatttattcacatttttgcccattttttagttgggttgtctttttttgctgttgagttgtaggagttctttatattttctggatattaaaccctcatcagataaattatttgcaaatgttttcttcc

SEQ ID NO: 15478 - DNA, 1859 bp, Homo sapiens
  CDS (550)..(858)
atcaggatgtctgagaggagagcatggtgtttttgcttcattggatccatgcaggtcttggagggtggtggcccactctttctgggccaagtagagggtggctcagacacccccccttcctccaggcttctcatctgtaactggtgaagcccggaagagcttgttgttcaagaggaaatcttgtgttacttctttatgaaggactccagcctggtggagatgaatgagtcctgaagatggaatcgaagctgtttgggcacaatactttaatcagcatttaatgacccagtcgaaaattcattgtttggacccaagcactggtgggaaaggcaggaggggaggcctgccttccttcctccctcccgagccctacagcaggccatggagtggtgagcgagttcgtacagtgccaaccacattcccagaaacttccagcagaggttaatcctgctcctctcaggtaggagacaatgaatggattttaacaaatggactccctgtgttagctaatgccagtccctactcaacctaggatgactccaatggcgcatgtccccattcccgggccctaaggctgcgctaacatgctatcctgcctgccccttcattctccaccctgccacattcccactcctttcccctcccaacacgaagccatgcctgagctggacacccttccataccaacccaggaaaaagtgattcagctccggtccaccctgggtgcagcggtccttctgccaagatgccttcatatcatacagctattattttcgggaggattccaagtgagggcagtcagggtgggcttggcccattctctagactttggaaggtaatgttctatagaggcctgttctgaagctttaccaggtcaaaccggagaagaacccaacaagtaactcatcccagcctaactattcttcaagggcaatcaacctacagcatccaagcacagagaaatcaaatccatggagaatcttcaaattaggctcagaatccatttgggtcaatgaatttactgttattaagatcttagttgtgttcaaccatgatttgacataccttagagtgagaagatattcttcctggcctcagactggttgaaggtagagagagagacaggcccttgggtgtggggagacctctcctgggataatacacacaaaaaaccaagagctgctcactgtggtgcaggagacagcagggcctgaagccagaggctctgtgtccttgaatacaatgttttactcctctgacccctgttactgtgatttggagaggcagacaatataggatgggctttgcaggcagggaggtccagttataatcccagctcttactaagttgggtaagactcactctgagacttagtttcttctgtcatctctcaatagaatcataaaggtactttcctcttagtgttgttttaaaattcagtaaaataatgcaggcttagcacagggtctgatgtaaattttcaatgaattatcgttgtcaatattgttctggaaaacaagagggcatattagaagatcaaaagtactgccaagcattgaagtgccaattctagatccagtctcagccctctgagaatggatatcattgttttcaagccattcagaaaccaatgtgaattgaacacctagtatgagctctctgagggaagagccaagtcatgcattttttatcttaaggggtcttcaatacctctagcccaaaacagtatctccatcaggattcttctctgatagtgttcatttcttttttctcaatggatgccttaaaaaaaaatcctacaaggaaacctgtactcctcaaatacaccactcaggtgaccattaaatcatttacattgtt

SEQ ID NO: 15479 - protein, 103 aa, Homo sapiens
MSPFPGPKAALTCYPACPFILHPATFPLLSPPNTKPCLSWTPFHTNPGKSDSAPVHPGCSGPSAKMPSYHTAIIFGRIPSEGSQGGLGPFSRLWKVMFYRGLF

SEQ ID NO: 15480 - DNA, 2331 bp, Homo sapiens
  CDS (1052)..(1486)
ctttcttgatgccgttacgtccatggatttttttccaggattaaatttggaaggctatcctaacagagacagtacgaaatatgctgagatttatggcatttcttctgctcacactttgttgcgggggacactgagatataagggattggaatgctgaataatggattggaatgttgaataatgttgaataccttcctatggtatcctccctaactccttccccttgaaccacccagccccatctatggatatatgaaagctttgaatggatttgtaaaattaggtcttataaacagagaagcgcttcctgcctttagacctgaggccaaccctctcacccggaaacaactcctctgtgacctagttgggatttcaccctcctctgagcatgatgtgttgaaggaagctgttcttaagaaactaggaggagacaatacccagttggaggctgctgaatggtaggcacccaccactcaacttagagcaaaatatactggatcaatgattgctaatttctactcaaaaaaagttaaatattttacatttgtctttgattaattcgttgctctaatgtgggtagagagattaccatgtgccatgttcatgtgggcataaagagtagataaagagaggagctcaatggcaattagaatttgagaaatgcttatctcgaaacactttaccactcagttcccaagcatagtggggtatttttgctttcctgtaggagatttggagtagtcatagaatattacatgaaaacattctttcatatgaccgctgtggcatcctgctggtatacctaatgttggagaactaacctataaattaatctcataaagatctttgtaagaacatgggattacaatccatcatctctgccctgctccagggagcagtgcctgggtgagtctggagaagattctgaaggttaaaacattgctattgttattgttattttacattttaggagaatcctacaacttgagttaccaccttgtaattctgccctttcaagattaaattcaaggagctcccttttgcttcccaaatgagaacatgtataggacttgaactaatgcagccatctcctgtgcttttcaggttgggcttacttggggatgaacaagttcctcaggcagagtccattctggatgccctctcaaagcatttggtcatgaagctttcctatggtcctgaagaaaaagatatgattgtgatgagagacagctttggaatcagacatccttctggacatttagaacataaaacgattgatcttgtggcttatggggacatcaatggcttttcagccatggctaaaaccgtggggttacccaccgccatggcagccaaaatgttgcttgatggtgaaattggagccaaaggcctaatggggcccttttcaaaggagatctatggaccaatattggagcgaattaaagcagaaggcattatatatactacacagagtacaattaaaccataattgggaattatattttgtttttttcttcccaggcaatacacctctgaacatgtgtgtgataaatgggtttgctaatgtgctgttttaaagtataaagcataatatgttttggttaacacaatgtactttttgaactataaatctttattttaatatggaaatgtttggaacaggagatgcaagccactaacagagaactttaataattctaccctgtattttataaatacgtatgtgaaagtgatgatcatgctatttgttaatttattgtgccactttttttcttttgttttttttttgttgttgttgttttttgagatggagtctcgctctgtcacccaggctggagtgcagtggcgcgatctcggctcactgcaagctccgcctcctgggttcacgccattctcctgcctcagcctcccaagtagctgggactacaggcacccgccaccacgcccggctaaattttttgtatttttcagtagagacggggtttcaccatgttagccaggatgtccacttttttcttaaatgaacatattgtcttataaccagcaaatgaagttttacttttttaatcagaaaaaatttcgtcataaagctatatttttatatttttaaaattgatacagttagataccttcagattacctaagttaagtttttgccaaaatgctattttatgccctttttgtaaagttatgatttattttgtaaatatagttccttatagttttctcttgagtgtttggacatgagaatagataagattaaattacaatttacaagatcacttcattaggcacaggaaaagtatttaacaaaattcaacaccctttcac

SEQ ID NO: 15481 - protein, 145 aa, Homo sapiens
MRTCIGLELMQPSPVLFRLGLLGDEQVPQAESILDALSKHLVMKLSYGPEEKDMIVMRDSFGIRHPSGHLEHKTIDLVAYGDINGFSAMAKTVGLPTAMAAKMLLDGEIGAKGLMGPFSKEIYGPILERIKAEGIIYTTQSTIKP

SEQ ID NO: 15482 - DNA, 1976 bp, Homo sapiens
  CDS (120)..(1742)
aaaaagtgtgggggcagtgggcggaacaaacgcgccgactacagaggctggacgtaagcttagcggtggcgcgcgtgcgcagcgccggcccgagttgccaaaacaaaggggatttggtgatggaggctttgttagaaggaatacaaaatcgagggcatggtgggggatttttgacatcttgtgaagcagaactacaggagctcatgaaacagattgacataatggtggctcataaaaaatctgaatgggaaggacgtacacatgctctagaaacttgcttgaaaatccgtgaacaggaacttaagagtcttaggagtcagttggatgtgacacataaggaggttggaatgttgcatcagcaggtagaagaacatgaaaaaatcaagcaagagatgaccatggaatataagcaggagttgaagaaactacatgaagaattatgcatactgaagagaagctatgaaaagcttcagaaaaagcaaatgagggaattcagaggaaataccaaaaatcacagggaagatcggtctgaaattgagaggttaactgcaaaaatagaggaattccgtcagaaatcgctggactgggagaagcaacgcttgatttatcagcaacaggtatcttcactggaggcacaaaggaaggctctggctgaacaatcagagataattcaggctcagcttgtcaatcggaaacagaaattagagtctgtggaactttctagccaatcagaaattcaacacttaagcagtaaactggagcgggctaatgacactatctgtgccaatgagttggaaatagagcgcctcaccatgagggtcaatgacttggttggaaccagtatgactgtcctacaggagcagcagcaaaaagaagaaaaattgagggaatctgaaaaactattagaggctctgcaggaagaaaagagagaattgaaggcagctcttcagtctcaagaaaatctcatacatgaggccagaatacaaaaggagaagttacaagaaaaagtaaaggcaactaacactcaacatgctgtagaagctataaggccacgggaagaatctctggcagaaaagaagtacacctctcaagggcagggggacttagacagtgtgctctcccagttgaattttacccatactagtgaggaccttctgcaggcagaggtgacttgtcttgaaggcagtttggaatctgtgagtgcaacgtgtaaacagctgagccaagaactaatggaaaaatatgaagaactgaagaggatggaagcacataacaatgaatacaaagcagagattaagaagttgaaagaacagattttacagggtgaacaaagttacagttctgcactagaaggaatgaagatggaaatctcccatctaactcaggagttacatcagcgagatatcactattgcttccaccaaaggttcttcctcagacatggaaaagcgactcagagcagagatgcaaaaggcagaagacaaagcagtagagcataaggagattttggatcagctggagtcactcaaattagaaaatcgtcatctttctgaaatggtgatgaaattggaattgggtttacatgagtgttccttgcctgtatctccccttggttcaatagctaccagatttttggaagaggaggaactgaggtctcatcacattctagagcgcttggatgcccatattgaagaactaaaaagagagagtgaaaagacagtgagacaattcacagccttaaagtagcctcttaaaaaaatcacaatcttggaaataaaaataaacaccaaagagttactgtcatctgaagtagcagctctttaaaaacatgaagagataaaattataaaaatgatacatctaaagcagtggtgaagaaagctgaaaaactgatacttttgataggcattttctctgcactggtttgtttaaaggacttcttccagcaataagttgaaagaataaaccactttgctag

SEQ ID NO: 15483 - protein, 541 aa, Homo sapiens
MEALLEGIQNRGHGGGFLTSCEAELQELMKQIDIMVAHKKSEWEGRTHALETCLKIREQELKSLRSQLDVTHKEVGMLHQQVEEHEKIKQEMTMEYKQELKKLHEELCILKRSYEKLQKKQMREFRGNTKNHREDRSEIERLTAKIEEFRQKSLDWEKQRLIYQQQVSSLEAQRKALAEQSEIIQAQLVNRKQKLESVELSSQSEIQHLSSKLERANDTICANELEIERLTMRVNDLVGTSMTVLQEQQQKEEKLRESEKLLEALQEEKRELKAALQSQENLIHEARIQKEKLQEKVKATNTQHAVEAIRPREESLAEKKYTSQGQGDLDSVLSQLNFTHTSEDLLQAEVTCLEGSLESVSATCKQLSQELMEKYEELKRMEAHNNEYKAEIKKLKEQILQGEQSYSSALEGMKMEISHLTQELHQRDITIASTKGSSSDMEKRLRAEMQKAEDKAVEHKEILDQLESLKLENRHLSEMVMKLELGLHECSLPVSPLGSIATRFLEEEELRSHHILERLDAHIEELKRESEKTVRQFTALK

SEQ ID NO: 15484 - DNA, 1928 bp, Homo sapiens
ttctttgatgcgacctcaggaaggagatgagggccggtgcataaacttctcccgagttccatctcagtaaaagggaagcaggaagaccaagaaggtacgaagatggcacattttcacatagctgattttcaaccaaatgaaaaaaatcaagtgcatttcagaagcttttggaagagcagcttaattcctctcagtcgggaaatgttttctctgccttctgctttgcttgcaccaaacatttctaaacacttgttctgccatctacatgggaggtgatgaaactcagtggtaactcatggtttatgacattgaaaataaagaggaacattgacctgcagactatggtttgtacaagaaagtttgtttgaatgtgtagaagaggaaaaagcaacaacagcaacaacatgaagatgataccaaaacaaggaccacaaaacaactagccatgatgggagacaggagttttttacatggaaacatggcacctgtgtttttatgtggcaagatctttatctataggcagagtatgaaatttcccaccaggctaagcaaataaagaagtccattgccttatagctatgtcagatcacagaatccttccaagtgctctatcacagtgtgccttatgggaagtttctgactggaaaatcttgtcattctaacactgaaaagtgcacacgcatgacaaaatgtagacaagatgcctcaaggtattggtagcaagcaagattttgccctttagttttcgaagacacctttctttcattatgcactcgggacaagaaaattaatagagcgttattccacagaaggcctctagccagagatcttgagtgtagtgcaagggactcatgctttgcgaacttgtccctgtgactagtagattcccccttttcctgtgtttaggatttagtagtgcataaagcattaatatccataaacatacctagaagtttgttttgcttttaatttaaaggaagcagtaaccacaaagcttccgctcagggttttttctttcttcaagtctccaagggctcttcagcgtcacaagccagcaactctctttgcattaaaatttcaaagtttaattaatataattaaaagcaacagcaagcagcagcctgtgaagattttgctcatcttttttatgccttttgacattgaatgacctattactgtatgcgcattacttggattttgaggggcactctaccttggttatgattcagtagaggaaaaagaccacctttcttcaatttacaaattaaatcttctggagggtcgctatcacaaaacattgacgatgtatgtattataattttttagaaaaaccaccatcgtgtcacgtcgacgatgccaaattatgttagcgtgagcagaaacaccgtgggggaggaaggcagcagctgaagaaaaaagctcaaatgatctagtcactttcgatactgtacttcagatgcgaaatggatattcgagtggaaacctgacaaagtgcgcctgctttgatgtgaactggtatagacaatgaccagtggctgggtcagtgggatgtctctctgtgagcacaaaggcttatcaaatgacactaaagataagttcaacaaccatcacattggaagggagcaggcgaacatttcatgtttggcgggcatgtgagtgcacaagatggaaagagcgattggagcatcctggtataattacccccattgtgctcttaatggaaatttcaaaggacgggaggattctgttggttggtgtccaggtttgtggcactgttccaagaggccttacacacacacacaaatatataattttctatacatatatatcctctagcttgaaacttttgctcaagtttatttatgtcactggctggctggatccaaagtcatgtgtccacacattcataaataaaaattttacctatg

SEQ ID NO: 15485 - DNA, 2056 bp, Homo sapiens
  CDS (1278)..(1844)
tttgcatgtattttcataagggatgttaatctgtggttttctcttcttgtgatgtctttgtctagctttggtatcaggatacagctagcctcatggaatgaactaggaagtatgccctcctcttctagtttttggatgacccatcatctcttacctcacctacagcaggaaccttgaaattggacttctgcctcacaccctgcaatctcatctccacattatgaccagagtgatcttcttttttaaaaaaaacttattgttactatttcaattgataaatgaattgtatatatttatggtgtacaacgtggtattttgattgtgtacacattgtggaatggctaaatcaagctaattaacacaccattttttgtggtgagaacacttaaaatctactctcagcagttttcagatacagactacattgttattgactgtagtcaccatgttgtacagagtgatcttctcagtggacaactctgtgcacatccctcagagccgcaaggcagtgatatccaggttcctgaacagggtctccaaagccctccacccacgggtcctttccttcctgtctcgccacatcttccaggtccatgtctcagctatgtgaggttcttttcagttccttaagcacatcccactgttagctcagagatatgttgcagtcctaactccaagtacctataaatgtggccttatttcacaatagggtctttgtaaatgtaattaagttaggatgtggtcatattgaattggggggtgggggttaagccaaatgactgtgtccttagaagaagaggagaagagacagacacagacaaaggaaagaaggtcaggtggaaatggaggcagagatcagaatgatgtgtgtataagccaagaacacctgggactatcggaacctggggcagccaaggaaggatcctcccctagagtgttcggaggaagcatggcactgccgataccttgaattcagacttccagcctccagaactaggagagaataaacttctgttgttttaagccactgagtttgtggttctttttccagcagccctaggaaactcatacaaggatataggaggtttatttgcagatgagtttgttgcttctttagtggtctgtatctcatagcactagaaagaatagaaaagttaattccagataatgtgatgtatttgttttgtttttcgtagacaaagggtggaggatatgaaagtgaaagtgcttacccaaatgcagaacttgtgttcttggagatccacaacattcatgtcatgcgagagtcactacgcaaattaaaagagattgtgtacccttcgatcgatgaggcgcggtggctctccaatgtggatgggacgcattggctggaatatataaggatgctgcttgctggggcagtaagaattgctgataaaatagaatctgggaaaacatctgtggtggtgcattgcagcgacggttgggaccgaacagcccagctcacatctctggctatgctaatgttggacagttactacaggaccattaaaggatttgaaactctcgtagaaaaggagtggataagctttggacacaggtttgcactgcgagtgggccatggtaatgacaaccatgcggatgctgaccgatctcccatatttctgcagtttgttgattgtgtttggcaaatgacaaggcagtttccttcagcattcgagtttaatgagctattcttgattacaattttggatcacctttatagctgtctttttgggacctttttgtgcaactgtgaacagcagcgattcaaagaggcatggggggctgggacccagcgagcccgtggctctctcaggagtagatgagtgctagaccctggacctcctgactccgagttcatgtagtctccgctgcaccaactccaaaaccgtgggattctgcttttcatcctctgtggtgttggccagatcatacttgaaggccttggaaatggagtctgctgattagccaaaaagcctactttaggtagcaagctaacacttttttacatcaaagtagtaaagaagcagttacc

SEQ ID NO: 15486 - protein, 189 aa, Homo sapiens
MRESLRKLKEIVYPSIDEARWLSNVDGTHWLEYIRMLLAGAVRIADKIESGKTSVVVHCSDGWDRTAQLTSLAMLMLDSYYRTIKGFETLVEKEWISFGHRFALRVGHGNDNHADADRSPIFLQFVDCVWQMTRQFPSAFEFNELFLITILDHLYSCLFGTFLCNCEQQRFKEAWGAGTQRARGSLRSR

SEQ ID NO: 15487 - DNA, 2827 bp, Homo sapiens
  CDS (37)..(1176)
aaaaaaaaaaaaaaagtcggcggccggactgggaagatggacgcagctactctgacctacgacactctccggtttgctgagtttgaagattttcctgagacctcagagcccgtttggatactgggtagaaaatacagcattttcacagaaaaggacgagatcttgtctgatgtggcatctagactttggtttacatacaggaaaaactttccagccattggggggacaggccccacctcggacacaggctggggctgcatgctgcggtgtggacagatgatctttgcccaagccctggtgtgccggcacctaggccgagattggaggtggacacaaaggaagaggcagccagacagctacttcagcgtcctcaacgcattcatcgacaggaaggacagttactactccattcaccagatagcgcaaatgggagttggcgaaggcaagtccataggccagtggtacgggcccaacactgtcgcccaggtcctgaagaagcttgctgtcttcgatacgtggagctccttggcggtccacattgcaatggacaacactgttgtgatggaggaaatcagaaggttgtgcaggaccagcgttccctgtgcaggcgccactgcgtttcctgcagattccgaccggcactgcaacggattccctgccggagctgaggtcaccaacaggccgtcgccatggagacccctggtacttctcattcccctgcgcctggggctcacggacatcaacgaggcctacgtggagacgctgaagcactgctacatgatgccccagtccctgggcgtcatcggagggaagcccaacagcgcccactacttcatcggctacgttggtgaggagctcatctacctggacccccacaccacgcagccagccgtggagcccactgatggctgcttcatcccggacgagagcttccactgccagcacccgccgtgccgcatgagcatcgcggagcttgacccgtccatcgctgtggggtttttctgtaagactgaagatgacttcaatgattggtgccagcaagtcaaaaagctgtctctgcttggaggtgccctgcccatgtttgagctggtggagctgcagccttcacatctggcctgccccgacgtcctgaacctgtccctaggtgagagctgccaagtccagattcttctgatgtagagcgactggaaagattcttcgactcagaagatgaagactttgaaatcctgtccctttgaaaatcctggggtcgggggtggcacctgtgagagcctggggctcctggtgccgctgcgtttcatccatcccgcccgctcgcctgccgagggctgcgccccgtgctgcctccccccagagggccacccgctgtgctcgtggactgaggctgcgctgcccgggaggccttactgcttggtgtcagactgcccagctcagagtgcccgtcagggcctgtgcatccgcacgcggagccgtctgttaggagcttccagagtgttctctcgacgctgccagccccgtgttagcacctgggcctcagtcccacttgctcccaggcgccggttctgtggttggtttggaattaaagtcctgtttgaagttgtcagacacagacatgaatttctgggcgctccctgagtcagagtctcagaagacctgtgcaggctggcgtgagaggagcggcagccacactgcggccccacgcccaaggactgggctgctctcgaggggggcgcgcccaccgctgtgtcctctctgcccagcctggcttaccaagggctacctcagtgggagatgaggttggaggaacgaaggcgaggttcctccttgctttggggagaaaagtattcaggaagtgggtgtgtgggaaacctgaagatggcgtgcacaggacacagcgtgggcggcctgggcagaagggcggctggctgtcctggagctgctgctggagcctgccctcagagtgtccctttccagtgctgtggcattctgtggcagcttccccaggtgtggtgacgggggggggcggggcctccacctgtgacagccaggcttgagggtggacggcgtgcctctcccaggagccttccccatgtccttgccttgctgagaattgccctcccatgccgctgaggtgttaggtggtttagggccaaaaggggaaaaccacttgagtcttgtggtgtgtggtgggcagacaccacagggtggcatcacctggtggcatttccagaacctcagccccgattccagcacccaccaccgcctgaccctgtgtaacctgctgtcccgggtcccagagtgcactctgccccgctgctctgctgcctgtcctgggaaagtatctttgccccactaggaaatgtaaacaggagggcttggggagcgtgggcacttttctcatgagcagctactgcggcgttggcaggactcgctgctgctgctgctgcttgtgtaggtcggggagccagagatccccgaggacgcgcgccggacagtcggcactgaccggcccacctggtagcagaggacacccccagccccccaagcattgaagacatagtgtatttcctcgtatcctttctcccttgggtgtagttggggtggggaagcagggaaggctggtgcgatctccattccttgggctccacgtccgagttcatggtgcgccgctgtgctgggagctgcagtggtaatgtgtgggacaccttgaccaaaggggagctttgtctcgtgtgttttgaaaaaggcttaatgaagagaatgttgttcattcttagtagtatagtttgcaattcttaatggcaaataataagtttcagtagaaaac

SEQ ID NO: 15488 - protein, 380 aa, Homo sapiens [sequence omitted]

SEQ ID NO: 15489 - DNA, 1854 bp, Homo sapiens
  CDS (101)..(1357)
cttttccggcccgcagcgcggcctgggctcccgcgtgtttaaaagtgcgcttgtggctgctgctgtcttaactcctgtgcttggcggacagacaggcgagatggcggcggaggtgttgccgagtgcgaggtggcagtattgtggggcgcccgacgggagccagagagctgtactggtccagttctccaacgggaagctacagagtccaggcaacatgcgctttaccttgtatgagaacaaagattccaccaaccccaggaagaggaatcaacggatcctggcagctgaaacagataggctctcctatgtgggaaacaattttgggactggagccctcaaatgcaacactttgtgcaggcactttgtgggaattttgaacaagacctctggccaaatggaagtatatgatgctgaattgttcaacatgcagccactattttcagatgtatcagttgagagtgaactggcgctagagagtcagaccaaaacttacagagaaaagatggattcttgtattgaagcctttggtaccaccaaacagaagcgagctctgaacaccaggagaatgaacagagttggcaatgaatctttgaatcgtgcagtggctaaagctgcagagactatcattgatacgaagggtgtgactgctctggtcagcgatgctatccacaatgacttgcaagatgactccctctaccttcctccctgctatgatgatgcagccaagcctgaagacgtgtataaatttgaagatcttctttcccctgcggagtatgaagctcttcagagcccatctgaagctttcaggaacgtcacgtcagaagaaatactgaagatgattgaggagaacagccattgcacctttgtcatagaagcgttgaagtctttgccatcagatgtggagagccgagaccgccaggcccgatgcatatggtttctggataccctcatcaaatttcgagctcatagggtagttaagcggaaaagtgctctgggacctggagttccccacatcatcaacaccaaactgctgaagcactttacttgcttgacctacaacaatggcagattacggaacttaatttcggattctatgaaggcgaagattactgcatatgtgatcatacttgccttgcacatacatgacttccaaattgacctgacagtgttacagagggacttgaagctcagtgagaaaaggatgatggagatagccaaagccatgaggctgaagatctccaaaagaagggtgtctgtggccgccggcagtgaagaagatcacaaactgggcaccctgtccctcccgctgcctccagcccagacctcagaccgcctggcaaagcggaggaagattacctagacgcatgctttccagacagggcgttttggctgcatcacagccactggctggtcctattcatttccatttttatgtatgttttgaaaagaaaaggtccggggatggtggctcacacctgaaatcccagcactttgggaggccgaggcaggaagatcattgagctcaggagtttgaaaccagtctggacaacatggggagaccccatctctaccggaggaaaaaaaaaagagtcaggcctggtggtgtgcgcctgtaatcccagctactcgggaggctgaggcaggacgattacttgagcttgggaaatcaaggttgcagtgagctatgattgtgtggccacactccatcctgggtcacagagtgagaccttgtctcaaaaaagtaacataaggaaaaaagaagccttgctttagcacaggtatgaagccagaagccagcatctcaactgtgcttgtcttatgcagaaatataaagcgatggccaggttggacttc

SEQ ID NO: 15490 - protein, 419 aa, Homo sapiens
MAAEVLPSARWQYCGAPDGSQRAVLVQFSNGKLQSPGNMRFTLYENKDSTNPRKRNQRILAAETDRLSYVGNNFGTGALKCNTLCRHFVGILNKTSGQMEVYDAELFNMQPLFSDVSVESELALESQTKTYREKMDSCIEAFGTTKQKRALNTRRMNRVGNESLNRAVAKAAETIIDTKGVTALVSDAIHNDLQDDSLYLPPCYDDAAKPEDVYKFEDLLSPAEYEALQSPSEAFRNVTSEEILKMIEENSHCTFVIEALKSLPSDVESRDRQARCIWFLDTLIKFRAHRVVKRKSALGPGVPHIINTKLLKHFTCLTYNNGRLRNLISDSMKAKITAYVIILALHIHDFQIDLTVLQRDLKLSEKRMMEIAKAMRLKISKRRVSVAAGSEEDHKLGTLSLPLPPAQTSDRLAKRRKIT

SEQ ID NO: 15491 - DNA, 2132 bp, Homo sapiens
agacccatcccgcggtgcagccgccggcccggtaggcgccaggaccccgagcctcggcggcggcggcggcggcggcagcgctgccttcactcacctcgtcctcgctcccgtcctaccccgttccgcgctgggtggagtccaagtctgattgcgagagtccggaacgccgcctcgggggcttgactccagccccggggatcgagaacggcgcccaggggtccctacgtctgccttgggggctcgagtcccgccctgggcgtccgtgacgtcgcccaggggtctccacgtttgtcctggaacctggagagccgccgtgggggccccggaagccgcccaggagtccccacgtctgccctgggggctcgagtccagctctcagggtcccggacgccacccagggggtccccatgtctgctttgggggctcgagtccagccatgggggtcctggacgccgcctcggcgtccccgcgtctgccttgggggcccgagtcccgccctgggggtcctggacgccgcctcggcatccccgcgtctgccttgggggctcgagtcccgccctgggggtccccgatgccgcccgggggtcctcacgtctaccttggagactggagttcccccgtgggagtctcggacgccaccccggagtcaccgtgtctagccttgggggcttgagtccagccctgggggtcccggacgtcgccgaggagcccccacgtctgcctttggggcttgagacctgctctgggggtcccggtcgccgcccaggtgggtccccacgtctagccttgggggcttgagtccagccctggggggcccggatgccgcccgggggttctcctcgtctgccttgggggttgggtccagccccaggcgtcctgaccaccgcccaggggcccccacgtctgcctgggggcctcaaattcagtcctgggggtcccggacgcctcccaggggtcttcatgtctgccgtgggcctcgagtccagccgtgagggtcccgaatgctgccttggagggtggagtccagctctgagggtcctgaagtcagctttgggggttcgaacccatccatcccaggggtccctgagtctacattaggggctggagtccagccttgagggtctccactgctgccttgggggcctggatgggatccagcgggtctgagtccagcctcgggagcccctgcggtggagctctgagtggggcaggggcctgggagatgccaggaggatgagagcggcgcccccctggtccaggggacagtaagaggcagccggtctcagagaagctaccccaaaactgttacccgtggtgtgcagagcgtcctgcaaccccagccctcaccaggatttcttgcgtttttcaggaaatcggttgtgattggcatgttccttaagcgtctgcaggaagccgaggcctttttggtatttcaggaggggttgctaacccccctccttgtaggatcggggtatcccagctgctaattcccctcctaacagccctgcagcgcctggattggaggtgtgacaggtggcatttttggcccgaagtccctaggcaggacgggtggctgtagcctgcgcgtttgtgtaaattaacctccctttttagttctgtgaagggagaacgtgattagtttaaaatcacctgcgtgaaagaggctcttgattagtttaaaatcacccacgtgaaaggggctcttgattagcttaaaatcacctgggtgtttcgttttatctcagttggcctctgaatgtttatcctacagcttcctgcaagctccagtctaccttctaagggaataacggggctcgtctttctacgttactttatgtgggagtagttgtaaaacagaatgagggagaccgcggggattgtgcggaaatgtagccaccgtttacatgtcgggaggctgaggtgggaggatcgcttgagcccaggagtttgacaccagcctgggcaacatggtaagaccccttctctaccctcccccccaaaaaaaaaattttagtgtggcatggtggtgggtgcctgtggtcccagctactcgggacgctgaggtgggaggattgcttgagcccaggagtttgacaccagcatgggcaatatggtaagaccccatcatctac

SEQ ID NO: 15492 - DNA, 1998 bp, Homo sapiens
  CDS (43)..(507)
gggaaaaaatcaaaaagtggtaaactgaggaaaaagggtaacatgaagataaatgagacgagagaggacatggatgcacagttgttagaacaacaaagcacgaactcaagtgaatttgaggctccatccctcagtgacagtatgccttctgtagcagattctcactctagtcatttttctgaatttagttgttctgacctagaaagcatgaaaacttcttgtagtcatggttccagtgattatcacacccgctttgctactgttaacattcttcctgaggtagaaaatgaccgtctggaaaattccccacatcagtgtagcatttctgtggttacccaaactgcttcctgttcagaagtttcacagttgaatcatattgctgaagaacatggtaacaatggaataaaacctaatgttgatttatattttggcgatgcactaaaagaaacaaataacaaccactcacatcagacaatggaattaaaagttgcaattcagactgaaatttaggcccataaatgctgcagaataattaccactgtacaaccgtgtttggagctggttgaactacatgtgactacttaagtttcaggttaccagcaaaagccgggtttcattatcataatgcagatacattttctgtgttcagcaaggcattgtgtgtcatgtggatcttagttaccaaactatgaagtgaaggctttaaaagtgcattattttaaggataataaatttgaagagcaaagcatgttttgtgtgtttgccacaaaacattgcttgaagcacatacttagatagaaattggtcttaatttatataatcaatataaaatactaatgcaattctacagcattcaaatgaagaaaacttgaggctttagggataagtggttagtgatattttattgaaaccactaaagagataagtttaaaagaactgcataggttactctcagtatatgatactctgtaacatttctatttatatcggcataaatttcattttttttcttcatatgcaatgtggttatataaagcttaatgcagctcatttgctaccatttggatacttagacactttgagcaagattgtggcagtttttgcacaactttgaaatagaaatacctggtactctatcttgtttattgttgatgccatcttagaggaaaaaatgtaaaggtaagtaattaagcatatgacagcaacaaataagatacataaaactacaaaataaagtcccattaggttataagtattacaaaaaatccacctttctctaaggggaagtttgtaccccattgattcttggtgcctttgggatcgactgggttttaatggcctagttatttgaggattttgctgtgttgttttccatgtcttctctggtcaccttggattatatataaaaatacaggaaatagataaacatgaatgtgattaataatgctgaaaaagtattagcctaccaaagacacactcaggctttagtgaataactttacataacctcagtttttaacacatgcatatcttctccaaccatgaaatcaaagcacggtgcagaacttgtaccaagtacaaaaggtccatgtatgattagcattattttcttttgcttttgtttatggacaatgctcagctgacataagcagaagttggccaaaatactgcctgtactgttaatttcctgtataattcacttaaataaaagcaggttaacctcaatgatagcagttaaaatgttctatcttatgtatttcttttaagtattaccattatggtgctactgagcgttttcttttggtaaaaagaaaaatgccatgggctgcagtcttcttccatcacttttccctaccaggtccattaatatgcttataacactagtgccagttattttatttgataatgcttatggtatttgtatatttgtttgcattccaattttgtttaataatgagtgtgtaaactgcatacgttaaataaatgtaaatactaatgt

SEQ ID NO: 15493 - protein, 155 aa, Homo sapiens
MKINETREDMDAQLLEQQSTNSSEFEAPSLSDSMPSVADSHSSHFSEFSCSDLESMKTSCSHGSSDYHTRFATVNILPEVENDRLENSPHQCSISVVTQTASCSEVSQLNHIAEEHGNNGIKPNVDLYFGDALKETNNNHSHQTMELKVAIQTEI

SEQ ID NO: 15494 - DNA, 2421 bp, Homo sapiens
  CDS (936)..(2204)
agggcgatggcaggttcgccgggtgtgaggcttcacagcggtccggtgaccaagtcgaggatttttctggtggtctagtctcagagattacatctgtagtcagcacaatgattcccttccaagcccagtggtgcccagttgcctccaggtcccagacctttatgtggacaagaaaagcttacagaggaaatggtaattctccacttgcacactgaggtgtccagttgcagcccatggagatccagttcaattatgaatctcaggaacaccaccttctgtcagatggtgagaacaagaccaagattggaaagccagcttcagaggagggaattacagcaaaaattgaaccattgacagaagagtctagcagtctcagaatgttctccaggattctgaaggcaaagaattctgtgaatttggggataaattaaatgaaaaagatcagaacgtctttaaaaggagacctcataactgtgacgaatatgggcaaagctttgtttggagtacaagcctttttaggcatcgaaaaacgcactgtgagaaaccttatgaatgggataagtgtggaaaggccactggggagaaaccttattcctgtaattggtgtattaaaagtttcagttggagctcagaccttattaaacaccaaagagtccacactggtgaaaaaccttataaatgtgatgagtgtgggaaagccttcagtcagagctcagatcttattatacatcagagaatccatataggagaaaaaccctatcaatgccgtcattgtagtaaaagttttagccagcgctcagatctggttaaacatcagagaatccatactggagagaagccttatacttgtaaccagtgtaacaaacattttagtcagagttctgatgtgataaaacatcaaagaatccacactggggagaaaccatataaatgtgatgtgtgtgggaaagccttcagtcagagctcagatcttattctgcatcagagaatccatactggggagaaaccatatccatgtaatcagtgtagcaaaagtttcagtcagaattcagaccttattaaacatcgaaggatccacactggagagaaaccctataaatgtaatgagtgtgggaaagcttttaatcagagctcagtccttattttacatcagaggattcatactggagagaaaccctatccctgtgatcaatgtagcaaaaccttcagtaggctttcagatcttattaatcatcaacgaattcacactggagagaagccttacccatgtaatcagtgcaataaaatgtttagtcgaagatgagatcttgttaaacatcacagaattcatacaggtgagaaaccctatgaatgtgatgaatgtgggaaaacctttagtcagagctccaaccttattcttcatcagagaatccacactggagagaaaccttatgcatgtagtgattgtactaaaagctttagtcgccgttcagatcttgttaagcatcaaagaatacacactggagagaaaccatatgcatgtaatcagtgtgataaaagttttagtcaaagctcagacctcactaaacatcagagagtacactctggtgaaaagccttatcattgcaatagttgtgagaaagccttcagtcagagttctgaccttattcttcatcagagaattcacactggagaaaaactattatctgtgcacacagtgcagcaaaagtttcagtcagatctcagacctcattagacaccagagaatccacactggggaaaaaccatataaatgcagtgagtgcaggaaggctttcagtcagtgctcagctcttaccctacaccagagaatccacactgggaagaaaccaaatccatgtgatgagtgtggcaaaagctttagtcggcgttctgatctcattaaccatcaaaaaatacacactggtgaaaagccgtataagtgtgatgcatgtgggaaagccttcagcacatgtactgatcttattgaacaccagaaaacccatgctgaggagaaaccctaccagtgtgttcagtgcagcagaagttgtagccaactctctgaacttactattcatgaggaagtccattgtggagaagacagtcaaaatgtgatgaatgtgagaaaacctttagtgtgtacaccaactctattcagtaccagagacactgtaccagaaaaaaatctaatgaatgctgttgattattgatgagtatgaaaaaggttttaatcagtgttcaactcttatgctacattaaaaccgcactggatccggatacgtgtggtggctcacgcctgtaatcccaacactttgggaggcagatgtggaagcatcatttgagcccaggagtttgaggctgcagtgagctatgattccaccattgcactccagtctgggcaacagagcaagaccctgtctattt

SEQ ID NO: 15495 - protein, 423 aa, Homo sapiens
MCVGKPSVRAQILFCIRESILGRNHIHVISVAKVSVRIQTLLNIEGSTLERNPINVMSVGKLLIRAQSLFYIRGFILERNPIPVINVAKPSVGFQILLIINEFTLERSLTHVISAIKCLVEDEILLNITEFIQVRNPMNVMNVGKPLVRAPTLFFIRESTLERNLMHVVIVLKALVAVQILLSIKEYTLERNHMHVISVIKVLVKAQTSLNIREYTLVKSLIIAIVVRKPSVRVLTLFFIREFTLEKNYYLCTQCSKSFSQISDLIRHQRIHTGEKPYKCSECRKAFSQCSALTLHQRIHTGKKPNPCDECGKSFSRRSDLINHQKIHTGEKPYKCDACGKAFSTCTDLIEHQKTHAEEKPYQCVQCSRSCSQLSELTIHEEVHCGEDSQNVMNVRKPLVCTPTLFSTRDTVPEKNLMNAVDY

SEQ ID NO: 15496 - DNA, 1812 bp, Homo sapiens
ttagtatgtgtggctatttaaagtataatgactttggtttggttatatgagtgacacagaatttaaggaggcttcatgccatagttcatagtttgctctaatggcttggtggtatccctgaacagtctacttttagaaattaacagtaaatacacaatccagctgtaatcttaccctccaccagggggagcttcaacatcggttaatactttttttttttttgagatggagtctcgccctgtcgcccaggctagagtgcaatggctcagtctccgctcaccgcaatctctgcctcccgggttcaaacagttgtgcctcagtcttccaagtagctgggattacaggcacccgccaccacgcccagctaatttttgtatttttagtagagacggggtttcatcatgttggcgaggctggtcttgaactcctgacttcgtgatccgcccccccctcagcctcccaaagtgctgggattacaggcgtgagccaccgcgcctggcccggttaatactttcataagcattgaagtaactatttaagtcctagtacataaacactgtgtggttcacaaaaaggcatagagacattctctcaagagtttacaatctaattgggcagggaagatactacagttcatcaaagatatgaataacaccctagttttctgaactgcagctgcatgggtaattatcttaagaacttttggcaaaatatggatgttggtgtattactctcttctccctacaactctgagctaatctgtgtttggcaccttgatttgccatcataaatggccaccatttactcctcactgaaatattcttcttctttgaggttataatgtacttggaaaagttaatacttatagaaaataatgatctttattaccaactttattaaaacaggcttggaacatttttctccatagaagaatagtaataagacattctacatttcctggacatggccagtttaaaatattttgccccattacccttgtagatacacatgtatttgtcagtttatgtgcttcagttttgtcttaggcactgagggacagaaagagaaataaggaataccttggtattttcctttgcaagcaatcacagcagaatgctagaaaacataaaatatactcttataaattgtatgtgtgttgaaaccaaagtgtgaagaaattgtcaggtatttggaggaggaaaataatttgtaaaataacctttttaagaatttggattttgtacttatttaaggtgctaaatatgtgttaaaatatcccctcttgaatcagctccaggcttaaaagggcagagtggtttggattcttgtccagggtctggaaagagctcatcttgccgagagggaaataaatgtgagctttgaggcggtctaactacccagcttttagtatttatgttccccaaaatgtaaaaactgtaagttattcttgaaaatgtagtccagacatttctttgatcctggattttactgcagtttcatcatgggtttgttgaatgtgcagtccatttattgccctgtcttgcttaaatattcttgttgagaacagctggaggctttgactgggttcctagttctgttttctgggaaggcaacgtggattctgttttgtagacattaatgagctttaaatgggaattggggatgatgtatgttcgttgggcatgctgagaagcggcctcctgtggttctgggcccaaggtgtgacatacatttcccactaattgcttctctcaagaagcaagagattggctgttcctcttgaggaaaaaccttaataaaccttcccatttt

SEQ ID NO: 15497 - DNA, 1917 bp, Homo sapiens
agtaactcttgagctggctcagggagcgcacttccttctcagccagcgcgtcgccccctgcatccgtggcctccactggagctgggcaggaccctacccagtgaatctggagaaaacaaacttgggagacagacgaaagcttagggcacattggaggacagcgcagctgtggctcccatttttggagatgcagtcgaatttgagctcacagggaggtgtggttgcctcctggggatggaaaggcttcctttctccacctctgtaactggtgcttctgagaagtaaatggtatttggatcctgacctcagacgcgaatttgggtcttctgtgcttaggagcagaaagagcccaggaggggcctgttcctttacttcttgggggaaacgcaatgcgtggcctgacttctcatgacgggaaaggctactccaccttctctgtactcctggaggggagtcttgttcacatgtttaccagcggccaggacaaggaagagaaaaggtattgacattaagaggatggtttgctgaggctgtgaaacttgaacgctattagtcagtggaacctgcctggcttagggaatggctgcagcagaatcgagacgtttccgaggttctcagtcatgtttcatttgggctgctgttcttttttctgtttaaatcaaacttcaggttacgtcatgacttctgcagggctgtccttggttcctactgcagggcgcctgtgtggttgggattccttttctgtttcaagatggagctgggttccacccttggagctttgagaggctttagcagttgctgccctgtaatacctccgttcccaagaaataccgttcacatttcgcttctttttcacactttgaataggagttaaaatgtgctttctgtagtgtttggaaaatggcaaagatatattgtaatgtgagcccgaactgttgttgataaatgtataactattgctaggtcaagaaattgtgaacaacagtgttttgcttggtccgtagctatattgtgttaaatataaactgagtttactgcccttggatgtgattctttggtttgatttagtaatttgaaaggcattggttgactagactgttttttgcccaaggaaccactttgtaattgttacgctgcttactgaagtaaactggaccatgcagtaggcatacagcatacagccagggcgttttggcaatgctgagcccactgttttacaagtgacataaaatggatgtcatatgtacaaagaatctactgagagggaaactggattacaggagagctcccttatagtcctttgtcaggggacagaatacctgggtcacactgggcttcagattgagggttgattcatgttctgagtccatatgatgagacacattacgatggaattgtcacttttgttgcctctggaactttaaaatacccgtttagtgacgtggaattaatctttattttttccgtcaccctcagccctcatttaagctatcagttggtaaccacttgggtaatctaaacctaagttgcatttatttggtcacattggtaaccaacattgcttcttaaaagttccttgcaacagaatgactataattgagataaaacgttaattttgaggctttaattttgtaatatggattagtggccgggcgcagtggctcatgcctgtaatcccagcactttgggaggccgaggcgggtggatcacgaggtcaggagttcgagaccagccatggtgaaaccccgtctctactaaaaatacaaaaattagtcgggcatggtggcgggcccctgtaatcccagctacttgggaggctgaggcaggagaattgcttgaacctgggaggcagaggttgcagtgagccgagatcgcgccattgcactccagcctgggcaacgagcaaaactccatctc

SEQ ID NO: 15498 - DNA, 2381 bp, Homo sapiens
  CDS (222)..(1556)
aagtggcaccagcacttccggtacggaaaactcgctgctgccccaacctggcttgacaggcttggtctctgcaagtggctctcagccccttcttctttcctgcctcaccttccaattcgtttgccgccgccgtcccgcagctgctgtttccggagttgccccttccccatgttccggggcaggagtccgcaaagcgaagatccgcccgccggttccccatcatgtccgaactgactaaagagctgatggagctggtgtggggcaccaagagcagccccggtctctcggacaccattttctgccgctggacgcaagggtttgtgtttagtgaatcagagggatctgcattagaacagtttgaaggtggcccctgtgctgttattgcacctgttcaggcatttcttttgaagaagctcctgttttcttcggagaagtcttcttggcgggattgttcagaggaagagcagaaggaactcctttgtcataccttgtgtgatattttagaaagtgcttgttgtgaccactctggatcatactgcttggtttcatggttaagaggaaagacaactgaggaaactgctagtatttctgggagtcctgcagagtctagttgccaagtggaacattcttctgccttggctgtcgaagagcttggctttgagcgatttcatgcattaattcaaaaaagatcgttcagaagtttaccagaattaaaagatgctgtcttggaccagtattcaatgtggggaaataaatttggagtattgctttttctgtattctgtattactgacaaagggcattgaaaacataaaaaacgaaattgaagatgcaagtgaacccttgatagatcctgtatatggacatggcagccaaagtttaattaatctcctgctgacgggacatgctgtttctaatgtatgggatggtgatagagagtgctcaggaatgaaacttcttggtatacatgaacaagcagcagtaggatttttaacactaatggaagctttaagatactgtaaggttggttcttacttgaaatctccaaaattccctatttggattgttggcagtgagactcacctcaccgtattttttgccaaggatatggctttagttgcccctgaagctccttcagaacaagccagaagagtttttcaaacctacgacccagaagataatggattcatacccgattcacttctggaagatgtgatgaaagcattggaccttgtttcagatcctgaatatataaatctcatgaagaataaattagatccagaaggattaggaatcatattattgggcccatttcttcaagaattttttcctgatcagggctccagtggtccagaatcttttactgtctaccactacaatggattgaagcagtcaaattataatgaaaaggtcatgtacgtagaagggactgcagttgtgatgggttttgaagatcccatgctacagacagatgacactcctattaaacgctgtctgcaaaccaaatggccatacattgagttactctggaccacagatcgctctccttcactaaattaatttgtctaagtatttataaggaagatcttaataacagatgttgaaagaaggagtcaagactggcaattggctggattaagctaaacactggtatcactgattaactgtaaataacaattaaaaacacattttcagtgtttatgatatgtttaaattatttgtcctaaagctttatgttaaagattatcctattttaccccttcgtgtgaaatttactagcaaaattaagctttcatcaaagttcatcacttttgcattcagatacttggtcatttacttaccaaattacaaacgcaatactacagcatttgtatattaagtatcacagttactattgataaactacttttgggttttatttcattgaggcactttttttattgtttgaatgattccggcttgtaatatatcagcctctacaatgaaatgcagaagagttcatttttctaagatctgtttttcattagaaatattgacaaataacacattgtcaacctggatcctttgacaatttacttaactctggcatgttcacaaaaagtagaaactctaagagaccattaccatttattcacagatgtataggggatgtattctaaaaactgacagaaaagagaatctgatagtcaacactgttaacttttactgtgtaattgccaaatacacttttccaaatttgtcccaacagccctgtaagccagctttcttctatatttataaacacgataaatgcatgagaagatctgttattacattagtatattacgttatttattatgatcctagttgatggcctaaataaacacctttttctttaactgt

SEQ ID NO: 15499 - protein, 445 aa, Homo sapiens
MSELTKELMELVWGTKSSPGLSDTIFCRWTQGFVFSESEGSALEQFEGGPCAVIAPVQAFLLKKLLFSSEKSSWRDCSEEEQKELLCHTLCDILESACCDHSGSYCLVSWLRGKTTEETASISGSPAESSCQVEHSSALAVEELGFERFHALIQKRSFRSLPELKDAVLDQYSMWGNKFGVLLFLYSVLLTKGIENIKNEIEDASEPLIDPVYGHGSQSLINLLLTGHAVSNVWDGDRECSGMKLLGIHEQAAVGFLTLMEALRYCKVGSYLKSPKFPIWIVGSETHLTVFFAKDMALVAPEAPSEQARRVFQTYDPEDNGFIPDSLLEDVMKALDLVSDPEYINLMKNKLDPEGLGIILLGPFLQEFFPDQGSSGPESFTVYHYNGLKQSNYNEKVMYVEGTAVVMGFEDPMLQTDDTPIKRCLQTKWPYIELLWTTDRSPSLN

SEQ ID NO: 15500 - DNA, 2300 bp, Homo sapiens
ctaaacagtggagaggagtgcaggaggcccatcagctgtgcctttcccagaagtagcaggatctgagcaagtgtctgttggttgaagaggcacacatgtcaggctggcaaccagcagcatcaggaaataacctaagacgcggtgtgtttatcattcccctgctgggagcctttggcttggtccgtccgcataacacggggttctttgggtaggcggctagaagccgagcggccgggtcgcagcatcgtctcctttactgcattgtactccacagtcgtaatgggaggttcccgcttcccacatcctttccctcagccgttacatcttggagcctggatgcattatgaaggtatttttgtttcgtggcaacaatttttttaaaattttgttttggtgcttctttgacaacgcggcccacgcagctgccctctgtgcagccattaccccaccaggcctgacacagcttctctctctgggcctgggtatgagggcacagtccaaagtaacactgactttctctctctttccccttctgtttctttgaccatctctctttaggcctaccagttttggcaacagaagttaccggtcaataatcagcaagttaaaaagtatcggatgcgatttcaattatcagacttggtagctgcctcctaggctgtgggtatcctcaatgatctgaattacttctgtcatcttgaggagtgagagtggaaggaaatgtttggtgtgggttcctgggccaggaggttttctccctggggttcccattccagaacgctgtcctcattcatggttgctgttcacctttcaccactccctgcattatttcatgtgggcgaggaacgagtgtggaaatggggattggggactaatagacttgtctcttcaccaggtctccccacacttccagtccagaaaacactttttagttatagaaatggatatatcggctgggtgcagtggctcatgcctataatcccagcactttaggaggccgaggcaggcagatcacgaggtcaggagttcgagaccagcctggccaacatggtgaaaccccatctctactaaaaatacaaaaattagctgggcgtggtggcaggcacctgtaatcccagctactcgggaggctgaagcaggagaatctcttgaaatcggaaggcggaggttgcagtgtgctgagatcacgccactgcactcgagcctgggcgatgagagtgaaactccgtctcaaaaaagaaaaaaaaaaaaaaaaacgcatgaatccgtggaccacttaggcccaagccacatttgattgcagtcttgtgtggcagaaggaacctgtgtcccatttggcacttttggttgcaaacacagagacttggggctttgcaaggaaagggggttactgtttagatgtcaaggaaagaacgcttatctgcggcggtcggatgttggcccttcagctgttcggtcccttaagtgtttgcaccaaaactaggacacctagtgaggtggctgcgaagctgctgaagccccaccgccgtatgttcctgccagggaggcttttgggtgttcatctgacccaggtctctcttctcactgctgcagagcctgagcttccaggaccgttgcgggcgccctgtctgcagggggctagccaggtttcctcacatcgtgggggccccaggtgtcccttcagcttcccagaggtttgctgggggaacaggatgtagcgcctaccccaccctgggcatctgccatcaggtttcctcctctccttgagttcacttctgccactcccagtcctggccacacactgaagctccctgtcacccgccctgcctgtgacaacctcccgcgctaccacacacccttactcccgttcttcctcttcgcacccccaggactcacccaagcccagggttgcccctgctaccccctcactgcccccggcccctcctgaatgccaggtccccctgtcctcctgctccgcgtcacctcagccttgaagccacagtcttcctgcatcacaccaagcccgcccctccccattgttccctataggccttggtgacacggacatccacccagtctcctgcagccatggctgaaccacgtccctcttcctcagcccgtgcagagcgtcctgtaggccttactttgtgcctctcacccccagccccaccccgcctcttgctctcgtgcctgggctttgtggtggctgacctcttcactcccgatcctctccccttcctgtccatccttctattcccctgcagcctgggtgacagagcgagacttcatctcaaaaaatc

SEQ ID NO: 15501 - DNA, 2105 bp, Homo sapiens
aaaaaaaaaaaaatagctaacttactgacagccagccatggaccacgcaaagctgctggtgaaagggggtccctagcttctcagtgtgtttgagccagcaggatctgtcttgacataggccctctctggcctggctcatggtatggccccctcccctggtcgcccccagccgtcccacgaagggtgttatgcgaaatgtttcccatgcaggaattggctgaattctctcaacatccctgtgaggtagattctcttactgtctccgttttatgctgagggtcctgaggctcagaaaggggcagacacacatttaaggtcccacattagtgagcagtggagctgggattgaacccaggtctgcctgactcccccgattgtctgcttgttgcccctgagccctcctgcctctcctgcctccacttccctggtaacccctgcagctgagcaaaagactggaagcacatccccagctgtcaaggcttatgagagaaatggctacctgagccctcagcagcagatgggggcgggctgaagcctcctgctccctgggggtcaggtgggcagcactgatgctcctgtccctaagtgtccatgtgtgttttccccagggatcagccagaggaggagcgggggaagcaggagtcctctcctagcccatcttgggagggctaggcgcatggcatagagggtggcgcttcaaggaggacagttaggcgtagtgcctgggagtagactcagcaggccccttgcaggcagcagctctgaagtctgggggacctcagcaaaggcaagttcataccaggcatttgggtccaggaggatggggacttcatggtgccacgtggcacagtcacagacttcctggtccctccaagtggttctggaagctgaagggaggtctctagtgacagtgacaggtcctagggctctgtgctcagctcggtctgtaacacagatgaggacaaatacaagaagctgattgcaattacagatgataagttagaaagcagaattagcaagttctcagaattagtcctcgaccaactaaaacaggacaagaccaatacaagaataaacatgaggtgccacagggaggttccaaatagattgcacttgattcccttgactcacccatctgactcggggaatttgtcatagggatgtgtacacacatgtgctcaaagatgtgtttaagaatgttcactgcagcattgttcttgataggaaccaaaaccctggaagcctctgtgacccttagggggaccctattgtgtgacacttgatagttattagaaagaggcagatcagggcaaaaacatttggaaaggatgatctcatctgtataaaagttctaagatgatacacaagaaatggtaattctgtagcttctagagagctttatgtatagtttgtacactgaataaatgtaattggccatccgtatgacaggaagacaagggttttggtcggcagccatctcaaggtgatccattgagacaaggtgccaagacctgaacaaggctgccgccgccccagcttgcattaagagaggaagagcatcctggcctcctccatactggtcacaccatgtgtgtctggggtccctcagtagctctgagggccgctctcttaagagcatagcacactgaagctcccctaccacacacaggaagccggagcagctccaggtccaacaggaactgacagccacgaggtggaccacctggagggcggtgcggggaaggaggcagggccctgtgcctgaagcctgggcaccatggtggccccagtcaggagcaacagtggtagccctgagtaaaacccattgtccctctttggaggagcggccagaggatgacagcagccccagcaggcagcagtgcctgggcaggctgatccagcagagcactaatgggtcagtttcatgtattggcagatgtggtgtagcatggcaaggctacaagttttaaggatttttgtctgattttcagacctggaggaggggatttttcttcctactttcccccttttttatttctaatttactttcaaccaaatattcccactatgtgctatatgtaataataaaaagttgacaacaactg

SEQ ID NO: 15502 - DNA, 3269 bp, Homo sapiens
ttttatggatgaatgcatctgaggccagacaggaaaatgacttattgctggttgaattgctgattagtggctggattggaggtagaacccagatcatctgcctcttcattctactcatgtcctgtcatggaaattagtcaatccaattattattattatagaagtctgttttcaccagaaagtttgtgaactgacaaccgtaaaatctgtggtaaattcacaggcttcatcaatgacactatgaaatattgaccctcagcttcccagattgcaactccccaagtcttggtctgtttgctgttaagatttgttacaacttcttgcttattgccttttgttacacaagcagtgctaaatatgggctggatattggaaagagggcaagaaaatgagaacccacagttctgtgacgtgacaacactgattggccagtcactgttatctgcaggatgtgcttttcttaaggatgaacatattttggtccacaagtttccaagacaagcacattcctgccaacatgatccttggacaaactgttctggaatttgaacttgctactggaagagggttaagtccaggacacacacacacacacacacacacacacatttcagtggggggcaagccatagttggttatgttagcacctcattatacaacagtttcaagataaagtgattccagatgtgctctcagtaagtacctagtacttatgtttttaacccattaggctaaaaatctactttcagaattttggggaagccagagttagttaattaactagtcattcctagttacttcataaagttgattctaagtcgactataatttgcagtatgtttcgtgttagaggatacccattataaccatatgaaacatacatatttatagacacatatatgtattttcacacagacttgcctttgacaatgattagaagttcatctgaagtactggtttaatgatcattaggttcctttgtcccggaaatttcatttagaaacattaggaaaatatatatctaagaagtagtattctagtttcttcttattaatgaagctgcagtgatagtcattgtgattctgaagcataaatttcatgagtaagtcctggttaaaaggctccctcccttgtttaaaaaaccaagatttgaagttttttgctttgtaacttaaatttacaaaaaagagttaaagagaaaagatgatgaatgttttccttgataattcatattattgttaggaatatggaatttttgcatcacttggccctagaaggtggagagctaaaggtgaacatttcattttgctttcaaatattttaaatttgtctgcagaaattatgttttctgctgaatacaatggaagccttcttagctggtcttacttgagaatattgcatcttagtatgctcttttgattttattttgctctacagtaaatttttaaaaatttaggtatgatatctggcatcaaggacaacaccatttatttgccaaaggctgtaacctagggcattatacactaaatgggaatattggcaaacatactgttcagaggtacctgttgtgctgtagggcagtacctacagcaaagcagtctgggtatgatggactctggatccagactgtttggtttcatttcgcttctgctttttactagctgtgtgctttaatttcatgaatgtgaaagataaataataactcatgaagatttagttaagtctgaacttgtaaaggaagcacttagaaccatgcctggcatatgttaagtacttctcaagtgttagcttaaacaaacaaacaaatctcaaattttgtctttgtcatgtcagaggggctaacatcaagtgatggctgaagcagcaaacagctagttaaatttaaaagaaaaatgatctttgggattaatcctatcttgtgaaaagttttctagagcttccatccagctgtggctaaagctagaggacaagaaggtgaggaaagtgtggcagagtgaatgccattgattaaagaaaggccaggaccttgctgtataacaattgtttctattatttctattttgagagaaagacccttgatgttacccgtcagcaggagatggatggtagtctttgtgtggattgacaaacattggtagtttaacaatgtgaagggcttcctttgcaggaaatgaaaaagttgtgattttccataagtcatttagagagtcactattgagccagccaggctgggcccgctagtctatacaatggttttgtgacaattagccttgtgctgttgcagcatttcagactcatggagcgttttgcttagaagacctctcttccttctggctgacacagccccatcccagggtgcagggcctgataagtggagtacaggctggatttcagccctaaccacccgctccccccaggacatggtacagtacacaaatggcacattgaaggtggtagccatgaagacaggtttttgaattttactttctgttcttcagctcaggaaatatgttgtttatttttgtttttcagtcatagtctacttcaatagctggaactggggaagagatggttcagtattttttgtcattgaatccaatggttgattgttaattattacttaagataatccacaaacatcctgctgacagtccaagactgttttctatcagaggttttatgaagccacttaatttagggttaaggtcctgctgaaccttacaggagtctaaaagcaaggagaaaggcatcagaatatcacacccttttagctataaatcatatttctgtaatgctgttgctactttttttctatgtgctcttgcaatttaagatgatgcattttatttccaatggtttgcaatctgtaactgaaagacagaatgctcggaaaagcctctggctaaaaaccagtctattgacatagaatcatgtcaggagtggccctaggagatttgtgggttttggcctgtcttgtttctcatccaatatttcttttcagtattatcacagttaaattcctcattggatatgcaatagattaaaatcacattaaagtttggacttaaatcaagcatagcaaaaaatgattctttgacattagctcccaagattcttctattatggtttcagtggtcctgaactttggaagatgctgatcaggtaataactgttctgtgccctacaaggaggatgccacctgtaaaaaggcactgagaagttttattgtctcaaatatatttattctgattcttaagaaaacttgaaat

SEQ ID NO: 15503 - DNA, 1925 bp, Homo sapiens
  CDS (864)..(1607)
ccttagataggtaactgttgccaggaaaatgccctgtgtggattggcctggactaagcaggatcctcctctaaagagagagatgagatgaatgcctgacccaagtctgggatcttgggtgggaagcgtgtggatagtaggtcagaggtcagcagtgtctgtggtgtagggtgtaatcccatctccacagagctgcatacaagtgtgtttaagtgtgtgcaagtgattaactttgattagtagtttcaactctttacaatgaacatatttatcttttttaaaaaataaagccattttaaaagatcttgccaaaaaacaatcattccttaagtcaccacttaggatagacctagaatatttgtcctttctcaagagcaccagagagttttctggtaatccacgcaataaacagttataaaaggtaattgttgagatcaggggaagatggcagataggaggcagtgctaatgtgtagctcccacatggatggacaaaacaccatgtggagactcacactgtgaccctgttgtgctccaagaactatcataggaacgtactgggaaaaccaaaagaattcacggatcctttgaaagaagacgcacaccactgtaaattctgtggaacaggagaaaaactgtcttgggggaaggcatccttctattctactgatcagaaagctggacaaagtcccactgccaggctacacagttggtgccatttgcggaggcccacccgcagcggtcacgtgaaggaccgagcgccgcgcgcccaggcggggcctccggcctgcacgaggagggcagagtccgttgcggctgccgccccgacgcccgcgcatccccgctcgccgcgcccgccgccgcgatgtccggggccggcctagccgcggtggtgagctgcctgcgcccgcagcccggcgaggagccgcagacccatgagaccttctgccagaaagtgggcctgctgtgcacgcttcagggtaagctgcagccccaggactggacattgttggacgaactgctgcagggcctgcaaacactgctgctcatgattttgtggcaggcttcccgtggcctcttcctgcactaccatgtggaggccctaaccctgcgtcgcatcagtagcttccgccggtacaagtatgacctggtggcagcgggcaaggctttggagggcatgttctgcaagctcaaccacctcctggaacacccgcaccagctgttcttcctctacctgctccccactctgtcccgcttcgtctccatcggcctctacatgcccgccaccagcttcttgctcctggtccttggtttcaaggctctgcaactgtggatgcagctgcatgaggccggagtgggccttgaggagctcaggggggtccctgaccctagtgtccccgctcccccagcacaggatggtaagcacacaggtcccagacaggggctggatggctctgaagctggtaggcctgatctacctaatactgcagctgggctgcatcgccctcaccaacttctgactggacttcctgctggccgccactatggtgctgccgctgtgctcgccgagcctttgggccctggaccctctgtgctgccctgctggtgttgacaagcccagcagccacgctccttggcagcccattcctgtggcgggagctgcaggaggcaccactgtcactggccaagggctggcagctcttcctggcagcactggcccagggtgcgctggagcaccacacctaaggcgccctgctcttcccactgctgtccctgggcctctgcccttgctgactacttttctggaatgtgctcttctggaagtgagatctgcctgtccggggcaccaggctgggacagagactccccaaggaccccattctgcctccttctggggaaataaacaagtgcctgtttcagctgcttt

SEQ ID NO: 15504 - protein, 248 aa, Homo sapiens
MSGAGLAAVVSCLRPQPGEEPQTHETFCQKVGLLCTLQGKLQPQDWTLLDELLQGLQTLLLMILWQASRGLFLHYHVEALTLRRISSFRRYKYDLVAAGKALEGMFCKLNHLLEHPHQLFFLYLLPTLSRFVSIGLYMPATSFLLLVLGFKALQLWMQLHEAGVGLEELRGVPDPSVPAPPAQDGKHTGPRQGLDGSEAGRPDLPNTAAGLHRPHQLLTGLPAGRHYGAAAVLAEPLGPGPSVLPCWC

SEQ ID NO: 15505 - DNA, 1885 bp, Homo sapiens
  CDS (300)..(1031)
atctagcgcccccgtcaggacgtgcgaaaagcgacggcgcagcacggtgcggcgcagctcctgctcgcctttcccttcgctgggcgagaggtgtctatggggcacccgctgccgccgccgctaccgccaccgccaccgccaccgccgccgagtgctgtctctatggcgaggaggaggaggaggagcgcgagctcagcgatacaagtacataaataaaggataaaatattttatgaaacaaatcttcaatcaagtataacattttgatgcttggcatctagactcccttgtgccctcactatgccagcggcaactgtagatcatagccaaagaatttgtgaagtttgggcttgcaacttggatgaagagatgaagaaaattcgtcaagttatccgaaaatataattacgttgctatggacaccgagtttccaggtgtggttgcaagacccattggagaattcaggagcaatgctgactatcaataccaactattgcggtgtaatgtagacttgttaaagataattcagctaggactgacatttatgaatgagcaaggagaataccctccaggaacttcaacttggcagtttaattttaaatttaatttgacggaggacatgtatgcccaggactctatagagctactaacaacatctggtatccagtttaaaaaacatgaggaggaaggaattgaaacccagtactttgcagaacttcttatgacttctggagtggtcctctgtgaaggggtcaaatggttgtcatttcatagcggttacgactttggctacttaatcaaaatcctaaccaactctaacttgcctgaagaagaacttgacttctttgagatccttcgattgttttttcctgtcatttatgatgtgaagtacctcatgaagagctgcaaaaatctcaaaggtggattacaggaggtggcagaacagttagagctggaacggataggaccacaacatcaggcaggatctgattcattgctcacaggaatggcctttttcaaagtgagagaagtatgaagacatcactgcctttttctcagttggttgttaggttgagaacattaaaaatcttgtggccaaagattttgggcaacaagtacctactaagtaaagatataattagagataccatatgagtcacatccaccacacttaaaagtattcaaaaataagtcatcttgaaatgtagttcagaaggaactgggagaacatgttcatcatagaaccaacaattttaaaacataaactacctgagaagtcatgtaggtccaaccatattatttctcaggtgagaaaacaggctaataacttccatgattaaacacattactagtgggagaactccagagttcttttctgactcccattggtgctccttctacaaggcaaggaatctttatattaggtttattctagcatgaccccttttaaggtttaaactggtgataaatatattatttgctcatgtcattcttcagtgctttgaagattttatagagaagaactcaggctcttttactgcattgagtcttaaaaggggggttgaattccgaagggatcaaataaatccaacgtagtagttgcatcagaaaccatattaggaaaaccctccttaaacggcaaaaggcagagatcagttccttgagtataaagtgttagggatggaagaatgaaactaaatgaacccattatctactcctaagtaattaagtgatgtgcacagatacacctagctataggtaaacaggaaaattggttgtgcaaaaaacaagtgaggtttttcttgactataagttttcccttttggaaaaattcgctgtggatttgagtatattttctcttagacattaaattgagactgagaattt

SEQ ID NO: 15506 - protein, 244 aa, Homo sapiens [sequence omitted]

SEQ ID NO: 15507 - DNA, 2063 bp, Homo sapiens
  CDS (229)..(1824)
agcagtttacggaagtgtaacgttgaggcccttcttgtgtatctggagaaaatagaggttctgactcctcaggagcaaaaaacataacctgaagagggaggaagtggatttggggttcaccatttcttggggcacacttgattgaaaactgagacttctgaagagaaggccagaagatacaaagacagaccatcccagttgaatgctgtcttccaagaacagaagaaaatgatccaggcccaggaatccataacactggaggatgtggctgtggacttcacttgggaggagtggcaactcctgggcgctgctcagaaggacctgtaccgggacgtgatgttggagaactacagcaacctggtggcagtggggtatcaagccagcaaaccggatgcactcttcaagttggaacaaggagaacaaccgtggacaattgaagatggaatccacagtggagcctgttcagacatatggaaagttgatcatgtgctggagcgcttgcagagtgaaagcctggtgaacagaaggaaaccatgtcatgaacatgatgcatttgaaaatattgttcattgcagcaaaagtcagtttctgttagggcaaaatcatgatatatttgacttacgtggaaaaagtttgaaatccaatttaactttagttaaccagagcaaaggctatgaaataaagaactctgttgagtttactggaaatggggactcctttcttcatgctaaccatgaacgacttcatactgcaattaaattccctgcaagtcaaaaactcatcagcactaagtcccaattcatcagtcccaagcatcagaaaacacgaaaattagagaagcatcatgtgtgcagtgaatgtgggaaagccttcatcaagaagtcttggctaactgatcaccaggtaatgcatacaggagagaaaccccacagatgcagtctatgtgagaaagccttctccagaaagttcatgcttactgaacatcagcgaactcatacaggagaaaaaccttatgaatgccctgaatgtggcaaagcctttctcaagaaatcacggctcaacatacatcagaaaacacataccggagagaaaccctatatatgcagtgaatgtggaaaaggcttcatccagaaaggaaatctcattgtacaccagcgaattcatacaggtgagaaaccttatatatgcaatgaatgtggaaaaggcttcattcagaagacgtgtctcatagcacatcagagatttcacacaggaaagacgccctttgtgtgcagtgaatgtggaaaatcctgttctcagaaatcaggtctcattaaacatcaaagaattcacacaggagagaaaccatttgaatgtagtgaatgtgggaaagcctttagcacaaagcaaaagctcattgtccatcaaaggactcatacaggagagagaccctatggctgtaacgagtgtgggaaagcgtttgcgtatatgtcgtgtctggttaagcataagagaatacacacaagggagaaacaagaggcagccaaggtggaaaatcctcctgcagagaggcacagctcattacacaccagtgatgtcatgcaggagaaaaactctgctaacggggcgactacacaagtgccttctgtggcccctcagacatcattaaacattagcggcctcctcgcaaacaggaacgtagtccttgtgggacagccagtggtcagatgtgcagcctcaggagataacagtggatttgcacaggacagaaaccttgtgaatgcagtgaatgtggttgtgccttccgtgatcaattatgtcttattttatgttacagaaaacccataggaagaaaactcagatctatgtggaaaagggttgagcaaaaatttgtagttcattatgtggccgaaaagcatacactgagagaacatgtataaggctgagatagcctgataaactcatcctattaaaatgtatgctgtgatacacaggcaaatttgatgttaacctaagcacatacacagcaattgctcgactgtgtcaattaaatgagtaaaggaagcccaagtacttttaagtgg

SEQ ID NO: 15508 - protein, 532 aa, Homo sapiens
MIQAQESITLEDVAVDFTWEEWQLLGAAQKDLYRDVMLENYSNLVAVGYQASKPDALFKLEQGEQPWTIEDGIHSGACSDIWKVDHVLERLQSESLVNRRKPCHEHDAFENIVHCSKSQFLLGQNHDIFDLRGKSLKSNLTLVNQSKGYEIKNSVEFTGNGDSFLHANHERLHTAIKFPASQKLISTKSQFISPKHQKTRKLEKHHVCSECGKAFIKKSWLTDHQVMHTGEKPHRCSLCEKAFSRKFMLTEHQRTHTGEKPYECPECGKAFLKKSRLNIHQKTHTGEKPYICSECGKGFIQKGNLIVHQRIHTGEKPYICNECGKGFIQKTCLIAHQRFHTGKTPFVCSECGKSCSQKSGLIKHQRIHTGEKPFECSECGKAFSTKQKLIVHQRTHTGERPYGCNECGKAFAYMSCLVKHKRIHTREKQEAAKVENPPAERHSSLHTSDVMQEKNSANGATTQVPSVAPQTSLNISGLLANRNVVLVGQPVVRCAASGDNSGFAQDRNLVNAVNVVVPSVINYVLFYVTENP

SEQ ID NO: 15509 - DNA, 2026 bp, Homo sapiens
tacttcatgtttcatacagataattcacattcaaaattacattttctctttgaactagatggtattccttattcacttacattacaaatctaagaccatgtgataagcatgactggagaggtttaatttttataaacaaaaatagctataaagtacaaagctgctgctgcatgcaaccttattgcaatcagtatatcattcctgtggcaatttctgtcaccttatattgtgaataaaatttttctatagaaattaaatgatttaaaaactcacctatatgaaacatttaatgcttttcagcctgctttctggctgattttgttatttgatgtgctaatttgggcaacttaatttacattctggcagtcggtgtagataactaaaagcccagttaagtattttataatttcaggctactgaggccatgcttgggatgttgtttgaaagaaagaaaaaatacacttgacatatttcacatttctgtaccttcatctttacttccaagtaaacccgtggatgatttgatgagggataaatgaacctatttcttttacacacataccaaggacatgcttgtggctaaagtgagttgataatgttgtgcaaaggatagttgtcaccaactcatttctttatggtccataatgaaataaaaattttgtatactgttaattctgtaaacagatgcatgttcaaaagatctatgatggtcttgtaatcttaatctaatatattttagatattttaattttttccctcttggggaacacatttagtatagtgtagaaaatacttccatgacattttcatataaggttatataacttttcatacataaacatgaaatttgttgtagaaaattctttaaaccaaacatttagatctaggacttcaatttaatttgttccttgaatctatttttatgtggcccttaaaaaatatccaaaaaacccattgctaatatagcaataaaaatactttgggtactgacagactctttggagtgtttatattacaaatttgtattcatattcttttctgtgatgtgttgtactaaaatccaaaatggcttttgcaccatttttaagccaattttttcctttgatgttggtaccagaattactataagtgactgctgcttttgggggtaaacattttgttagtgaagataaaaccagaacactaaattatggataaaattttcagaataggtggcacaggtaaatttcactaggttatattttgtgtagtaaagaaaaaaattatttggtcaatgttatcttaattcatactacaatttaagattatcttatgtgtattatagtaaatagatgattttcagattcaaggctcctaagagtttgatttgctctgttttttcctaaaataaatattgtctctcccaactgttaagttctaggtattgtacttccaattttaacttcagaaccaagatgttggcatgaaccaggctgctgttgaagtacatgtatattataaattatcttatttgtgttatactcttacatgttatcttttctaagaaaacaaagtccctattattcctattgcaaagcacacaggaattaagaaagtacagtaatttttaaaaaaaaatccggtaaatgtagtattcttaacctgttctatattacttatacctattgtctatatagctttaatttatagttgtcagtttaactattggcatgtctggcaaagaaaattaaactttaagagttttataaactgtttctaggttgctaaagaatttatttttctactatatatggtatagacaaagcatcaaactatgtacaggaaaaaagcctgactatttctatttggaagtaggctgaaaagagaattttcaaaactgttcgtgtcttcagttcattctgtcataactttgctattgtgatatgtgaataccagtttatttaagctgttctcttttatactgtattaatttaatgttcatctgcgtttagtaccatttttgttattaaaactggcatttaccgtt

SEQ ID NO: 15510 - DNA, 2160 bp, Homo sapiens
gttacctaaaggtaaggcttgttccttttgcaaagggccacaagatactgtccctctgagaaacttatgagggggaaatttgcaaatccacagagagctgccctcagccgagcagaggcagtggttggggaggccgccacactcttcctgactcacctcaaggtacctggcaggttgtatctaccagcaagtgcctgcctgcagggccacctctggatgagtggggaggccaggtttgcccctcaacctgtctagctttttcacagggtggatgttttacacctctggtattcttccagtctgaactcaatcccatcccccaaccaattaggcaggttgtaaatgactgctgggtgcttgatgaaccaatctgcctgagttaggaactcttcctaacccacataaagtatttgaccctacctgaccatttactgcatgacccccatgcttagcctctctggaccagtttctggtcagtcatacctcaccggcgcaatacgaagattcaatgaatgaaaacgtaagtagtttgtgccctttctatgtgggatgactgaaaggagcttaccaagccatgatgactttggaacatgactatagtttgtttgattcttatatcaatcctgtgagacaggcaggtctcacactatcaacaccaatttacagattagaaaactgagactgagagtggttaagggactttgccaagtctgtcaattcttgactgacagagctggaaccaggtctctaaactcccaatacagtaattcctgtctcctttacttcctttggctttgaggtagccagatctcaacctctagcagccaacctttttctggtagggcacaccgcagggtagagggtagccagccaggtcttctatggcccttttactcgttctagctgcaagaatcatgggcacagggcagctttagtgccacagaaacacgtggcaatgctgtggccactgtcctgccctgccctgagccactgctccgggcctcaaatactaaatatttttatgagctaggcacgaaggagagaacactaaacaagatacagcagacacgattgctacccttaccgaccttaacaatttacccaaataataattaattatgattgtgataaaggaggtacaggctgctatgaaaaataagactgtgtactcaatcaagtccagaggtccagaagagccttttgagaaacttaataaaggctcttatatttttgctctatttctttccagtattcttcatacacatgcgttttacatagttgtaatacacattacatagaattttttttttttgagagggagtttcattcttgttgcccaggctggagtgcagtgacgcgatttcagcccaccgcaacctccacctccagggttcaaatgattctcctgcctcagcctcccgagtagctgggattacaggcgcccaccaccacacccagctaattttgtatttttagtagagacggggtttctccatgttggtcaggcagtctcaaactccccacctcaggtgatccacccgcgtcggcctcccaaagtgctgggattacaggcatgagccacctcacccagcctacatacaattttaaccctttaaagcttatatataagccaaactcagaaatgaacattaagatctgataaatgtcttaaaatcgctttccaaaaggattgaacacccttacccgatatataaatgagaaaacatttcactgtacagtctcaggcaataattataggaaaaatagctcactgcagttttaatttgcatgattaagactgatcattttttcatgtttctttacgtttatgtattttaattttttctgcacacataatgcttattgtaaaaactccaaacttcacactatttgagagtgctcaaagtgaaagcctcctgtaatctttacacccagagggatctacagttaattatttgttatatattcccccaaacttttttctacacaatattttaacgaaaatggtacagttatacacactttttgaatataatttagtagactttataagtacaaagtcatggcaatctagtgggagaaaaacagcttttttatgtcaatattttaaaactttttcttgaccatttatcagtttgtcttaaaataaaaatttatctc

SEQ ID NO: 15511 - DNA, 2025 bp, Homo sapiens
  CDS (1050)..(1574)
agaaattccaaaggtggccagcatggtggctcatgcctgtaattccagtactttgaggccgaggtgggaggaatgcttgagcccccagtctgggcaatatagtgagaccccatctctgcaaaaaaagaagttccagaggcccagacttgctactggtgcccagggggctgtggggcagcttgggcattgagccctcatgctgtgggatctgatgctgtctctaggtagatagtgttggaattgaattggaggacacccaactggtgtccgctgcagaactgattgcttgcctggtggtggggagaaatccttacatattttttggagtcacagaagtcttctgtgttgattgttgtagtgtgaaagcagaggaaaaacaatggtttgggttttttcaaaacaactttcatgacacatacgagaatgtaaattccagaagggccaaggccatgtctgttttacctactctttttcccccagcttctagtacataggaggcatttgatatataccaaacaaacaagcaagtgactgactagttgatgtcctgagaatcttcttgctgctggaagggtcctcctgccctcagcatttctctctgggaagctcttagactactctctcagtcatgcccaccttttcggtcataggtcagaagccaatgacctggccctgaggctggctcgccactacacgggacaccaggacgtggtggtattagatcatgcgtatcgcggccacctgagctccctgattgacatcagtccctacaagttccgcaacctggatggccagaaggagtgggtccacgtggcacctctcccagacacctaccggggcccctaccgggaggaccaccccaacccagctatggcctatgccaacgaggtgaaacgtgtggtcagcagtgcacaggagaagggcaggaagattgcagccttcttcgctgagtctctgcccagtgtgggagggcagatcattccccctgctggctacttctcccaagtggcagactccagggaaaagacttcgtccctgacatcgtcaccatgggcaagtccattggcaacggccaccctgttgcctgcgtggccgcaacccagcctgtggcgagggcatttgaagccaccggcgttgagtacttcaacacgtttgggggcagcccagtgtcctgcgctgtggggctggccgtcctgaatgtcttggagaaggagcagctccaggatcatgccaccagtgtaggcagcttcctgatgcagctcctcgggcagcaaaaaatcaaacatcccatcgtcggggatgtcaggggtgttgggctcttcattggtgtggatctgatcaaagatgaggccacaaggacaccagcaactgaagaggctgcctacttggtatcaaggctgaaggagaactacgttttgctgagcactgatggccctgggaggaacatcctgaagtttaagcccccaatgtgcttcagcctggacaatgcacggcaggtggtggcaaagctggatgccattctgactgacatggaagagaaggtgagaagttgtgaaacgctgaggctccagccctaagccagccctgctctgcctaagtgtactccagaagaaactcatctcatccaaatacacgctattgagaaggcgagcctgacctccctcttacagataaagtcagctttcagaggctcagggtgggggggcctgcccgaggccataatgctacccaccccctcctcctaaccactggtctgttggaataacccagatgtctgcatcccctcaagtcagtcaatttcctttctgtccactgggggtggaatggggtagggtgggatactttaaagtgctcctgcttaaataaattagaccagaccagtgtatttctaaagaaaatcctgacatgcacacccattaaaaatagtacattttacagtgtcccagtcatacttttaattggcaaattaaaataatgcaatctgatatattctatcctactaaattaaaaatactgaatataacc

SEQ ID NO: 15512 - protein, 175 aa, Homo sapiens
MGKSIGNGHPVACVAATQPVARAFEATGVEYFNTFGGSPVSCAVGLAVLNVLEKEQLQDHATSVGSFLMQLLGQQKIKHPIVGDVRGVGLFIGVDLIKDEATRTPATEEAAYLVSRLKENYVLLSTDGPGRNILKFKPPMCFSLDNARQVVAKLDAILTDMEEKVRSCETLRLQP

SEQ ID NO: 15513 - DNA, 2113 bp, Homo sapiens
ttatttctcacagttctggatgctgggaagtccaagttcaaggcagattcaatgtctggtgagggcccacttcctagttcttagacagctgtcttcctgcagtgtcctcacgtggtagaagaggaaggcagctctccggggtcccttttataagatcactaagccggttcatgagaggtctgctctcatgacctaatcacctcccaaaggccccacctcccaataccatcacattaggggttaggatttaacatgaattttggggacatataaacattaagtctgtagtagcagcagctgactaacgagggagatagggagattctgacaaacttctactcttgattgtgatcctaattcaaggaatatcaagtcccagcccctgcaacccaggctgctgcttaattttcatgtcagtatcatcaaaatccaatgttctgcttaaactcaagatggaaagtccagtccaaggtacactgttcatctttttcttcacattttgcacatccttcaaggggatctttaacctctttaaccctttgtactgcacctcagataatgtgctttttagctcagtacactgaaaccatatgataacacaaattcacatataattgggggttagtcccatactctataacagacttagtcctgtcttttcattagccatgtaataatataactccatgttccatgcaactggatttttggaccctgttaatagcattaaggtagaggtttactctatcacctaacacctcaacactacctgtgggatgccttagttacccagcagcaggttaccaagggctgtctggaaagggagggacaaaaggacccagaagtagaagaatggggatggagtggtgagaattgaatggttaatgcactgccattcataattgccaattgaggacaacacaaatgggattggtactttatagtaataaatctgaccagcagagggagggatcaggcagcagtgtttagagcacaccacactggccactgtaaactgagaagctaagttaactggtattttatgattttgagtatagtctttttataagttgtatacactttacaatgtaaaagaaacaaactttgtataatagcaaatcgggaaggggactgcttaaaatgttaatgcagtgtttttctttttttctctgcataaatggcttgagcatactggcatttacacagaaatgatatatgctgcttttatcatataacaaatattttcccactattacagcctgagtaatacccgtattaaaagagcctcattttagaaagacatttaaaatttttggaacataccacatgtagaaaggttgaactggtttttcagctataatgcatatacaactatagtgtgtacgtataccacatatacatatacttgtatgaagatatgtgtaaaatgtttttactatggatcatggatttaagaaacttgaaaagctgggcacggtggctcacgcctgtaatcccagcactttgggaggctgaggcgggtggatcaagaggtcaggagatcgagaccatcctggctaagtcggtctctaataaaaatacaaaaaattagccaggcgtggtggcacgcgcctgtagtcccagctactcgggaggctgaggcaggaagaatcgcttgaacccgggaggcagaggttgcagtgagccgagaccgcgccactgcactccagcctgggcaacagagcaaaactccaactcaaaaacaaaaacaaaaacaccttgaaaaacactgccttagtatacttaaactatcttttcatctatcagattgttaaggattttttttaaatttgacaacatccagtgtcaatgagggtgagggcaaaaaaaggactaccttggtgagaatgtaagttgtttaatcctttgggagggttaagctgtagatatctaaattttaaatatatatttatcctcttccatgttaagaaccctaagaaataactggacgagtgtggtatgatgtttgcatgtgatattcattacagtattattttaatagtagaaaattgttaaaaatctatatgtccattaataggaaattggttaaataaaatgaggcttccacaaactg

SEQ ID NO: 15514 - DNA, 2264 bp, Homo sapiens
  CDS (135)..(1319)
gggatcaggctcgtgaacatattcggcaaaacctagaaagtttcataagacaggactttccaggaactaaattgagcctgtttggctcctccaaaaatggatttgggttcaaacagagtgaccttgacgtctgtatgacaattaatgggcttgaaactgctgagggattggactgtgtcagaactattgaagaattagcaagagtcctcagaaaacattcaggcctgagaaacatcttacctattacaacagcaaaggtgccaattgtgaagttcttccatttgagaagtggtctggaagtagatatcagtttgtataacacattggcccttcataacacaaggcttttatctgcttattccgccattgatcccagagtgaagtatttgtgctataccatgaaagtatttacaaagatatacaaaggtgaaaagaaacctgaaatatttgttgatggctggaatatttatttttttgatcaaatagatgaactgcctacctattggtcagaatgtggaaaaaatacagaatctgttgggcagttatggttgggccttcttcgtttctacacagaggaatttgattttaaagaacatgttattagcatcaggagaaaaagtctgcttacaacttttaagaaacagtggacctcaaaatacattgttattgaagatccctttgatttgaatcataatcttggagctggattatcaaggaaaatgacaaattttataatgaaggcttttatcaatggtagaagagtatttggtattcctgtcaagggatttccaaaggactacccctcaaaaatggaatacttttttgatccagatgtgttaactgaaggagagctggccccaaatgatagatgttgtcgaatttgtggaaaaatcggacacttcatgaaggactgtcctatgaggagaaaagtaagacggcggcgagatcaggaagatgccctgaaccaaagataccctgagaacaaggaaaaaagaagcaaagaggacaaagaaattcacaacaagtacacagaaagggaggtgtcaacaaaagaagataagcccatacagtgcacacctcagaaagccaagccaatgcgggcagctgctgacctggggagggagaagatcctcaggccaccagtagaaaaatggaagagacaggatgacaaagacttaagagaaaaacgttgttttatttgtggaagagaagggcacattaaaaaggaatgcccacagtttaaaggctcttcaggtagcctttccagtaaatatatgactcagggaaaagcctcagcgaagaggacccagcaggaatcatgagggaaggaaaatgcagcactctaaatggccactcaggcgttcctattcactcggaaaattaggttcatttcacaggacacagcagtgtagatcaggcttcaacttaacatttaagggaaatgtcagatttttttttaatttaatgaaattgttaatgaggaaaaatttttaatatagtcttatctaccacacatccccatagatttaaggattttaatagaaagtcatgatgtatgtatttaagccacgttaaaagaaaaaatataactatggaccggtattcagtgaatacagtttcatggtttttaattctttcaaagcacattaaaaatggtgtgctgataaaccccaagtaaattaaccctttttccgtataaatccattttttgttttgaagaggggaaattatacttattgttgtttactgaatcctggtgtgaaagcatatcagatatgtatgaactgctactgctgtacttccgatttacggacatcattttattgctatttgtagacgtgataacatgaacatgagtacctatttatgtgggccttcagtggatgggcagtgccactcaggtctctggggtttccctctctaattttaagtaaattgacatataactactatgcttataaaaatgaagtaaggaaaacaagtagtcctgtttgccactaaaaacattttcaaaggaaaaataaaatgaaagtactttttactttttatgatactcagaaattaggatgaagaacttttaaaattgctgaaggtcaaagaggttatctctgccagtcacaagtgtggctggtgtcattctgggtctgactggagccctcctggactgtttctttaatttcaaaagccctgcagacatagtacctggtcagaactatgcctcggtttatttatcattttgaaataaaatcaaaatttcaacctgt

SEQ ID NO: 15515 - protein, 395 aa, Homo sapiens
MTINGLETAEGLDCVRTIEELARVLRKHSGLRNILPITTAKVPIVKFFHLRSGLEVDISLYNTLALHNTRLLSAYSAIDPRVKYLCYTMKVFTKIYKGEKKPEIFVDGWNIYFFDQIDELPTYWSECGKNTESVGQLWLGLLRFYTEEFDFKEHVISIRRKSLLTTFKKQWTSKYIVIEDPFDLNHNLGAGLSRKMTNFIMKAFINGRRVFGIPVKGFPKDYPSKMEYFFDPDVLTEGELAPNDRCCRICGKIGHFMKDCPMRRKVRRRRDQEDALNQRYPENKEKRSKEDKEIHNKYTEREVSTKEDKPIQCTPQKAKPMRAAADLGREKILRPPVEKWKRQDDKDLREKRCFICGREGHIKKECPQFKGSSGSLSSKYMTQGKASAKRTQQES

SEQ ID NO: 15516 - DNA, 2218 bp, Homo sapiens
  CDS (753)..(1091)
aatgaagcatcggaatggtgcgctcacgtcgccttctcctgaaatacctccgagtctgcaagtgagaaaacgcgctgatcctgttgcaaactgtgaatattctgatgatgccagtacagtttgatttattaaatgtgggtcctcaagcttctcagtgtcatctcttttctgccagagtgtgctactgtgaacagggccaggcccaggaatcgtgtccaccatatggctggttttcagcatccgtctttctgtcagcttttgttttatcagagataagatgtttttgtattagcatttaatgttgtcaatcaaaattatgggaagagctagaaactgatggggtttttaatcaggtccccatcttggtcaaggttaggcagctggagaggaaggtataattgagcaaaacgtgtccagaggacccatggctgcaccccatcaagtcagggcccaggaggactgcctggcatgggtgtgcttggcattgtgcccacagcactgctgtcgtggtacagactggcagttggaaggggccttaagccggctgagaagtttgggcttctgggttgaaatccacggccccggttgaggcctgtgtgctgagtgccagagctggagttttctagcttgtaaatctggagaattaactgatctgaagtgactgggaggggtgagcataaaagccggggaacaggactcccagtggtggtctggttttttttgtgagatgagatgagagctaccacctggaaatgctcattctctgcattcagcctgtctcacatacaggattgtatggccatttcaggtttgggaaagatctacctgctgggagccagtctagtttcctgcaccacctggaacttccaaacccttcactccttcaacagaatgttgaggctgcctcatttgtgccaccaagtacgggaatcttaaagacagaaacagagctcatgaccttttatgggaaagagagaggaaaacaaaacaacttcacaacagcatggcaaggggggatgtggaaccaaggacatgatacagggatgggaaaggagggcatgctcaattctagctggttctttcctttcagttaaaaatgagcttttctagttggcatccggcactgcagaaaactaaaagtcatccagccatagctttttccttccctggaaagcctgagactagatcccaaagctcagaatgcctctgagaaccagaatcactcctttgagaggcgctccttgcaggaaaaagagaggctcccagagtggtagcctctcagtgaaaatgcatcctaaaaattcaatgtttataccaggctcatgacactaagatgtgacatctggacacgaggggtcagccacgtggatacatccctcccagattgcatctccaggaatcactctgctagcagaatgggcgccccatcccttaatatgctgctcctcctcaaagtgcagcccagaaggacccaggcctttgatgcacattgggtgggtctcccactactttagttgaaatgggagcatgctggagtcggcgttctgttgcttctggtgagaaggacatcccattgacccctggccaccaggtccagtattccatccttccttctgtcccagcctatcgccctccccaccaggcccacccccacaacttctcctcaagggaggttgctcccgcagctggagggcttgcacagaccagcagtcacagaaatcattcttcctgctgtactgggccttaactgcctgcaaatgtccagcactactgcataggatgccagagccaccgaaggaaaacacagccaagtttaataataataaaaggaaaaatctcagcctgcagaactctggttttgacccaccatcggccagatgcacatcttcagggcctgttgagcaccttctgaaaagcagggctcgtaatagactccagcacattccatcagagtcaggaaaactgcggtgagtcccagagaatctagggtgcagggcagggagcaggagtcataaggagtgataacctaaactgtgtgtagtcagcggggagggtcttatgttatcaggtgaaatgagagccagtaagttagttgatcctgtcacagatataaccctgataacaccccatagatacgcgacacgtgtgtcctgcccctgctttccccatccaacatggttcttctgttccacagacattaaaggggctttctgcaatt

SEQ ID NO: 15517 - protein, 113 aa, Homo sapiens [sequence omitted]

SEQ ID NO: 15518 - DNA, 2055 bp, Homo sapiens
  CDS (1703)..(2026)
gatgccactccagctggacgggctcgtggagtctgcattcgagggattccctagtccgtccagtcatcacgggctgctgcccgcctgcccgtgccgtccaaggcacctggccttgggccggtatcaggtagccgcgcctgggtcacacctgccctccacgttcatctctccacctacagatcatagggaccgtttcctcattttattgtcatgcaaatgttgtacataaatacatggctataaacaggcagctcagagtaaccaggaggctcttttctcagtgacagatcacaccctcttagagtagtaatttttgaataattgttgcaaaatatgaaaacctttagcaaaactccagcaccactgaagtcatcaggaagtgtttgggagaatacgtgtctgtgctggatgctgttgaagcaggtcaggccgttggggtcccttcgttcttagggcttctccaccagcttctaaatggggaatgccaactttgtgccaggcacacactacctgctgagacactgtggatgaacaaggcgttgacccagggctcactctgtagaggaagaagaccagagaatggataccaccaagacagtgataagtgctgcaacagggttcagagctgcacaggaagtccccaaaggtagtgaacccatcatcggggcttaggaaagagcttttaaaggaagataaagccagcaggtgacgccaaaaactgggtatttctgtagggtagcttttttccctttcgttctacttgttgtactatacagtagagtagccaacccacctccaaggaaaataaaattcaaaatatataatgtaatcagtatgatgatagctcttattgttttgcttctgtacttcaagctgtgaagtcattcttgtaacacaggctgaattttccccctcaaccatggtgtttaatgagtgtgaatcttcattcaaccattaaaatctccaagagtatttttatactaacagttcacaaacttgaggcaattatagtctaagtagattccaactcctgcccccacccgtcttcctgccaccaccgccgcccggtctctggaggatcttggaaagaatttaccagcctttaggaacattcagcactttaaaagtgtcacagagccataaataaagagtaagacacccctaagactgtcatctcatcaccacacccgtctctgctgaggaggacagagacaggaaggaaatgcgacaagttcactgtgcagtagccaagcaggcccagccaacatgtgggagggtgggtgtctgtcccagcggtggggcaggaggcgtgcaggggaaggggctgcctggaggtaaggctctgcggtcagccagccctgggtttggtgctccaggaaaggccagcacgtaggggagtgaggtggggtgctgctgttggtagggtaggaagtgacctcgcagggtggggccagggcttcgtggccagtgggcggccatttctgtgacattgcaatgttctgcgtggatcgttttctggattcctgccaaggtgtttacttggcctggggaaagagaggaacgcatgaggggcccagaccttgccccctgacccatgatagggtctttgagggcatacataacacatctggagcttaaaaagaattaaactgtagaaataagacttcagtgaaggataatatattagtggaggaaagaccaaatggaagatggtgttaaccatcccacaaatagaaatgagtgttatattaggagcctaaggtgggacaaccacacttccccagagctctttaaaaatagcgcagacactcatgcctctagtatgattcagttcagctcctcattgaaccagggaagagaccgacagacttcacaccacttcttctgttcctgtaattctccactgtgcagcttgggatttcctggagatgtttccataaaaatagagagatgccatcatcactgtcgtcactgtcactgctgtacaataataaaagaaggtgctaggatgccttcctgtaagttttagactagatgtattaaaaagtatccggt

SEQ ID NO: 15519 - protein, 108 aa, Homo sapiens
MEDGVNHPTNRNECYIRSLRWDNHTSPELFKNSADTHASSMIQFSSSLNQGRDRQTSHHFFCSCNSPLCSLGFPGDVSIKIERCHHHCRHCHCCTIIKEGARMPSCKF

SEQ ID NO: 15520 - DNA, 2599 bp, Homo sapiens
  CDS (490)..(2295)
ttagaacagcatctgaaacaaattcacgaggaagcactgagcaaattccagaaaattgaaccaagcaccgtggtgccagctcagacaccctgggacaagcctagggaattccagataacatgtggcccggattcatttgctacagatccctctaaacaaacaaccgtcagcgttagcttcctcttaccggacatcaccgacacatttgaagccttcacattaagtcttctgtcttcactcttgacttctgggcccaattctcccttttacaaagccttgattgaatctggccttggcacagacttttctcctgatgttggatataatggctacacgagggaggcctactttagtgtcggcctccaagggattgtggagaaagacattgagaccgtcagaagcctcatagacagaacgattgatgaagtagttgagaaaggatttgaagatgatcgaattgaggctttacttcataaaattgaaatacagatgaaacatcagtctaccagctttgggctgatgctgacatcatacatagcttcttgctggaaccatgatggggaccctgtggagctcttgaagttgggaaatcagttagctaaattcagacagtgcctgcaggaaaatccaaaatttttgcaagaaaaagtaaaacagtattttaagaataaccagcataagctgactttatcgatgaggccagatgacaagtaccacgagaagcaggcacaggtggaagccacgaagctcaagcagaaggtcgaggctctgtcccccggagacaggcagcagatctacgagaaaggtctagaattacggagtcaacaaagcaaacctcaagatgcctcttgtctgccagcgttgaaagtttccgatattgaacccaccatacctgtcacagagttggacgtggtcctgacagctggagatatccctgttcagtactgcgcccagcccaccaatggcatggtgtatttccgggccttctccagcctgaacacactccccgaggagctgaggccctatgtgcccctcttctgcagcgtcctcaccaagctgggctgcggccttcttgactaccgggagcaggctcagcagatagaattgaagaccggagggatgagtgcttctccccacgtgctccccgacgactcacacatggacacctacgagcagggtgtgcttttctcctctctctgcctggatcgaaacctgccagacatgatgcagctatggagtgaaatatttaacaacccgtgctttgaagaagaggagcacttcaaggtgctggtgaagatgaccgcccaggagctcgccaatggaattcctgactctgggcacctgtacgcatccatcagggcaggccggaccctcacgcccgcaggggacctgcaggagaccttcagcgggatggatcaggtgcggctgatgaagaggattgcagaaatgacagatatcaaacccatcctgaggaagctcccacgtatcaagaaacacttgttaaatggtgataatatgaggtgttcagtgaatgcgactcctcagcagatgcctcagacagaaaaagcggtcgaagacttccttagaagcatcggtcggagtaaaaaggaacggaggcctgtgcgcccacacacggtcgagaagcctgtgcccagcagctctggtggagatgcccacgttccccatggctcccaggtcattaggaagctggtcatggaacccaccttcaagccctggcagatgaagactcacttcctgatgcccttcccggtgaattacgtgggtgaatgcatccgaactgtcccctacacggacccagatcatgccagtcttaaaatccttgcacgtttgatgactgccaaattcttgcatacagaaattcgagaaaaaggcggtgcttatggtggaggcgcaaaactcagccacaatgggattttcaccctttactcttacagggacccaaatacaatagagacgctccagtcttttgggaaggctgtcgactgggctaagtctggaaaattcacacagcaagacatcgacgaagccaaactttctgtcttctcaaccgtagatgctcctgtcgctccttcagacaaaggaatggaccacttcttgtacggcctctcggatgagatgaagcaggcccacagagagcagctctttgctgtcagccacgacaagctcctggccgtgagcgatagatacctcggcactgggaagagcacacacggcctggccatcctcggacccgagaacccgaaaattgccaaggacccatcctggatcatccgatgagcagccgtggcgctcgactgcacaggagcccgagacaatacacctccgagctgaatatgaaaagtcagaaatgctactgctttttccaagaatattatgtcattgagtgtcgccaaagccctagactggcgagtcaaaaactcagatctatcttaagagtgaccaggaagaggttcattgaaataatcatgcatgaagcgccaaagatgcaccatgtagaattttcactttgtactggcaggctcgttttacctcattctagaatatttaagaatctaaaaataaagggcaactctgactt

SEQ ID NO: 15521 - protein, 602 aa, Homo sapiens [sequence omitted]

SEQ ID NO: 15522 - DNA, 2897 bp, Homo sapiens
  CDS (40)..(1863)
attgagaaagagttcaagaatgactacaaaaaactgtcaatgcagtgcaaagactttgttgttggactccttgatctgtgcagaaacactgaagaagtcgaggccattctgaatggggatgttgaaacgctccagagtggtgatcacggtcgcccaaatctcagccgtttaaaacttgccattaaatatgaagtaaaaaaatttgtagctcatccaaactgccaacagcaacttctctccatttggtatgagctttctggtttacgacagcagacaatggcggtcaagttccttgtggtccttgctgttgccattggactgcccttcctggctctcatttactggtttgctccatgcagcaagatggggaagataatgcgtggaccattcatgaagtttgtagcacacgcagcctccttcaccatttttctgggactgctagtcatgaatgcagctgacagatttgaaggcacaaaactccttcctaatgaaaccagtacagataatgcaaaacagctgttcaggatgaaaacatcctgcttctcatggatggagatgctcattatatcctgggtaataggcatgatatgggctgaatgtaaagaaatctggactcagggccccaaggaatatttgtttgagttgtggaacatgcttgattttggtatgttagcaattttcgcagcatcattcattgcgagattcatggcattttggcatgcttccaaagcccagagcatcattgacgcaaatgatactttgaaggacttgacgaaagtaacattgggagacaatgtgaaatactacaatttggccaggataaagtgggacccctctgatcctcaaataatatctgaaggtctttatgcaattgctgtagttttaagtttctctaggatagcttatattttaccagcaaatgaaagctttggacctctgcagatatcacttggaagaacagtcaaagacatcttcaagttcatggtcatattcattatggtgtttgtggcctttatgattggaatgttcaatctctactcctactacattggtgcaaaacaaaatgaagccttcacaacagttgaagagagttttaagacactgttctgggctatatttggactttctgaagtgaaatcagtggtcatcaactataaccacaaattcattgaaaacattggttacgttctttatggagtctataatgttacgatggtcattgttttgctaaatatgttaattgccatgatcaacagttcattccaggaaattgaggatgacgctgatgtggagtggaaatttgcaagggccaaactctggttttcctactttgaggagggcagaacacttcctgtacccttcaatctggtgccgagtccaaagtccctgttttatctcttactgaagcttaaaaaatggatttctgagctgttccagggccataaaaaaggtttccaggaagatgcagagatgaacaagataaatgaagaaaagaaacttggaattttaggaagtcatgaagacctttcaaaattatcacttgacaaaaaacaggttgggcacaataaacaaccaagtataaggagctcagaagatttccatctaaatagtttcaataatcctccaagacaatatcagaaaataatgaaaaggctcattaaaagatatgtactgcaggcccagatagataaggagagtgatgaagtgaacgaaggggaactgaaggaaattaagcaggacatctcaagtctccgctatgaactccttgaagaaaaatctcaaaatacagaagacctagcagaacttattagagaacttggagagaaattatccatggaaccaaatcaagaggaaaccaatagataatgcgaagacttccttagaaattcatatttatttgtccacttgaagccatattattttctgatttattttcttaagtgccaatgggcccaccttttaaacaagaaaacgttaaataacttgggccatcctatcatctggagccctagtatctaatttttttggtgattaaactccattgttcagggtaaaggctgtagataatgaggaaaattatgcccagttgtttggtgcttgttttataaactgctttcttggatataactaactcttgtgatgatgtcattgccatgtagtgtctgcctgaaaatgggtcccagcggacaggggctgacccacgttactccccatgcggtttttcctctgaagtttatttcaggttccttcttgcctgctctgtggatcccctgctggggactcccagctctgaaatttgggaaaaagtagcccatgggcctttagaatgctttaatcctttctttagaatgctgtttaaacaccatttaccctacttatccctcaatgcacatgattgataccgttcatacaaaatgggcttacatctatgtaaaattttctgattcatctatttgaaaacattacacttaacaatgaaaaaagtttttcctccactgaaccctggaaacatggtccagttttgtgtgtgtgcgtgtgtgtaaatgtgtacacacagacataaagtacttgccctatttagtttgtggccaatgtgggcacacaaaagctctttatgttataaatttttattgtcactaaaaaattttactgtctaaataagtaccttttattggagaaaaatcaaaaccccaaacaaacactgtggttgtttggttccattatagcacaattttgtgccatttctgggagcatttacagatgaatccccacacttagccattgaatgtaaaggggaaaaataaggtgagaatttgtaaatacttatctgttattttcaatatgttctatccttctacccaaatatataaaacaggaatttgcattcatgtgcattt

SEQ ID NO: 15523 - protein, 608 aa, Homo sapiens
MQCKDFVVGLLDLCRNTEEVEAILNGDVETLQSGDHGRPNLSRLKLAIKYEVKKFVAHPNCQQQLLSIWYELSGLRQQTMAVKFLVVLAVAIGLPFLALIYWFAPCSKMGKIMRGPFMKFVAHAASFTIFLGLLVMNAADRFEGTKLLPNETSTDNAKQLFRMKTSCFSWMEMLIISWVIGMIWAECKEIWTQGPKEYLFELWNMLDFGMLAIFAASFIARFMAFWHASKAQSIIDANDTLKDLTKVTLGDNVKYYNLARIKWDPSDPQIISEGLYAIAVVLSFSRIAYILPANESFGPLQISLGRTVKDIFKFMVIFIMVFVAFMIGMFNLYSYYIGAKQNEAFTTVEESFKTLFWAIFGLSEVKSVVINYNHKFIENIGYVLYGVYNVTMVIVLLNMLIAMINSSFQEIEDDADVEWKFARAKLWFSYFEEGRTLPVPFNLVPSPKSLFYLLLKLKKWISELFQGHKKGFQEDAEMNKINEEKKLGILGSHEDLSKLSLDKKQVGHNKQPSIRSSEDFHLNSFNNPPRQYQKIMKRLIKRYVLQAQIDKESDEVNEGELKEIKQDISSLRYELLEEKSQNTEDLAELIRELGEKLSMEPNQEETNR

SEQ ID NO: 15524 - DNA, 2226 bp, Homo sapiens
cttttaaaggcatcacctaattaggtcaggcccactcaacagttgattaaccttaattatatttgcaaaatccctttgccatttaagatgacacaataattggaatgatatcccatcatattcacaggtcctacctatactcaaaaggtggtaggttatacagggtggatatagtgttgaaagaaggaatgaatgaaatgaatgaattctgatagctggaagcacagcaactagctttttttgtagcatgagtgagagaaggtattgagttccttattgaagaatgcagttgcaacagtttatcactagtgagctgcttcttggtaactataagacataagcagacaagaaacagcaagaaaggaaggaaggagaaaagagaacgagaaggaaatcattattttggaccgatttccggtggtggtttcaagaagttctccccaccctccagactgctgtcatttacaattgctagagaacaagagctgggagcctctccttggttctgctcctgtggcatagccatgggggatgcagaagggcagtggtgcccactaaagggaatccccgtcagctttggttttagtttccagagattgagcctctgccttaggctgagagaaatacttagtgtgagtctttatttgctcccttataatcacaggcacatgtggcacctcctcccccatctctgccccacctcttccaacagtgagatgcattaggtgtggaaaggaagccttcatttcaaaatctcctggctgcggttagctttaaaaatcaaatggaactgtggtcgtctgtgtttaatttggaagagcagaaaggatgcgtgctttgtggcgcctgcatagtgaaagtctccatgacttaataccactgcccagccttagaagcttcccatgcagacaatggccctgcttccccatcagttcttgggcttgggtgccaccttatataaacattgctgcttttagtgcatcgcagaagcaaaaggatgacacattaatagcagctggaggatctcattaaaattcggaggaaaatatgaaggctggagcctggtaatgtacagacagtaagtctttgtctgtctgattaacaattgcatgcattctaagtgccttgctggatggtaagaaccagcatttcagccagaagtaccatgttcttctccttaagaataacctatttctgtttttcaattcccttatcccctctaaaaataatatgctggtcttttggactcccttgagaactgaaacagcttagcaactggggcagtccctgagagctggtgcagaaacaactgttgctagcttggatttgaattatgcagtcagatgcttacatcgtgggagggggatgtacggggtgtgtggccttcagatgcttacattgtgggagggggatgtacagggtgtgtggccttcatgccagaaaggacagggaagcactccctggttggcgggaggaggggagatgctggggttgaggcccttacctttatttatgttgttcactggtacagccagactgcaacctctcaactcttcagacaagacctaaggccgacaaaattcactccctcatgaagaacattgggctgtttctccctggtgtgtaggtggtgggagtgaagtagaggggctcgctgtgtgcagggaaagggctgcattctcaagaatttgtatgtagcccttggactaaaaacaaaatattccaaaggaatgcttcttttggaaccctggtccagtccctcgtctaagcaggagtgcccttatatgcttgactgtggatggcatctgattacgggcagaaggttgcactggattgctgcctgatgcggacccacagaacacagtttaactctggctctgtcagcagtcatcagtgtttatttttccaactcttcagagagatattagtcgttatgaaaagtgtaccatctcagaactccatggaataagctgccaatataagacaggttgaaattattgtgtctttttgcctagagttatttttagttattttttcttccttggaatttcttttcttttttttttttaaccatatatgctaactttgtagctggtggcaaaaaaagattattttccctatattaatgacttcttcagctgaattgaggaatagggttaccagctcttttcttggagtttaacactctcaatctgataatatgaataacacctcaataaccacaac

SEQ ID NO: 15525 - DNA, 3078 bp, Homo sapiens
  CDS (1668)..(2561)
atgataaagatgcagtacctttctcttaaaaaaaaatgctatggaaagctgtgagaattgaagagacaaattggctgtgtcagtgtggggttatgtcatgatttctagaagccctgaagttgctcttttgagcagctttgcatgacacgctctggtaaaaggtgtgcatctttaaattatttcatggatactttgaaaaatattgtatcacttcaaatacagcaataagtttatatgttctcaagatttcatttgtttttaagaattttaagttcgtggattaatatcactacttgaatactgacagttgttgattagacaccgaaaggttactgattgttgaatgtatctgtgttagagctgtgcactggcacgcttgcatcaggggctggggccacacggccgccacacagattcccccgtgatgcctggagctgcttccagagccgggtgtctccaagaggcacctgtaggacttcccatttagaaatctcttgagtgggtttgtatgttaccttctccaaggtttatttaggacagagatattgctggaaggtcatgggtcagattccctcacaacccacctcgtctgcgggtgcagccccactccaaggctccccgttattggggtatgtgaggagcagtaaatataaaaccagttcaactgtcctcatggaatcaccctttctgtttttgcagtattcataaagctagtgtaaggtctggttttagtctattaaatcttagagatctaaaggaaatgctcaaaatgtagccaggttttaaatgctttaacttttaaaaaatgtaaatttttgtatgtttatagcttctaaatatgaaagttaaagaatgtactgtgatgaaatgttcagtattatgttgcttctcagtatcatgttgcttctcagtattgtgttgcttctgattctatgaatgttcattttaagaccccttgttgaaatgggacagttggcagcggctctgatgagcccgagaagaggcctgcccttgggtgcggagtctccctccgcacgatgctcccacgcgtccaacttgcacccaaggggcttttccctcttccaagtggactccttcaaggaagctgcagctcggtcagcagagaaggggcctgccgccagcgccctggaggaagaggaagaggaacccaagaggatggcttgtctcccagcagccacaccggctttgtgctcagccagttcatttgagtttgcatgtttctctgcactatggattttgagcatttagatttctttaatcaaaagcgttttagtgactccagtagacattttctttctgaggcatcgtgctttgcatgagagcaggccaaggttgaggggaaaagtaaagttaaagtcggttctctttcatagcaacacgtattgtctgacattcagccagctttttttttttctaataatttctgtgcctttctgtcccgtatttactgtatttagaaaaagcagctagaatatttctccattaactcttgagattcacaggactgtctagctctgagtcctagcaatagactccttagaggagtagtacgtttatctagattttctctagataatgcaggcggaagacctgggttcccgggtggggcattgcagttcttcctgtgtttggcttccaggaattacatgaacgacagccttcgcaccgacgtcttcgtgcggttccagccagagagcatcgcctgtgcctgcatttatcttgctgcccggacgctggagatccctttgcccaatcgtccccattggtttcttttgtttggagcaactgaagaagaaattcaggaaatctgcttaaagatcttgcagctttatgctcggaaaaaggttgatctcacacacctggagggtgaagtggaaaaaagaaagcacgctatcgaagaggcaaaggcccaagcccggggcctgttgcctgggggcacacaggtgctggatggtacctcggggttctctcctgcccccaagctggtggaatcccccaaagaaggtaaagggagcaagccttccccactgtctgtgaagaacaccaagaggaggctggagggcgccaagaaagccaaggcggacagccccgtgaacggcttgccaaaggggcgagagagtcggagtcggagccggagccgtgagcagagctactcgaggtccccatcccgatcagcgtctcctaagaggaggaaaagtgacagcggctccacatctggtgggtccaagtcgcagagccgctcccggagcaggagtgactccccaccgagacaggccccccgcagcgctccctacaaaggctctgagattcggggctcccggaagtccaaggactgcaagtacccccagaagccacacaagtctcggagccggagttcttcccgttctcgaagcaggtcacgggagcgggcggataatccgggaaaatacaagaagaaaagtcattactacagagatcagcgacgagagcgctcgaggtcgtatgaacgcacaggccgtcgctatgagcgggaccaccctgggcacagcaggcatcggaggtgaggcggggttgcagtgactggtggccgcaagcccttccctggggagtacctgatggctgccctttgacccccggtggctgccctttgacccccgggtgtgctctcagcgcaagtggtcctagaacaggattctttttggaaatgtctgtcgactggaccttggtggatttggaaatggaactgagggaccggtgacacgtgcttcagaccggtctggggtgcggcgcacacctgggcccgtgcagggctcagctcggcagcagctctgagggcagctcaatgaaaaagtgaatgcacacgcccttgttggcgtggcctggcatggcctggtgctatcggcagccgctctccactccccgactgataattacgtgaagccaagaaagatgatttttagaacctttgcctatattaggttgtacttatgtacatattttgcagtgtttcacaggagaaagtggccttaactgccccttattctctctccacgttgtaaataaacatgtgtttaatac

SEQ ID NO: 15526 - protein, 298 aa, Homo sapiens
MNDSLRTDVFVRFQPESIACACIYLAARTLEIPLPNRPHWFLLFGATEEEIQEICLKILQLYARKKVDLTHLEGEVEKRKHAIEEAKAQARGLLPGGTQVLDGTSGFSPAPKLVESPKEGKGSKPSPLSVKNTKRRLEGAKKAKADSPVNGLPKGRESRSRSRSREQSYSRSPSRSASPKRRKSDSGSTSGGSKSQSRSRSRSDSPPRQAPRSAPYKGSEIRGSRKSKDCKYPQKPHKSRSRSSSRSRSRSRERADNPGKYKKKSHYYRDQRRERSRSYERTGRRYERDHPGHSRHRR

SEQ ID NO: 15527 - DNA, 2042 bp, Homo sapiens
aaataggtgacttaaaagaaggcattccatcatagatggcaaaaaaccaaaaatctgttggaccagtaactcttctttttctttgacttgcttagtaggttaaaaagtgataatgaattcaagtttttgttattgttgttcaaaacatcatttttaagacccgaggctctagtgctgcatttcctacctgttaataaaggaatatctggaacataaatatttgtgcagtgagtgggcatttctctagaagtgtttcaacagatacagtacagactcctagaagtagagatgctacagcagtgggtttgcgtatttaacatcttggttgagattgtgaaactttctccgataactttctacccatttataactttagtaatatacaatgtgactttttttagtatccttgctagtattgggcattgtcattgttttaatctttgccaatctgatagttataagtgatactcatttaaatttaaatcacaatatttcttttttaattgaagaaaaaatcagcattaggtgaggtttaccaagcattggtggtgattactgggtattggtggctcagacgtaggatgatggactgttggcatgatattgccttgattgcctaatctgtaactcctaataaatactggaaaattagcttgcctgaaacattggtaagaactttttaaaaattacctttattttcttacttggtccttgactgcatcttgggccccagccagttacatatgcatataatatgatgacaaatgaaaatggttaagacagcatgtatcttgtcgctaaaaggatactcttagggcagagacttgttttgtatattttgaatacgaattttagcctaataacaacaaaatttgcttgaatatatatatattaactactctgtcacttttgctaatctgcattaaaggaaaatcaccttttggttaatgtaagactgtgaccttttctgcgttgctttctgtagtgtcttctgggactctcctactcattgcttgcctgtgcattgtggccaatggtggcatttgtagttcctgaacatcagctgggaactgcatatggcttcatgcagtccattcagaatcttgggttggccatcatttccatcattgctggtatgatactggattctcgggggtatttgtttttggaagtgttcttcattgcctgtgtttctttgtcacttttatctgtggtcttactctatttggtgaatcgtgcccagggtgggaacctaaattattctgcaagacaaagggaagaaataaaattttcccatactgaatgagaagttaaaatgaatgtgtcatgagaatgggcttaacacatcgttggtttgaaaacttccatttttaaaaatttagagtttagtcattagaaaaaataatggactggaaagttatatttatatccaaatatacctatttcaaagtgtatttgtgaggcctgttttagcctgtgtcttttgtattgtgtgttactaaagaattctacttttagtaggctaatcaacaatgaaagggttagaaaattgctgtggaacgtccaggtgaacttcagggaagacagtgaaaaatggaaaacgttggagcttctgttgagataatcttcattaggtatatatcttagggatacagccttttctttatcttatagcaggaaaaaaaaacttttgagggaaatagaagggctgcgttacacaaaataaacaatggcattgtcataggccttccttttactagtagggcataatgctagggaatatgtgaagatgtttttatgaagtctctttctgatcacgaacaatagcttgcgctctactctgtagttatgtggattgccgagcaatgacccttttcaatttcttatttctgtgttactgaggaccctaatcacttagggatgtaattttatagtataaactttctgtacagtttttcttatagtctaataagtaaaaagtgtccttcaaattatgataattgcctatgtacatggataaattaaaacactgcacacggagt

SEQ ID NO: 15528 - DNA, 2172 bp, Homo sapiens
catttctttataatcgttatgcaggaaaattgcctaagaattatgacccaaaagttaccccagatccagaaagatggctgccaatgcgagaacgttcttactaccggggaagaaagaagggtaaaaagaaggatcagattggaaaagggacccagggagcaactgcaggagcttcatctgaactggatgccagtaaaactgtgagcagcccacccacctccccaagacctggcagtgctgcaacagtatctgcctctacaagtaacatcatacccccaagacaccagaaacctgcaggggctccagcaacaaaaaagaaacagcaacagaaaaagaagaaaggtggaaaaggtggctggtgatgagaatattcttgttgcaggctgtttttaaactagtgtcagtgacactaggaatataataaaggtaacacagcaagaagcacagaactactccctcttcatctccatattttcataatttcttgtgtttcaaatagggaaacatcttcctcaaagtctgcctagtgagatatggcctactggttgcctcatagctttgtacagattatgaggactgaaaataattgggcatttacccatcttggtatctgttgtatcctttatctgtgtgtgctgatttgatcttttttcagtttcacataccttatctaaggtttcccaggatttaaacagaaactacttctatgatttcagctggagtctgaagatacttgtttctgttcaagtcccactttaaattatgtcttaggagactgaaagtggaatcttctgagcattcctaaatatctgcttagaaatatcatgtgataaagagggaccttcttaatacactgatgttcttcactaaatggatggccacaagaaaaataaagtaaatgtcttaaataatttaaccataaattttctgtcatgtgatactggaatatgggatacttttcatgtttatatatatatatatatgtatatatatatacatatatatatatataaacatgaaatatatatatatggctcctttgtgccccatgtcattttcagattatggtagcatgctgatacagcaccatgaaagaactcaaggaaaatatatcaatgtaagaagttcactcttagacctagtgttctgaggtcacatgggtttggactgtctcaatcagaaagattaatgactgttatcaagaacatgaacattggcttcctccatagagaagaaatcagtatctgagttgcataccaggcagtattaaaatctaacaggtctgtttggcccattgatagatactcaaatggtgtctccttctagttatggattttgaccattgattacctttctcaatgtaatgaagtattttacagtcaatttgtggtgtaaatgttgctcttgtctttccttgcttacaaactactttcacattgaacagctgtgagacagacatattgagatgcctgcccttgttagtattcattttatgctgcccaagatatcatttaatttagacttaacaagtatttccttgtgattatattactctgtccttgttaataaagtgctgctgtgtttgactctgaacatactaccaaaacttcttcaaagagttttttatgaaagactttcctcctttacaagaaagaaatggggtgctgcctttctgtttagtaaaagcagaatttgcagtggcatctaaagagatcttttttaaataaaaattatgtattgtggcataatcctttttttgagctctacagagaacagtcttttggtaatagtggcaggtatttattccttctgaatatataccccattataggaataactgttacttatttaggattccatcattgaaaattttgacccaaggcacagcagtgaaatttatagttctcaatttagttgtcattattgacaggcattggtattattagtcattgctaagcaactaaaacttcatcagttcaaataagttttaattgtctaatgaagtataaacacatgaactttctagaaatatttcctcttttggataggtctttaaccagttcatatatatactttgtcaaatatatggatgtgtatgtgtacatttataagaaccagtatggatacatccattcactgtggtacattttaaaataaaatattttagcagtg

SEQ ID NO: 15529 - DNA, 2363 bp, Homo sapiens
  CDS (1759)..(2073)
aatgagaaggaaccggaaaaacaattctggtaatataagaaaacaagcttctttaacacgcagaaaagatcacactagctcaccagcaatggatccaaacaaagaatacatctctgaattgccagaaaaagaattaagaaagtcaattattaagctactcaagaaggcaccagagaaaggtaaatatcaacttaaagaaatgttttgttttttgtttttttgagatggagtctcgctctattgcccaggctggagtgcagtggcgcgatctgggctcactgcaagctcggcctcctaggttcatgccattctcttgcctcagcctcccgagtagctgggactacaggtgcccaccaccacacctggctaattttttgtattttttagtagagacagggtttcaccctgttagccaggatggtctctatcccctgacctcgtgatccactggcctcgacctcccaaagtgctgggattacaggcatgagccaccacgtttggcctaaagaaatgttttaaatgatacagtgtatgaatgaaaaaatctccagaagaatagatggcataaatttaaaacaatcacaacttctggaaatgaaagacacatttagagaaatgcaaaatacacgggaaaaactcaacaataaaatggaacaagtagagagaacttcagaacttgaagacaaggcttttgaattaacccaatcaaacagagataaagaaaaaataattttaaaatataaacaaaccctccaagaagtttgggattgtgttaaatgaacaaacttaggaataattggtgttcttgaggaggaagagaaagctaaacgtttggaaagcatattggagggaataattgaaggaaacttccctggccttgctagagatccagacatccaaatacaagaagctcaaagaacacctgggaagttcatctcaaaaagatcattgcctaggcacatagttctcaggttatctaaagagaagatgaagaaaagttcttaagagctgtgaggcaaaagcatcaggtaacctatttaaaaacaccttttagattaacaacagatttctcagcagaaaccctaaagcctgtaagtgattggggtcctatttttagcctctttaaacaaagcagttgtcaggcaataattttatatccagcaaaactaagctttataaatgaaggaaaggtacagtctttttcagacaaataaatactgagagaattcaccactatcaagccagtattacaagagctgttaaaaggagctctaatcttgaaacaaaacctcaaagtacaccaaaatagaaccttcttagagcataaatcttacagaacctataaaacaatagcacaatgaaaaaaaaacctagcacaatgaatagaatagtattctatcacatctcaatactgacactgaatttaagtggcctaaatgctccactcaatagatacagaacagcagaatggataagaattcatcaaccaagtatttgttttccttgagagactgacctaacacatgaggactcaaataatcttaaggtaaaagcatggaaaacaaacattccatgcaaatggaaaccgaaagtaagcaggagtagctattcttatatccgaaaaaaaagacataaaacaacaattaaaaaagacaaagagggacattatataatgataaaaggattaaaccaacaggaaaatatcacaattggaaatatatatgcacctaacactggagctccaaaatttataaaacaatgaacactaaacctaagaaacaagatgggcagcaatgcagtaatagtgagggacttcaaaactccactcagagcactagccaggtcatcaccacagaaagtcagcaaagaaacaatggacttaaactataccctacaataaatggacttaacagatatttacagaacattctacctaacaactgcagaatataccttctattcatcagcacatggaacattcgccaagacagactacatgataggccacaaaagaagtctcaacaaatttttaaaaatcgaaattatatcaagtactctctcagaccactggaataacataggaaatcaacactgagaataaccctcaaaaccacgcaaatacacggaaattaaataacttgcttctgaatgattgttgggtcaagaataaaatcaagaaggaaatgaaaaaaattgactgaatgataatagtaaaaaacaaaacaaaacaaaacaaaacaagaaacctatcaaaacttccgagatacagtaaaagcagtgctgtgaggaaagtttatggcattaaatgcctatatcaaaagtctgaaagagcatgaatagacaatctatggtcacacctcaag

SEQ ID NO: 15530 - protein, 105 aa, Homo sapiens [sequence omitted]

SEQ ID NO: 15531 - DNA, 2008 bp, Homo sapiens
  CDS (75)..(1394)
gcgccagggatttgaaccgcgctgacgaagtttggtgatccatcttccgagtatcgccgggatttcgaatcgcgatgatcatcccctctctagaggagctggactccctcaagtacagtgacctgcagaacttagccaagagtctgggtctccgggccaacctgagggcaaccaagttgttaaaagccttgaaaggctacattaaacatgaggcaagaaaaggaaatgagaatcaggatgaaagtcaaacttctgcatcctcttgtgatgagactgagatacagatcagcaaccaggaagaagctgagagacagccacttggccatgtcaccaaaacaaggagaaggtgcaagactgtccgtgtggaccctgactcacagcagaatcattcagagataaaaataagtaatcccactgaattccagaatcatgaaaagcaggaaagccaggatctcagagctactgcaaaagttccttctccaccagacgagcaccaagaagctgagaatgctgtttcctcaggtaacagagattcgaaggtaccttcagaaggaaagaaatctctctacacagatgagtcatccaaacctggaaaaaataaaagaactgcaatcactactccaaactttaagaagcttcatgaagctcattttaaggaaatggagtccattgatcaatatattgagagaaaaaagaaacattttgaagaacacaattccatgaatgaactgaagcagcccatcaataagggaggggtcaggactccagtacctccaagaggaagactctctgtggcttctactcccatcagccaacgacgctcgcaaggccggtcttgtggccctgcaagtcagagtaccttgggtctgaaggggtcactcaagcgctctgctatctctgcagctaaaacgggtgtcaggttttcagctgctactaaagataatgagcataagcgttcactgaccaagactccagccagaaagtctgcacatgtgaccgtgtctgggggcaccccaaaaggcgaggctgtgcttgggacacacaaattaaagaccatcacggggaattctgctgctgttattaccccattcaagttgacaactgaggcaacgcagactccagtctccaataagaaaccagtgtttgatcttaaagcaagtttgtctcgtcccctcaactatgaaccacacaaaggaaagctaaaaccatgggggcaatctaaagaaaataattatctaaatcaacatgtcaacagaattaacttctacaagaaaacttacaaacaaccccatctccagacaaaggaagagcaacggaagaaacgcgagcaagaacgaaaggagaagaaagcaaaggttttgggaatgcgaaggggcctcattttggctgaagattaataattttttaacatcttgtaaatattcctgtattctcaacttttttccttttgtaaatttttttttttgctgtcatccccactttagtcacgagatctttttctgctaactgttcatagtctgtgtagtgtccatgggttcttcatgtgctatgatctctgaaaagacgttatcaccttaaagctcaaattctttgggatggtttttacttaagtccattaacaattcaggtttctaacgagacccatcctaaaattctgtttctagatttttaatgtcaagttcccaagttccccctgctggttctaatattaacagaactgcagtcttctgctagccaatagcatttacctgatggcagctagttatgcaagcttcaggagaatttgaacaataacaagaatagggtaagctgggatagaaaggccacctcttcactctctatagaatatagtaacctttatgaaacggggccatatagtttggttatgacatcaatattttacctaggtgaaattgtttaggcttatgtaccttcgttcaaatatcctcatgtaattgccatctgtcactcactatattcacaaaaataaaactctacaactcattct

SEQ ID NO: 15532 - protein, 440 aa, Homo sapiens
MIIPSLEELDSLKYSDLQNLAKSLGLRANLRATKLLKALKGYIKHEARKGNENQDESQTSASSCDETEIQISNQEEAERQPLGHVTKTRRRCKTVRVDPDSQQNHSEIKISNPTEFQNHEKQESQDLRATAKVPSPPDEHQEAENAVSSGNRDSKVPSEGKKSLYTDESSKPGKNKRTAITTPNFKKLHEAHFKEMESIDQYIERKKKHFEEHNSMNELKQPINKGGVRTPVPPRGRLSVASTPISQRRSQGRSCGPASQSTLGLKGSLKRSAISAAKTGVRFSAATKDNEHKRSLTKTPARKSAHVTVSGGTPKGEAVLGTHKLKTITGNSAAVITPFKLTTEATQTPVSNKKPVFDLKASLSRPLNYEPHKGKLKPWGQSKENNYLNQHVNRINFYKKTYKQPHLQTKEEQRKKREQERKEKKAKVLGMRRGLILAED

SEQ ID NO: 15533 - DNA, 2763 bp, Homo sapiens
aaataaatacatctgggatgactgaccaagaacaaagaatgtaggcatcaactgaacaccaactgtatacctgggactggatctgagggtaggattgccagattgagcacaaacaaacaaacgaaacacaagaaacaacagaagggtgcctgttaaatatgaatttctggtaagcaataagtaatttttattgtgttcctgtgcaatgataggacgcacgtatcctgaaaacctgtctgtagttcacctgaaattcacatttaactaggcgttctgattttatgtggccgccctatctgctgggaacataggctgatgcccctgggggttctgcgtttccttggccaggttcctgtagggctgaggtcatgggggagccgtggccagggatggtgtccttgccaggggaggtgacgggcagagctgcaggccctacaacttggggttgggcagggatgagtcgctctatggtggtgcctctgataatagctgttattttagcttctgaaaaatgtgctgccctcaagagcttctgaggctaggcctacttgggtgaaaatagctttccagggagccacattgtggggacgtgaggcagcagccccacactttggggccacttggctgtctctaactcatctcacttgccagggctggacaaggagatgaaaaagaaaatgccaaggggtgggcaggcaggagcctgttggcgttggcaggcgctgccagccctgtgtcccagtcaagctctggggcgcccttcctgtccatctgggagtagggggtggagtctgaccatgttggggcggagtgttaatattaggagaggatcctccctgggacagggtccccaggcttgggggcaaggccttctgcctggacccccttcctttcctctctcccaggattcctccagggcaccgtagtgctgtgcatggtttggccccatcggtgtgcctgctccttccagccactgctcccttctgcagaaacttgcctgggattcccagggtgcaggggcgggggctggtcaggggctggtcagggcctggtcagtgtagagcagggagcttttcacttttagcatagatagagtggccagggccccatggctgcacctccctggacataaccaggatgtcctgtcatctgccccccaaacaaaactggggtctcccctttattttgccaacagaatccaatttttaggtgatgagacaagtgtttgacttgaaaagaccctcctgccctgcctcctggaaggtctggagcccagcccagcgccccggatcccctaggcatgtgaaacggggaatgcagtgtcctccagtggctggctgcagcttggggtgggcacctgggtggtggctggtggtccccctgcaggccactgctgccccctcttgggtcctgttctgagtctcaggcctgagtccctggggaaggccccacacctttgccctgtacctgggtatggggatggccctgaggggctgccttgcttgggagaaggggggaaaacagatatttttatataaataagaaaaagacagcccctctgggcagatgaggcctgctgtagggcagggggcttggtaaactgtgtgtccactggtctgtaacccttcagctgggtccttttgtgcagtgaacagcctggacaactgtccaggtggcccttcagggatatgttcctggacctttcttagcttctcaccgatctttcttccacgccaagtccatgttcctcagtcaaacaagtggcaaagaggaggaggaggaggggaaggaggaggaacctgcttcaccctctggcacctgcgggttttgttccacgtgtcttccttgggaaagacaaggggttcttttacagcctaggggtggtttcccctttctacttctgagtgagaccttctcaagtcacggctctttgggcccacatggctaaggtctagccacctgtgggtgtcctgtgctgcctcagtgggtggtgtgggggcggggctgacctcccccgcgcctggctcagtgcagcagaccctggcccctgtgcccgctctctgccctgagcaggagtttgattttcctaccccgtggtgaagcaagcacaggtgggcggaggtgggcagcggtttccagccccagccaccggggcagggaggcctctgttgctcagggcaagggaggcagggggcttagtgggacgaaggctcaccccacactcttatcattagcattatctgtatttttaatttttaagttgagaaattttctacaactgtcaaactagacaaatgacagtatccagttcccctcacccagacgcagccattgctgacagctgtcagtgttgaagatggccagcatctcatgcccttggtttcactcgttccctgggtggccctcgtccccttccccacgtcccgcgccccgcataccctgagcagccatggccaggagcttggcacgtgggtttgttttttctgaatctgcatgtgcgcagccatgagcatgaggtcactttttgaatgtgaccgaagctgcatcctgctgcgtgtattgctgtgtggctggctttcctccctgtcttctgttcaggaatactgttcaggctgaataccgtcctgtgacatgggtttaaaaacacaggccaggcatggtgtctcacgcctggaatcccagcgctttgggaggctgaggtgagaggatcgcctgagcccaggagttcgagaccagcctgggcaacatagacctgatctctac

SEQ ID NO: 15534 - DNA, 1637 bp, Homo sapiens
ggttatgaagaataacatagaatatcatacatttgagatttttgtacttgcttaaaggaaaccaacaggaagactttttttttttccaaaattgacttacactgaaaagtttatctttgcctccataccccctaaaaatcaaatgatgtatatttttccatgaaatgccttttggtgtggtttatgtgcatgactgattcttagaaagccaataagataggggtggagccaagatggccgaataggaacagctccagtctaaagctcccagcgtgagcgacgcagaagacgaaagatttctgcatttccagctgaggtaccgggttcatctcactgcggattgtcagacagtgggtgcagtgcaccaagtgtgagccgaagcagggcgaggcatcacctcacccaggaagcgcaaggggtcagggaattccctttcctagccaaggaaaggggtgacagatggcacctggaaagtcaggtcactcccaacctaatactgtgcttttccaacggtcttagcaaacggcacaccaggagattgtatcctgcacctggcttggagggtcctatgcccatggagcctagctcattgctagcacagcagtctgagatcaaactgcaaggcagcaggaggctgggggaggggcgcccgccattgcccaggcttgagtaggtaaacaaagtggccgggaagctcgaactgggtggagtccaccgcagctcaaggagggctgcctgcctctgtagactccacctctgcgggcagggcatagccaaacaaaaggcagcagaaatgtcctctgcggacttaaatgtccctgtctgacagctttgaagagagtagtggttctcccagcacggagtttgagatctgagaacagacagactgcctcctcaagtgggtccctgacccccgagtagcctaactgggaggcacccccagtaggggcacaatgacacctcacacggctgggtacccctctgagacaaagcttccagaggaaggatcaggcagcaacatttgctgttcagcaatattggctgttctacagcctctgctgctgatacccaggcaaagagggtctggagcagacctccagcaaactctaacagacctgcagctgagggtctttactgttagaaggaaaactaacaaacagaagggacatccacaccaaaaccccatctgtacatcaccatcatcaaagaccaaaggtagataaaatcacaaagatggggaaaaaacagagcagaaaagctgaaaattctaaaaatcagagcgcctcttcccttccaaaggaacgcagctccttaccagcaacagaacaaagctggacagagaatgactttgacgagttgagagaagtaggcttcagacaatcaaacttctccgagctaaaggaggaagtctgaacccatcgcaaagaagctaaaaaccttgaaaaaagattagatgaatggctaactaaaataaccagtgtagagaagtccttaaatgacctcatggagctgaaaaccagggcatgagaactacgtgatgaatgcacaagcttcagtagccaattcaatcaactggaagaaaggatatcagtgattgaagatcaaaagaatgaaatgaagcgagaagagaagtttag

SEQ ID NO: 15535 - DNA, 2576 bp, Homo sapiens
  CDS (208)..(1545)
gtacctgtagctgcggcgctgaggtcggaacgtctgcgtgtgtgcgggctggttttgtggcggctgctgctagagctggagcatttgccgggttggtggctcctgcacatttttacagttctccagtccttctctttcgtcagtataaaagattaaactctacagaagaatgcaatcaagtgatggcttttcctttagaatttgaatatggaggctacaggaacagatgaagttgacaagctaaaaaccaaatttatatctgcttggaacaacatgaaatatagttgggtgttgaaaacaaagacgtattttagtagaaattctcctgtattattgcttggaaaatgttaccattttaaatatgaagacgaagataaaacgttacctgcagagtcgggatgtacaatagaggatcacgtaattgcaggaaatgtagaagaatttcgtaaagatttcatttctagaatatggctgacctacagggaagaattccctcaaatagaaggctcagctttgacaacagactgtgggtggggctgcacattgagaactggccagatgctcttggctcaaggactcatactacactttcttggtagagcttggacctggcctgatgctttgaatattgaaaattcagactctgaatcatggacttcccacactgtcaaaaaatttactgcatcatttgaagcatcactttcaggggaaagagaattcaaaaccccaacaatttctctgaaggaaacaattgggaaatattctgatgatcatgaaatgcgaaatgaagtttatcataggaaaatcatctcttggtttggtgattcccccttggctctttttggcttacatcaactaatagaatatggaaagaagtctgggaaaaaagcaggagattggtatggaccagctgtggttgctcacattttaagaaaagcagttgaagaagcaaggcatcctgatttacaaggaataactatttatgttgcacaagattgtacagtttacaattctgatgtaattgataaacagagtgcttccatgacttctgataatgcagatgacaaagctgttattattctagttcctgttagacttggtggagaaagaaccaacaccgactacttagaatttgtgaagggtattttaagcctggaatattgtgtgggtattattggtggcaaacctaaacagtcatattactttgctggatttcaagatgacagtttgatttacatggatcctcattactgccaatcttttgtagatgtcagcataaaggatttccctcttgagacattccactgcccttctcccaaaaagatgtcttttcgaaaaatggatcccagctgtacaataggattttactgtcgaaatgttcaggacttcaaacgagcttctgaagaaatcaccaagatgctgaaattttcttctaaggagaaatatcccttatttacttttgtaatggtcattccagagactatgattttacatctactacaaccaatgaagaagaccttttttcagaggatgaaaagaaacaattaaaaagatttagcacggaagagtttgtcttgctttaaagattagcacatttgtgcttgataagaagaattccattgaaaggggaaaaatgaagagaaacaagtatatctgaaatgtttattttcacaaatatcttaattttatatgttctttaaaaaagaacatttgaaaatataacagttaaagatatttttctaaaagagaaatgatttaatgaatcttgctttctaataaataaattgagtgattctggttgcattcctatttccctaagatctactagtgataattctaccttaactgtaagccttttagtcttcaaagtcttccacctgagcccattgttctcatgggggttttgtgatattaaccctcccccaaagactgggatcaccaaatagtttcaaaattctcagtttgtactgaagaccagaagatcagagaaggaaactttaatgctgtctagcctcctgctattaatgcaatcaaagaatacttttgcatatgtcttgataattaaatagtatttgttaactgtgatatgcatacacttatataagcagaattatgagttaaagtaatacttagcaatatgattttataatggctcctcattatgcttgctgttgaaccttttatgaggagtgaatataaagtattggttttccctcacaaatttaaagattatgttattaatactattataactgcatcaatcaagtcagataaaggcaactataaaatagtagtagtgtttgtttcctatctcaagggcgaaattttatgggaactcaatttattatgcagtttttaagtttaaaataccaagaaagatgtcactagattctcttctatgtgatttttgttttttatataaagcagtgtagtggtgtttagaagctgaggccacctgtaaggcaaatctgccttaagtgtattatgtgttacttaaaggcaaatttgtgatctaaaagtacaagagtgatttttgagctaggattataaaatacataataaagatgtgagaagat

SEQ ID NO: 15536 - protein, 446 aa, Homo sapiens
MEATGTDEVDKLKTKFISAWNNMKYSWVLKTKTYFSRNSPVLLLGKCYHFKYEDEDKTLPAESGCTIEDHVIAGNVEEFRKDFISRIWLTYREEFPQIEGSALTTDCGWGCTLRTGQMLLAQGLILHFLGRAWTWPDALNIENSDSESWTSHTVKKFTASFEASLSGEREFKTPTISLKETIGKYSDDHEMRNEVYHRKIISWFGDSPLALFGLHQLIEYGKKSGKKAGDWYGPAVVAHILRKAVEEARHPDLQGITIYVAQDCTVYNSDVIDKQSASMTSDNADDKAVIILVPVRLGGERTNTDYLEFVKGILSLEYCVGIIGGKPKQSYYFAGFQDDSLIYMDPHYCQSFVDVSIKDFPLETFHCPSPKKMSFRKMDPSCTIGFYCRNVQDFKRASEEITKMLKFSSKEKYPLFTFVMVIPETMILHLLQPMKKTFFQRMKRNN

SEQ ID NO: 15537 - DNA, 1086 bp, Homo sapiens
  CDS (257)..(712)
tctgaatcaagccagggaggacttcaaccaggacatcggctggtgtgtctccctcatcaccgactacagggtccggttaggctgcgggtcttttgctggctctttcctggaatattacgcggctgatataagctatcctgtccgaaaatccatccagcaggacgtcttagggaccaggcttcctcaactgagcaaggggagccccgaggagcccgtggtggggtgccccctggggcagaggcagccctgccggaaaatgctccccgaccgctcgcgggccgcccgggaccgggccaaccagaagctggtggagtacattgtgaaggccaagggcgcggagagccacctgcgggccatcctaaagagcaggaagccatctcgctggctgcagaccttcctgagctccagccagtacgtgacctgtgtggagacctacctggaggatgaggggcagctggacctggtggtgaagtacctgcagggcgtctaccaggaggtgggggccaaggtgctccagcgcaccaacggcgaccggatccggttcattctggacgtgcttctgcccgaggccatcatctgtgcgatctctgcggtggacgaggtggactacaagacggctgaggagaagtacatcaaggggccttcgctgagctaccgggaaaaagaaatatttgacaaccagctccttgaagagcggaaccggcgccgtcggtgagggagcagccggctgtgctgtcagcggggcctggcggtggaagcgcctccagtgtgcatgagcgtgtctgaagatggggggctcagggggcacgtttgcgtttggacctgtctgtgcgttcccctgcgtggcagtcctgatttccatgcttctggagaatccatttcgttaacactgaaagccagttctcttttcctggcagtttttttcattttatttttggcattttttacaagataccgttcgggaaaggcttttgaaaggacggaagcgtattcactgtgcgccagtactcctggctgtgctgtggtttctcccgacgtgcacatcgatctcgtatgtgtggcatctgatattaaacgggaggtttt

SEQ ID NO: 15538 - protein, 152 aa, Homo sapiens
MLPDRSRAARDRANQKLVEYIVKAKGAESHLRAILKSRKPSRWLQTFLSSSQYVTCVETYLEDEGQLDLVVKYLQGVYQEVGAKVLQRTNGDRIRFILDVLLPEAIICAISAVDEVDYKTAEEKYIKGPSLSYREKEIFDNQLLEERNRRRR

SEQ ID NO: 15539 - DNA, 1772 bp, Homo sapiens
ttttgacttataaacaatgctgcaatgaaataattgacatatttccttgtgtacatgtgagcatttcttgagatatgtatctagaacttgaatcactggccaacaggatattcttaatcttcagtttcaccagatacttccaaattgatctccataacatgcataccaaattatattcctaccagccatttataggagttcacattttttccataccctcccaatcctgccttggcagatatgttttttccaatgaataacaatgaaattttgttttgggatttgacaaaatgattctagattcatctggaagaaaagcaagtataagtaagaaatttaaaagggacctgaaaaactaagcaatggatatatttaaaaattggtaccagtagggataaccaaatatttgttaactgtagcagaaacaatgcatgtttttctcactggttccaccttctatctctcagtcaagccctgcccaggtgtggtagtcctcatagtctctcactgtaggggtcttctcacatagtagaccactctcttgagttgaatattgaaaagaaggcttggccgggggcagtggctcatgcctgtggtcccagcactttgggaagctgagtcgagcggattgcttgaggtcagcagttcgagagcagcctgactaacatggtgatgaaaagtacaaaattagctgggggtggtggcgcatgcctgcaatcccagctactcgggaggctgaggcacgagaatcgcttgaacgcaggaggcataggttgcagtgagccgagattgcaccactgcactccagcctgggcgacagagcaagatttcgtctcaaaaaaaaaaaaaaaaaaaaaaaggcttaagtccaactaactgtttccctgctgttcattttatccaacggctggggatataggctactgcacatgatgggttgatggatgtgaaatgataactcatgactttaattctaatttttctatattctggtgaggttgagcatatttttacaagttcataatccattttcctctgatgggagttgcctgtttgaatcctttgcccacttgctttttggggttatttgcaattttttgcattgatcttcaaacattcttaattaatcccaggtacatattattttatatataagatatattttagagatatataggctgatagtatcttttctcagtctaaggcttatcttttaattttgtttatggtgttttgtgtgtgttgttttgcagaagttttattgtatctgaattgtggcttttgtgtcttaagaaattctttacctactgtcataaaaatttttgtctaaaaattttatgattttgcctttctattttgttaattcactttgaaattacttttgtttatggcataaagtccattattttccatatggataatcagttgtcttagcagtttattgaatggtccaacgtttccctgctgattataatgccctctctgttatttatcctaaattcttgacatccggtaaggaagtctcctctgcccacccttctctgtatttcaaaatggttttgactgttcttgaccccttgctctttctgtgaactttaggattaaatgattatgtagaattaaacaatcgggttaaggttttttattagaattacattgaatctatagattaatttggggaaagaatgttatctttctatccatgataattctgtatctctccattaattcaagtctttaatggtttttaaaaataaattattgtctctttg

SEQ ID NO: 15540 - DNA, 1292 bp, Homo sapiens
  CDS (785)..(1147)
ttaatttaaaactggattgatgatcattatggtatgatatgatattaaatgtatgcattgttttgatgctatatttagtagacaggtggtagaccctgtccttaaggagctgttgtcctgaaaataagtagggcacatataaatgtccaaagagacctaaaccatttttgctgtttcctgaggatacatgtcttttgcccataactcttctttacttttgtcctgtttgtcttaaaggtagagaataaggtagacattgccagggaagccctggcacccttataccatttctttttcagctttttctctcaagtttctttcttaggaaggagttggatgagtcatcctgggatgagggtaaagaaggttatcattcttatagtgactttaagtgatggtgggcttcccttcaagggagtgtatagttttctgtggctctacagcaagacatctttactgagtaataggcaacctggatagattgcaatccactacttaaaagtacaccacctgtctttctcccagctctctgtaaaaataaaagaacagccaaacaaatcaaatttccatagatttggcactgtgatttgacagctctccacttttagttctaagatggatagattggtagaatcagattgcttcccaaagaagtatagtttctttcctttaagtcttttaacattttaaatatattattaggcacatgtttgggagatgagtgaatcaactttttctttctgattaatagacatatccagttcaatcacatggtggaaactatatgggtcagagcattcaccaagtaactgttgcccaaagctatagcctaggacccgatcaaattggtccactgagatctctgcctccaaatgtgaattcctcagtgacagcacagcctgctcaaacttcatatttaagcactggacaagacactgtttccaatcctacttatatgaaccagaactctaacctacagtcagctactggtacaactgcttacacacagcaaatggggatgtctgtggatatgtcatcttatcagaacactacttccaatttgcctcaactggcaggctttccggtgacagttccagctcatccagttgcacagcagcacacaaattaccatcagcagcctctcctttagaaacaaatcaagcattttcttgaaagccttcataagtgtattattcagtccttgtgataccaacctgaaaatattaaaacttttttccctctcaactcaaaaggaccatgaataaataaagcacaaaaacctctcttattct

SEQ ID NO: 15541 - protein, 121 aa, Homo sapiens [sequence omitted]

SEQ ID NO: 15542 - DNA, 2291 bp, Homo sapiens
  CDS (1729)..(2169)
aatacaagtatgtagaccccatctgcaccttcgtcttctccatcctggtcctggggacaaccttgaccatcctgagagatgtgatcctggtgttgatggaagggacccccaagggcgttgacttcacagctgttcgtgatctgctgctgtcggtggagggggtagaagccctgcacagcctgcatatctgggcactgacggtggcccagcctgttctgtctgtccacatcgccattgctcagaatacagacgcccaggctgtgctgaagacagccagcagccgcctccaagggaagttccacttccacaccgtgaccatccagatcgaggactactcggaggacatgaaggactgtcaggcatgccagggcccctcagactgactgctcagccaggcaccaactggggcatgaacaggacctgcaggtggctggactgagtgtcccccaggcccagccaggactttgcctaccccagctgtgttataaaccaggtccccctcctgacctctgccccactccaggaatggagctcttcccagcctcccatctgactacagccagggtggggactcagcgggtataaagctagtgtgaccctgctcttccagctcctgggccagctctggaagggctgtatttgggcctaatcctcagcaactgttctaccactcgcaggggcaaaggtggtgagccacgggacgtccaaggggaggctggccccagcgcgcccatactgcctgcctcatgccccattctcagcctggctggcctttgcctttatgaatctgagcccctccatctgcctatagcaataggcacgggggtgaggaccctcacactctcatttgagcctccctgaggcagggagccaggaggcacctgaggcctatctgtgccttagtcacttcagctatgagccaaatgttccctttcctggaggggagaggcttcttactaggtaagagacaggtttcctctttccttatttcctcagctgtgccaacacaaaaaacaactttggcacaggtggtgggcagggggtagagagatttcagcttgggttctgcactaacagcctccaagccccctggcacttctgttgccctgagagtgtcccaggggattcagagtctccagaaagatatggctgggccaactctgttgcctacctggcctgacccagtcggagcctgacatggtggagggaaagggagacaagtggggctgcactcggtccagaggccagctaggagggaaaccgcagcttcctggggcttgtgtgtgaagattcctgacttaggggtggcttttgtttacaagatgcaagaggggaaacctgtccccgactcatcgagacaacatgcccagttatcagggagtcctgtgtcacaaggtctgtctctgccattgtaagcaagtgccttgggcgagctggcctctgccccacagtctcatctgtacaccgacagggttgatgcctccctcacagggttgagaacaagagccagttggccaagtacctgtggttgttgaagattggttacttttaccatcctggggacagggaactctgtggcccgaggctgcctcactgaggagtcaggtgggcttcccagcctccccaggggcagtgctgagtttgtcttgactgttctggcccgaggtgggaggaggtgggtttggtcacttgcctcccactttaaatctctgtctttccatctgtgaaatgacctctttgtgccttcccagcactgtcatcctgatcgcctgtgttctaggtagatgggtccttcagcccctccaggtctgtgaaaagtctgtggaaagcactggcctggagaggggtggggggttgctggtgggtgctccattccaccacaatctcaggggactcaacctcccctacccaactccccacccccacccaagccatggcaggccccaggaacttgatcctgggctttgccgtatgccaagtccttacacccctctcaagagacagtcattggctgggcacggtggctcatgcctgcaatcccagcaccttgggaggctgaggcaggcagatgacttgaggccaggagttcgagaccagcctggccaatatggcgaaacctcatttctactaaaaatacaaaaactagccaggcgtggtggcttgtgcctgtaatcccagctactcgggaggctgaggcaggagaatcgcttgaaccggggaggcagaggttgcagtgagctgagatcacaccactgcactccagcctgggcgacagagcaagactccagctt

SEQ ID NO: 15543 - protein, 147 aa, Homo sapiens
MTSLCLPSTVILIACVLGRWVLQPLQVCEKSVESTGLERGGGLLVGAPFHHNLRGLNLPYPTPHPHPSHGRPQELDPGLCRMPSPYTPLKRQSLAGHGGSCLQSQHLGRLRQADDLRPGVRDQPGQYGETSFLLKIQKLARRGGLCL

SEQ ID NO: 15544 - DNA, 2210 bp, Homo sapiens
ttccgctgctccaggtcccaggctcagccagagcaaaggctgtggaagggggtgttccaagcaccatcagtgtttccccaccatcacccagacccaagtgcagggactgaccttcccggtttgccaagtactgtcccagttttagcactgaaagtcccacatctcaggaaacccttcagtcctgcgtaagcaaggacaactggtgaccccagatcgaagctgtgcaattaggaaggggactcctctcagcccctggccagtgcttagctgctttggagatgagactcgtctcctgaatctgagaagtacagtcatttgctgcaggaatcaactcgtcccctagatatcggttcccttattcaacaactgtggcctgctataggagtcaatttcttgttacctttggtcaggggaataagacttacttttgagtttttcatggttttccccagtcttccccgcccgccccaccaagcttcccctctctaagtgcaacagaagcctcctcttagagggaaggcttccctggtctctatctcactgctcttttcccagaggagtgagctttagaatcacaaaagggcttgcacccagggctcttcctggtcctgcccccagttctctgaagtcagccccctcctcccatctcagcccctgagagagggtggtcagaggtcaggacttcttgctccttcatctgaaaacttgtgaccatgccagttgcaccctcctgtgccctcttcccttggctaactcacagcaacggcctttgggggtccacacgggggtcagaagagggctgcacatggagggggccctttccaaagtccttgtttgaggccccagcatttctatgtatgcacctgctctaaggtgtttccaaaaattaatgggcaacacccccaggtgcacagtcaggctccctttggtgtgtcccggaggccagcctccctggagctccatggcttctcaccggcacctgtgtgaggacgacatcccgcctttgtcccctgagcccacacctgctccccagagtcactgttgagtgcctgtgagcagcttctcagtgcacatcccatcagtaacaggcgcaacagcctcaacagctcagtgggttcccagcgatccacaatttcttcacgatagcttccttttctgtagaaagcagaacccagaacactcccctgggagattctgctgctagtcaggaagtaaaatgtgttcccatttctcgttctcatagtttgctcagcaggaaatcacctccagtcagagcagtgataaatcagaacacaaacaagcaaaggcagcacttgcctactttgggtcacaacacaggagcttcccctgcccatgagttgagtgggcctttcttctagctactggccttggcttccccagtactcgcaagtgtccaagttccctctgacttgcaccacagccaccacgtgttccttccactgtgagttaggagaggcttccagggagaggacttcatgtggctgggaaggacactgtgttaaccgggatgtcgggccccctgagctcagattctgtccttgtttgtggctgtgttgctgtgcctgggaaagtgtctcacacatgagtttggtagatggagcctcttgagctttcaccctcaagtagcacaagtggttcctgaggaggaggtgtgatcgccttcctgagcggtcatgcaaatgctgggtcggagcagaattgctggagtcagaggagaggctgcggggtggggatgggaggaaccgggaaaggaggcctgttgactggggaggtgggaaggggctgtggagagcaggctcatctgatgaggatgaggggttgatactgaggtgccatgtaagttctcacttcatttctcccacaaatcctccagtgccatgccccttgctcacagatgctctgatgtgaacaggttttatagtggaaaaggtcccaggccagaactgaggctgtctttgaggacaacgtatgatgaacacagtactgtttcctcttcctttttttcacttgaggtgaaattcacttaacataaaattaaccatttcaaaatgaacagtttgctaggctgggcacagtggcttatgcccataatcccagcactttgggaggccaaagtgagaggactgcttgaagcgaagagttcaagaccagcctgggcaatatagtgagactccccatctctacagaat

SEQ ID NO: 15545 - DNA, 1415 bp, Homo sapiens
  CDS (209)..(1075)
agcagtcagccggccggagacagagacttcacgactcccagtctcctcctcgccgcggccgccgcctcctccttctctcctcctcctcttcctcctcctccctcgctcccacagccatgtctgcttagaccagagcagccccacagccaactagggcagctgccgccgccacaacagcaaggacagccgctgccgccgcccgtgagcgatgacaggagtgtttgacagaagggtccccagcatccgatccggcgacttccaagctccgttccagacgtccgcagctatgcaccatccgtctcaggaatcgccaactttgcccgagtcttcagctaccgattctgactactacagccctacggggggagccccgcacggctactgctctcctacctcggcttcctatggcaaagctctcaacccctaccagtatcagtatcacggcgtgaacggctccgccgggagctacccagccaaagcttatgccgactatagctacgctagctcctaccaccagtacggcggcgcctacaaccgcgtcccaagcgccaccaaccagccagagaaagaagtgaccgagcccgaggtgagaatggtgaatggcaaaccaaagaaagttcgtaaacccaggactatttattccagctttcagctggccgcattacagagaaggtttcagaagactcagtacctcgccttgccggaacgcgccgagctggccgcctcgctgggattgacacaaacacaggtgaaaatctggtttcagaacaaaagatccaagatcaagaagatcatgaaaaacggggagatgcccccggagcacagtcccagctccagcgacccaatggcgtgtaactcgccgcagtctccagcggtgtgggagccccagggctcgtcccgctcgctcagccaccaccctcatgcccaccctccgacctccaaccagtccccagcgtccagctacctggagaactctgcatcctggtacacaagtgcagccagctcaatcaattcccacctgccgccgccgggctccttacagcacccgctggcgctggcctccgggacactctattagatgggctgctctctcttactctcttttttgggactactgtgttttgctgttctagaaaatcataaagaaaggaattcatatggggaagttcggaaaactgaaaaagattcatgtgtaaagcttttttttgcatgtaagttattgcatttcaaaagacccccccctttttttacagaggactttttttgcgcaactgtggacactttcaatggtgccttgaaatctatgacctcaacttttcaaaagacttttttcaatgttattttagccatgtaaataagtgtagatagaggaattaaactgtatattctggataaataaaattatttcgaccatg

SEQ ID NO: 15546 - protein, 289 aa, Homo sapiens
MTGVFDRRVPSIRSGDFQAPFQTSAAMHHPSQESPTLPESSATDSDYYSPTGGAPHGYCSPTSASYGKALNPYQYQYHGVNGSAGSYPAKAYADYSYASSYHQYGGAYNRVPSATNQPEKEVTEPEVRMVNGKPKKVRKPRTIYSSFQLAALQRRFQKTQYLALPERAELAASLGLTQTQVKIWFQNKRSKIKKIMKNGEMPPEHSPSSSDPMACNSPQSPAVWEPQGSSRSLSHHPHAHPPTSNQSPASSYLENSASWYTSAASSINSHLPPPGSLQHPLALASGTLY

SEQ ID NO: 15547 - DNA, 1881 bp, Homo sapiens
tctctactaaaaatacaaaaaaattagctgggcgtggtggcacgcgcctgtagtcccagctacttgggaggctgaggcaggagaatagcttgaacccaggaagcggaggttgcagtgagccgaggtcatgccactgcactccagcatgggcaatagagcgagactctgtccccccggaaaaaaagaacaagggctaaattcaaatcaaattttccctgtaccctaagaaaaataattaggccgggagatgtttgactaagtgagtaggcattgttctgtgacggtctgagccccagacctttcctctggatgaatgctgtcccaggtaatgaaatgacttcacttattaatatataggtacacagagttcaggtagatgtggaatgaatggggactcgccccgtctgcccttgaatgtatttagtggtttatgtgaaatgtacctttcaaagttgtctgtatgtttcatactctgggggtgggaatataaatcattgcagcctttttgtagggcactttggcagtactcatcaaaatatgcgatgtgcagatgcttagccagcaactccgcttctatgaatctagccaacagaaatacttgtagaagtgtgcagctataaatgtccacagaggctcagagcctcattgtttttaatagtgaacagttggaaaccaaatagatgtctgtcagtagggatgtggcagaattgtggcatgtttatatgggtatagaaagtatggaggaacatagacccaactgttggtaagagttatctctggatgcaggaataggtaggggttgatgggtacagggtctctactttgcataattttggggccactgttcacatagaacatttgcgatggagtggtgctcctcgattcgtttaatggagagggtttggatgtgcttttgctttttatttaacacatgggtatattacttttctctttctgcaaagagcacttattaattttatagttttttaaattggctttgcccgcttcagtagtcacaggtagctacctgaccgagaagccgacttgggaattactgttactcgtgggtgatactgtcataaaggggttgaaagtacctgttagctgtgtatgtcagaattgattaaagagaaccaactattcttgtgcaagggatggtattgtagttaattatgacatttggagaaactaatttctgtctgtcgacactatctctgttccatttagacttagagacttacatgggcaatgcttgactttttgcattcagcacagaaagttaagtaatccactgtggtaaaatattaactaaatttatatgacttcttgactgctgtaagtagagaatatttatcatataagcaccattttcctgaattttttgttactacatattttatcttactgtcactattgtgtaaaatctttgaaaggaaaatgaatactgtgtaatagttaaacccattcataggttgcaatagagtgtcagccaaatgtgtcatacatcaaatcttcagcagcttttgcataatccaggagaattgaataatagttgaagttaattttgccagtgaaatgtagggaaagaaaaatgtttgaaatttaaattattcagatagctaaattcttaatcctaaaatttaaaccccttaattctgtctgtagtgttatatcaagactttttgatagtcatgaaactgagtaaaactttattcagattacttaaaaacagcttttcctgtggttaataacacctttattttgaacagagtactcttaagcaacttatattgtgctgattaaagatttaatctgtgcatattttttaccctgttgtttatttagttttgataactgtgaaataaaccataattaaatcac

SEQ ID NO: 15548 - DNA, 1731 bp, Homo sapiens
  CDS (36)..(1223)
aaaacaactacggctgcggtgtggttggtggtgagatgacgaccttagtgctggataatggagcttacaacgccaaaatcggttacagccatgaaaatgtgtcggttattcctaattgtcagttccggtcaaaaacagcacgtcttaaaacttttactgccaaccagatagatgaaataaaagacccttctggactcttttacatcctcccttttcaaaagggctacttggtgaattgggatgttcagagacaagtttgggattacctttttggaaaagaaatgtatcaggttgattttttagatactaatattattatcactgaaccatactttaacttcacttcaattcaagaatcaatgaatgaaattctatttgaagaataccagtttcaagcagtattaagagtaaatgctggggctctcagtgcacataggtatttccgagataatccttccgaattatgctgtatcattgttgatagtggatattcctttacacatatagttccttattgtagaagtaaaaagaaaaaagaagcaattattcggataaatgtgggaggaaaactcttaaccaatcatctaaaggagatcatatcttacaggcagctacatgttatggatgaaacacatgtgattaatcaagtgaaagaagatgtatgctatgtgtctcaggatttttatagagacatggatattgcaaagttgaaaggagaagaaaatacagtaatgatagactatgtcttgcctgacttcagtacaattaaaaagggcttttgtaagccaagggaagagatggtgttgagtggaaaatacaaatctggggaacaaattcttcgtttggccaatgagagatttgctgttccggaaatactctttaatccttctgatataggcattcaagaaatgggaattccagaagctattgtctattcaattcaaaatctacctgaagaaatgcagccgcatttttttaagaacattgtcttgacaggaggaaattcccttttcccaggatttagggatcgggtttactcagaagttcgatgtcttactccaacagattatgatgtttctgttgtgctgcctgaaaaccctattacttatgcctgggaaggtggaaaattgatatcagagaatgatgattttgaagatatggtggtaacaagagaagattacgaagaaaatggacatagcgtctgtgaagagaaatttgatatttaagcaacatttttgaatgaaagttgtgaccataaggtttaatttcaaagttccttttaaaagaggttaaggaactgtgttaccttttgtcctaagaaaaaggcttgaatttatgtaaatactttgatcgattgctaattttcaaaggcttcttaggtaggttactacagtaaactgtaactcagtccacattttcatttaggagctagactaccataacaatgcttatgctgtttccaagggtaggttatttttcattaaaagaagaatgaatgcattttaagtttaattcttcatagctgaaagcacaaatttaacggcttcactggacagttttccttagaaggtagttttgtgtgactgtgactaaactattttattttaaaatgtcattcttatttatacattctaaagttggaaagactgatcttatatgtgtataatgtttattttgtacctagagtacatttaaaagggtggagactaagctaataaagtttttttggcc

SEQ ID NO: 15549 - protein, 396 aa, Homo sapiens
MTTLVLDNGAYNAKIGYSHENVSVIPNCQFRSKTARLKTFTANQIDEIKDPSGLFYILPFQKGYLVNWDVQRQVWDYLFGKEMYQVDFLDTNIIITEPYFNFTSIQESMNEILFEEYQFQAVLRVNAGALSAHRYFRDNPSELCCIIVDSGYSFTHIVPYCRSKKKKEAIIRINVGGKLLTNHLKEIISYRQLHVMDETHVINQVKEDVCYVSQDFYRDMDIAKLKGEENTVMIDYVLPDFSTIKKGFCKPREEMVLSGKYKSGEQILRLANERFAVPEILFNPSDIGIQEMGIPEAIVYSIQNLPEEMQPHFFKNIVLTGGNSLFPGFRDRVYSEVRCLTPTDYDVSVVLPENPITYAWEGGKLISENDDFEDMVVTREDYEENGHSVCEEKFDI

SEQ ID NO: 15550 - DNA, 1518 bp, Homo sapiens
tttaattgatgctaaccatagtgatgggagatccttgcttatacaggagaacataatttattatcttattttaaaataaacattacactaaaaccccacatcatttcaagaaatgtgggcaatagtagttattttattattatacgtaacttttaaaaataacaagatagacaaaatgtttgagctacatgcacatgaaaagtgaaatttacaaaaagcttaagaaatggatccaaaagtatatttaagcacttcctctgaaaccctcataactaacaaaatatgaaaaaacaataaatgtggtttataaaccagaaagcctaaaaaatctcttctaatgctatttttattaaaaatgtttactcattaatattttaattggaactttgcatcatctcaggtagaacgtgagtctcctgtcactatatttaaacaagaatgtcctaaaagattgtctattttctgaaaatagcctctgctttcccaatggttgttgcttgcttactaaagaaatatgtaaatctttgatttaagcttttattacacagtgattccattctgccactgtgacaaaaagtatctgattgctgatcaaattctctatattcgtttcacctttcccccactctctgttaggttctgagctcatgcccaaagcactgtccaccaggatagtgggaggcatttggtggtttttcacacttatcatcatttcttcgtatactgctaacttagccgcctttctgacagtggaacgcatggaatcccctattgactctgctgatgatttagctaaacaaaccaagatagaatatggagcagtagaggatggtgcaaccatgacttttttcaagaagaagaaaaaaaaagaatgaggaggaataagaagaggaggaggaaggaaagaagaacagaaacacaaaatcttactgtgtcattacatgacctatgattaatctcttccatcttatttacattttggataaataggtgactctattttctcaaagtaaaaaggaagatatatttacttacttgccaattatcttattgaagtgttaaagttttatttttctctggattattttaagatgtacttactattaattcattttattgaaagttgacatggtaaactatatttccaggactatagaagattcaaagatgataaaatatgtatggccttttcttcacaggctttaaaatctaatgacaatttcataagcaaccataaatttgaacatttttgatatctgtaacaatatagtactttatgtaaatggttatagcaaaaataatgccatagttctatgaggaaagaaattttaaaattcctgattcttctcctttagaaatatgtacatatttatctatctatgcatagatactatttcttgaaatatagttaaatctattatacttccatcatattaggctatatatgcatgcttctatatatatattaatatatatgttaacatacagaataaaaataaatatatatgttctactagc

SEQ ID NO: 15551 - DNA, 1088 bp, Homo sapiens
atcatatgatatctagtccacattagatgttccccaaaatatttgtttttgaaccaggattcagtcaaggctcgtgcatttcatttagttatatttctttagtctcttaatgtaaaactttccacctattatttttcccctgtgtcattgactttctaaagagaccaggcctgttctaccaggatttttaaaagggtgacattgccagagggaagttaatgtttctctgaaggtatatgtgcgtttgtatatgtaagtcgatgtggtagctaatactgttcttaaacatttataaaaataagttttggcattaagtactagagcatatattgtgtaaatgtttccgccagccaatgtggctgatatctgttttaaaggtctcatttaaaatttagtgtttttagtataagttactttttggggacataaatatgcatatgatttgtttaaaaatttggattgtaaataaaggtttatctacctatgtgattcagttaaatttttagtgttagtggtgtgaattttgtgacactgggagaaagtttgcatatcaggtatgaccttagaaagtaacaaatagatttgtgcattacatcaagcatgtggaatgatagatttgtccttctgttcatgagaggtcatttacaaatttataaggagctaaactgactaagtacttggaaatctgtacttgtaagctaatcacatttacccaaacctgatttagaaatatagaggtgcttttaggaattgtttgaattttaaaaaatcatctccatttcaaatacaacttatgaattttgatatcctgttgtataatactagaaatatagagatgcagtatgcttcgtgtctttctaggaaattcagttcatgaagataagaagtttcttgacaaatacatgccccagttcatgaaacatcttcattatagaataattgatgtgagcactgttaaagaactgtgcagacgctggtatccagaagaatatgaatttgcaccaaagaaggctgcttctcatagggcacttgatgacattagtgaaagcatcaaagagcttcagttttaccgaaataacatcttcaag

SEQ ID NO: 15552 - DNA, 1753 bp, Homo sapiens
  CDS (35)..(1096)
ttcaaagaaagatgtcaccacaaaattaaaagctatgcaggaatttggaaccatgtgtacagagagagacacagaaactgtgaaaggagttcttccatattggccaagaattttttgcaaaatttcacttgatcatgaccgtcgcgtccgagaagccacacaacaagcttttgaaaaacttatccttaaagtaaagaaacagttggctccctacttaaaaagtttaatgggagattggctaatggctcagtgtgatacttacacaccagctgcgtttgcagcaaaagatgcatttgaagcggcttttcctccaagcaagcaacctgaagccatagcattttgtaaggatgaaattacaagtgtgctgcaggatcatcttataaaagaaacacctgatacactcagtgacccgcaaactgttccagaggaagaaagagaagctaaattctaccgggttgtaacttgttccttattggcattaaagagattactttgccttttacctgataatgagcttgattctctggaggagaaatttaagtctcttttatcacagaataagttttggaagtatggaaaacacagtgtacctcagattcgctcagcttattttgagttagtctctgcattgtgccagcgcattccacagttgatgaaagaggaagcatccaaagtgagcccatcagttctacttagcattgatgacagtgacccaattgtctgcccagctctctgggaagctgtactctatacacttacaactattgaggactgttggcttcatgtaaatgcaaaaaagagtgtgtttcccaagctgtcaactgtgattcgtgaaggtggtcggggtctagctactgtcatatatccttaccttctgccattcatcagcaagctccctcattccatcacaaatccaaagttggatttcttcaaaaatttcctcacgtctctagttgctgggctgtcaacagagagaactaaaaccagctcttcagagtcctcggcagtaatatctgctttttttgaatgcttacgttttataatgcagcaaaacttaggtgaggaagagattgaacagatgctcgtcaatgatcagtaatcaacacagaagacttctgtgaccaaatatgtggagatttctcccacccagcaagcagtcagttctgcagcagataccagctatgtgtcctccaattcaattctgactatctacctggagatagtgtcagatctcactggcttaggactcagtcccacaagaccgctccccacttctgatgccaatcgcaagccccaggctgttttacctgggcttctgaccaaccagctgtacatctaaatcagggatcccatgaccccctcctggggtttgcttaatttgctagactgtctcacagaactcagagaaacaatttaccagtttactataaatgatattacaaaggatacaaatgaagacatgcacacgttgatcccttttattgatgcagttctcaaagacccaggattgcaacatgggcagctatttaaccatttagcagaaactctaagttcctgggaagccaaagcagacacggaaaaagatgaaaaaacagctcacaacttggagaacgtactgatacatttctgagaaagactgtcagagatctgtgttgcgaaaatcagtgagccggaagctgatgttgagtccgttttgggtgtatctaacctattacaggtgcttcagaagccgaagagctcattgaagtcaagt

SEQ ID NO: 15553 - protein, 354 aa, Homo sapiens [sequence omitted]

SEQ ID NO: 15554 - DNA, 2571 bp, Homo sapiens
  CDS (277)..(1680)
agaagctttttcatttattcgtccagcagcatcttgtactagtcctgactggaaatttatcagtggtgtggttcctcgtgcaacaaatatgaacgtctgaaggcaaaccaggtagctactggcattcggtacaatgaaaggaaaggaaggtctgaactaattgtcgtggaagaaggaagtgaaccctcagaacttataaaggtcttaggggaaaagccagagcttccagatggaggtgatgatgatgacattatagcagacataagtaacaggaaaatggctaaactatacatggtttcagatgcaagtggctccatgagagtgactgtggtggcagaagaaaaccccttctcaatggcaatgctgctgtctgaagaatgctttattttggaccacggggctgccaaacaaattttcgtatggaaaggtaaagatgctaatccccaagagaggaaggctgcaatgaagacagctgaagaatttctacagcaaatgaattattccaagaatacccaaattcaagttcttccagaaggaggtgaaacaccaatcttcaaacagttttttaaggactggagagataaagatcagagtgatggcttcgggaaagtttatgtcacagagaaagtggctcaaataaaacaaattccctttgatgcctcaaaattacacagttctccgcagatggcagcccagcacaatatggtggatgatggttctggcaaagtggagatttggcgtgtagaaaacaatggtaggatccaagttgaccaaaactcatatggtgaattctatggtggtgactgctacatcatactctacacctatcccagaggacagattatctacacgtggcaaggagcaaatgccacacgagatgagctgacaacatctgcgttcctgactgttcagttggatcggtcccttggaggacaggctgtgcagatccgagtctcccaaggcaaagagcctgttcacctactgagtttgttcaaagacaaaccgctcattatttacaagaatggaacatcaaagaaaggaggtcaggcacctgctccccctacacgcctctttcaagtccggagaaacctggcatctatcaccagaattgtggaggttgatgttgatgcaaattcactgaattctaacgatgtttttgtcctgaaactgccacaaaatagtggctacatctgggtaggaaaaggtgctagccaggaggaggagaaaggagcagagtatgtagcaagtgtcctaaagtgcaaaaccttaaggatccaagaaggcgaggagccagaggagttctggaattcccttggagggaaaaaagactaccagacctcaccactactggaaacccaggctgaagaccatccacctcggctttacggctgctctaacaaaactggaagatttgttattgaagagattccaggagagttcacccaggatgatttagctgaagatgatgtcatgttactagatgcttgggaacagatatttatttggattggcaaagatgctaatgaagttgagaaaaaagaatctctgaagtctgccaaaatgtaccttgagacagacccttctggaagagacaagaggacaccaattgtcatcataaaacagggccatgagccacccacattcacaggctggttcctgggctgggattccagcaagtggtaaattggtatttgtaaaaagcaaacaaacattacaaggcagttatctcattgctgttttgggagaggaacgggaaaagctttttgcttatttgtcttttgaaaattaaggctgggcgcggtggctcacacctgtaatcccagcactttgagaggatgaggtaggcggatcactggggtcaggatttcgagaccagcctggccaacatggcgaaacctcgcctctactaaaaatacaaaaaaattagctgcgcgtggtggtgcacgcctgtagtccctgctacttggaaggctgagacaggaaaattgcttgaacccaggaggctgaggttgcagtgagccaggattgcgccaccacactccagcctgggcaacagagactctgtctcaaaaaaaaaaaaaaaaaaaaattaacctcaaccaaacgcctattttttaatgcttagttttggcttgaaattcttcttcacctggagttttcttacgttaatacattaaaataacctgaaggaaactttcgttatgggccaatattagctcttatggaaactgatttatatcttttttatgacctttcaaaagtaaaatactatgcataatctagaaagatttgtcagataggaaattttataatgcattagccattagtcagagttgttttttaacatgccagagaaaaagttgtaatgccttggaagttattctcttttctatagattgtgttcaaaagatgtgtatacttgcaataaggtttatgttaaggtggctttaacaattggttgctattttccttctttagtcaatatgactttgatgtcattaactgctaagtgttattttctaagaggaattttatcttttttttaaccttattaaaagcctttgaaaacac

SEQ ID NO: 15555 - protein, 468 aa, Homo sapiens
MAKLYMVSDASGSMRVTVVAEENPFSMAMLLSEECFILDHGAAKQIFVWKGKDANPQERKAAMKTAEEFLQQMNYSKNTQIQVLPEGGETPIFKQFFKDWRDKDQSDGFGKVYVTEKVAQIKQIPFDASKLHSSPQMAAQHNMVDDGSGKVEIWRVENNGRIQVDQNSYGEFYGGDCYIILYTYPRGQIIYTWQGANATRDELTTSAFLTVQLDRSLGGQAVQIRVSQGKEPVHLLSLFKDKPLIIYKNGTSKKGGQAPAPPTRLFQVRRNLASITRIVEVDVDANSLNSNDVFVLKLPQNSGYIWVGKGASQEEEKGAEYVASVLKCKTLRIQEGEEPEEFWNSLGGKKDYQTSPLLETQAEDHPPRLYGCSNKTGRFVIEEIPGEFTQDDLAEDDVMLLDAWEQIFIWIGKDANEVEKKESLKSAKMYLETDPSGRDKRTPIVIIKQGHEPPTFTGWFLGWDSSKW

SEQ ID NO: 15556 - DNA, 1372 bp, Homo sapiens
aaatacaggttgacaagtgctaagagagaagtcagaggctgtgggaacagagaggaggagtatctaaccagcctggagtatctggaagacttcctgaaggaggagaaaacacctgggctaaatcttaaaggaagaccagaagctacccagggaaagaagtgaaggaaggcattataaacagagaggccaggagattccagcctcagcattcccagagaaggcccaggatctccctgagaggcccagttggtgtttgtggaatcatcgctcctctggtgatcacgcagtttgcctcactttctccatggagctctttgctaaaggacattctcctccagctgtgaaggaaaagcccaacaaaaggcagggtactttgttctaactgaggatgtctactgacacagccaagctgtaaagcagaccacggacggcagtgcagcggggagaacaactctacatctggttggaggtggagtaatgtccagtctgggcacagagagatggcaggtgtgcagctgcactcagcatgggatagagcaccacctgccaggccagaacagaaagaagggcgacggagactggcagagaaacagcaattactgctcagtgagaagtaaacagcgtctgcttccagaggctttacggaccagaaagcccacaggaaatagctcctgcttcccagcctggaggtcctcatgcactagccctccctgctgcaattttgatggtttttcgcatatttacagaattgtgcaaccatcaccatgatcagtcttagaagagttaatcacccctgaccccagaaaactctgtattcattagcagtcactccctttcccctttccacccctctccaacattaggcaaccactaatctactctctgtctccataaactggtctattttggacatttcacataagcctccctggatcccagtttaagcatcctggggtttgtctgcctgccagagccatggtgccactggggctacctgtcctgtgggatgacaaggcaggtccaaacctttgcctgctctcccatccattccttttgtgttagtccatgtgtctcccgactgttctctccaacaacaacacagactgacaaaacctactgacttggagtcaggaacagactttgctattttctggctgtgtgatcctgatgagtcccttgaacctcctggacttgttcctcagcctaaaaaccaagactaataaatcaagtctatctcacagccttacgtggggatcaaaaaacatggagcatgtgaacacacattgtacatcacgaagctgtgtgcaaataaatatcgtgtaactccagccctttttgagtttataaataaaagtgaaaacctcataactct

SEQ ID NO: 15557 - DNA, 1440 bp, Homo sapiens
gtgatcctggtgttgatggaagggacccccaagggcgttgacttcacagctgttcgtgatctgctgctgtcggtggagggggtagaagccctgcacagcctgcatatctgggcactgacggtggcccagcctgttctgtctgtccacatcgccattgctcagaatacagacgcccaggctgtgctgaagacagccagcagccgcctccaagggaagttccacttccacaccgtgaccatccagatcgaggactactcggaggacatgaaggactgtcaggcatgccagggcccctcagactgactgctcagccaggcaccaactggggcatgaacaggacctgcaggtggctggactgagtgtcccccaggcccagccaggactttgcctaccccagctgtgttataaaccaggtccccctcctgacctctgccccactccaggaatggagctcttcccagcctcccatctgactacagccagggtggggactcagcgggtataaagctagtgtgaccctgctcttccagctcctgggccagctctggaagggctgtatttgggcctaatcctcagcaactgttctgccactcgcaggggcaaaggtggtgagccacgggacgtccaaggggaggctggccccagcgcgcccatactgcctgcctcatgccccattctcagcctggctggcctttgcctttatgaatctgagcccctccatctgcctatagcaataggcacgggggtgaggaccctcacactctcatttgagcctccctgaggcagggagccaggaggcacctgaggcctatctgtgccttagtcacttcagctatgagccaaatgttccctttcctggaggggagaggcttcttactaggtaagagacaggtttcctctttccttatttcctcagctgtgccaacacaaaaaacaactttggcacaggtggtgggcagggggtagagagatttcagcttgggttctgcactaacagcctccaagccccctggcacttctgttgccctgagagtgtcccaggggattcagagtctccagaaagatatggctgggccaactctgttgcctacctggcctgacccagtcggagcctgacatggtggagggaaagggagacaagtggggctgcactcggtccagaggccagctaggagggaaaccgcagcttcctggggcttgtgtgtgaagattcctgacttaggggtggcttttgtttacaagatgcaagaggggaaacctgtccccgactcatcgagacaacatgcccagttatcagggagtcctgtgtcacaaggtctgtctctgccattgtaagcaagtgccttgggcgagctggcctctgccccacagtctcatctgtacaccgacagggttgatgcctccctcacagggttgagaacaagagccagttggccaagt

SEQ ID NO: 15558 - DNA, 1880 bp, Homo sapiens
  CDS (256)..(807)
tcagtggccatcgcctgccggcagctgcaacagcagagcaaggccagcaagatcctcattgtagactgggacgtgcaccatggcaacggcacccagcaaaccttctaccaagaccccagtgtgctctacatctccctgcatcgccatgacgacggcaacttcttcccggggagtggggctgtggatgaggtaggggctggcagcggtgagggcttcaatgtcaatgtggcctgggctggaggtctggacccccccatgggggatcctgagtacctggctactttcaggatagtcgtgatgcccatcgcccgagagttctctccagacctagtcctggtgtctgctggatttgatgctgctgagggtcacccggccccactgggtggctaccatgtttctgccaaatgttttggatacatgacgcagcaactgatgaacctggcaggaggcgcagtggtgctggccttggagggtggccatgacctcacagccatctgtgacgcctctgaggcctgtgtggctgctcttctgggtaacagggtggatcccctttcagaagaaggctggaaacagaaacccaacctcaatgccatccgctctctggaggccgtgatccgggtgcacagtaaatactggggctgcatgcagcgcctggcctcctgtccagactcctgggtgcctagagtgccaggggctgacaaagaagaagtggaggcagtgaccgcactggcgtccctctctgtgggcatcctggctgaagataggccctcggagcagctggtggaggaggaagaacctatgaatctctaaggctctggaaccatctgcccgcccaccatgcccttgggacctggttctcttctaacccctggcaatagcccccattcctgggtctttagagatcctgtgggcaagtagttggaaccagagaacagcctgcctgctttgacagttatcccagggagcgtgagaaaatccctgggtctagaatgggaactggagaggaccctgagaggagacgggctgggcggcgacccccacagggctctcgagaacagactctcccctccagtatgggccctggctgtggcccccattcctcaggactgcacagaggaggactggctccggctccgtcgggctcacccttaaccactattcctggctctgcaaaccccagactttgcacacagccccaggctccacacagaaatgtgaacttggcctcagacaggctggcccttcctaggctctaggggctaggggggagtggggagccaagaggtcccatattcctgagtgcaggggtagtccctctcacctgcttcctcagacgactctggaagcttccctctaccaccgggcactgggacgaagctccctgacagccgagactggcagccctccatctggtccgtaccctcgccagaggcccccctacatcaacctcctggcgatgccctggtggagcagatgggtgctctgggagtcctgtgcttcctgatccaatggtgccaaacccttcatctcccccagaagcgcagcatacccctgggacccctcggccactgcccactcggggagccttctctgtttctggggcctcccccaccatagctctgattcccaccccacataggaatagcctgactgagggggaaggggtgggagagaagatacagacatggaggaggggaggctgctctggcaaagtcttcaaggcttttgggggtccaggcctggggtcaagaaggaaaatgtgtgtgagcatgtgtgtgagtgaggcgtgtgtgtgagcgtgtgtgtgagtgaggcgtgtgtgtgtgtctttcctaggacccaccataccctgtgtatgtatgcatgtttttgtaaaaagg

SEQ ID NO: 15559 - protein, 184 aa, Homo sapiens [sequence omitted]

SEQ ID NO: 15560 - DNA, 1814 bp, Homo sapiens
aatatagttatcttcttaaaaaccattataacaattcagagagagttctttacaaagccatgaatatgaactatggggaatcatggttcttttaaagcaattttcaaaataagtaccaattaaagctttaggttccaagaagattctgggactcaggaagaaaaagtgccatcaggtgaccagctgttgcatttcttgcttattctgttttgtttttgcacatcataatggatttttcttagtgccctaattgtgaagggtttctctagctttggttatgtgtaatgttcacgtgacctttttttgtcaatcgtttttggaatttttctttctttctgtgctttattactaataagtccaatgagtgagtagtagctagatgactagtatgtagttttatattttggtaaaattatttgccctttcagaaatgcctcatctaaagatacatgataattttggagttggagggggccttagaggctctccagctctgcttcttgcccattgccaaatactgaaatggaagcccgtcttacctggggtcactaactggttggttaactgagctaagaataggctgtgggtctcctcacttgtggcccagtgctctttctgctatacaaaatgtctaatctcagatttttcttctgctgcttgactgcttcatctggatgaactacaaaaaacccatgattaaggtttatgaattcaagtaataattagattttttttgcacagacttacttaacttccttattggatatgtttgtaacacataaacacaaagcacttttcaaacatgatgcacttttatctttgtgaataatttactgtcctttcctcctgggatatgagaaacattttaaaaaacgtatttaacagaagagagcaaataaagatatatcaggaaggatgtattagttatttacttaaatgtttataatatctggattttttttgttttgttactcatagaactggtgttgtttgctgtttttatttctctaattgttgcagagttctgcctgttacaaagctacagaactgtattgtttttattttccttcttgagcacatgttaacaaactaagcttcacattagagtgatgtcataatgtaaaatgtttgcattgtggttaggtattgaagtttatgtcctgtctgtgtaaagattcatcttttattgtaaatatttagactttaccacagaaatattggaacagtttgctttataagattaaaaagcatccttcagaatggagcttgccttgtgcttagaaataatatgttgaactattttgcaatatactattttaaatctaaattctgtcacttcgctgccttcttaaaatagtgtggtatttcaaatattgctagagctattttcctgaaatacatttgcaaaataaggctgctttgtaatcaaggaatatttttattgattgaaggaaatgactgtactgcgattcaaaagtaaacttattttattatacagattatttcttaaaaactctatttataccttaacatgaaatccatgaccacaccaaacttggttattcataatttttcctgttaaatataaaacactgtaagttaaaaacagtaatgccaacattgaatttatttttgaggtcaaagaaccagttgttctttttatatttagatgaggatgattgagtccatatactatgtatgtttacatatactatacatgcacattaggtgttttcatttgtgttttgcttatgaaatgtcatttaaagttcacttcttgagcatcaataaaaagggaagctgtgtggttttgg

SEQ ID NO: 15561 - DNA, 1654 bp, Homo sapiens
  CDS (37)..(1017)
gagcgcctgccccatgcgccgccgcctctccgcacgatgttcccctcgcggaggaaagcggcgcagctgccctgggaggacggcaggtccgggttgctctccggcggcctccctcggaagtgttccgtcttccacctgttcgtggcctgcctctcgctgggcttcttctccctactctggctgcagctcagctgctctggggacgtggcccgggcagtcaggggacaagggcaggagacctcgggccctccccgcgcctgccccccagagccgccccctgagcactgggaagaagacgcatcctggggcccccaccgcctggcagtgctggtgcccttccgcgaacgcttcgaggagctcctggtcttcgtgccccacatgcgccgcttcctgagcaggaagaagatccggcaccacatctacgtgctcaaccaggtggaccacttcaggttcaaccgggcagcgctcatcaacgtgggcttcctggagagcagcaacagcacggactacattgccatgcacgacgttgacctgctccctctcaacgaggagctggactatggctttcctgaggctgggcccttccacgtggcctccccggagctccaccctctctaccactacaagacctatgtcggcggcatcctgctgctctccaagcagcactaccggctgtgcaatgggatgtccaaccgcttctggggctggggccgcgaggacgacgagttctaccggcgcattaagggagctgggctccagcttttccgcccctcgggaatcacaactgggtacaagacatttcgccacctgcacgacccagcctggcggaagagggaccagaagcgcatcgcagctcaaaaacaggagcagttcaaggtggacagggagggaggcctgaacactgtgaagtaccatgtggcttcccgcactgccctgtctgtgggcggggccccctgcactgtcctcaacatcatgttggactgtgacaagaccgccacaccctggtgcacattcagctgagctggatggacagtgaggaagcctgtacctacaggccatattgctcaggctcaggacaaggcctcaggtcgtgggcccagctctgacaggatgtggagtggccaggaccaagacagcaagctacgcaattgcagccacccggccgccaaggcaggcttgggctgggccaggacacgtggggtgcctgggacgctgcttgccatgcacagtgatcagagagaggctggggtgtgtcctgtccgggaccccccctgccttcctgctcaccctactctgacctccttcacgtgcccaggcctgtgggtagtggggagggctgaacaggacaacctctcatcacccccactcttgttccttcctgctgggctgcctcgtgcagagacacagtgtaggggccatgcagctggcgtaggtggcagttgggcctggtgagggttaggacttcagaaaccagagcacaagccccacagagggggaacagccagcaccgctctagctggttgttgccatgccggaatgtgggcctagtgttgccagatcttctgatttttcgaaagaaactagaatgctggattcttaagtgatatcttctgattttttaaatgatagcacctaaatgaaactttcaaaaagt

SEQ ID NO: 15562 - protein, 327 aa, Homo sapiens
MFPSRRKAAQLPWEDGRSGLLSGGLPRKCSVFHLFVACLSLGFFSLLWLQLSCSGDVARAVRGQGQETSGPPRACPPEPPPEHWEEDASWGPHRLAVLVPFRERFEELLVFVPHMRRFLSRKKIRHHIYVLNQVDHFRFNRAALINVGFLESSNSTDYIAMHDVDLLPLNEELDYGFPEAGPFHVASPELHPLYHYKTYVGGILLLSKQHYRLCNGMSNRFWGWGREDDEFYRRIKGAGLQLFRPSGITTGYKTFRHLHDPAWRKRDQKRIAAQKQEQFKVDREGGLNTVKYHVASRTALSVGGAPCTVLNIMLDCDKTATPWCTFS

SEQ ID NO: 15563 - DNA, 1794 bp, Homo sapiens
acagttgttgcaaagtgctcagcactaagggagccagcgcacagcacagccaggaaggcgagcgatcccagccagcccagccagcccagccagcccggaggtaaggaaacggtgctcgggcagcagctctgctcggaaagaaggcacggcttctgctcttaagccaagtggtcttttcaaaggccttctttaaaatcgctcagatgggtgcttttgagtctgcgggtctggtttctgaaaacccaggctgcacgcagctgcattgcaaagtgcttttgctaattcggagggcttcacctttctcttcagaaagcaaagggcagttttcttaagtcacttgcagaaggaaatttccatgtgtatttaggaatctggtgtttatttgctgtgtggctatttaagctccagtaagcaggggaactttgcaagaacacagactatccattctgcctgaccaatttggcatggggattagcttggcacccactgtttacctgttttgcttctagtatatcagtttggaaacagataaaattggcagtaaatacgtaattccagaatgatgaacactttattaagaggcatccttaaatggagcagaaaactgctgagaatctttgtgagtccaagatgtatttgaattcagtactttgggggatttaccagagtctgtaagtccggaagctataaacgtgaatgttaaacacagcccggtcttctcttctcttgatggcacgcttgctaatctaatttgagtattgttctcttagaaggtgttaagtccaacttcaattggggttgggggaagcacacacacaaatctactattttgcaatttaaatatactcttcaggtaaaatgtggattttgttcaattttgttggcatgtgcaaagattcaaggagtgactgagagaactttggagtgaggtcagggatgggtggttagccaagacttgtaacttccagggagaatgagaagttgtaaaagtcagactggctgtctctctttctctcttcctctttctttctttctttctttccttttgctcacaacaggattacttagtgtttcaaaagtgggagagagcctccttaaatggtttacagccctttgaatgtatttggtgcagtgacatcccctgaaacttcagtctgcaaagtctcaacatggtaactttgttcttttcttttttaaaggcagatgctgcttttagtgtccctttatttattccaggaaaaatgtggacatcagctaggcacgcctagcaaagaaagtggaggctgctggtttctgtgctttaactttccatagattttaaatggataaactgcttgcccttctttcatcagaatatgagctttccccagatggaaagtcttttctaaagcaaagttgcacatgggagctctagcttggaaacaatttgctcttttttccccagtctctgccataaacacttgaatgtgcacacaactgcagagcttaatgccacaacctccaggagattggggggaggggaaagctgcccaggatgggggtgggaaagcgaaggaagatggagaaatggctgcagtttgctgcccatcagcttttctcttttaaggggcagacattgcagacgtagttttaaaaaagttccataaagcatcgccaaggcagcatgcctgtgcgacacacgcagggctttgggggtgtgttttccccgtattaacagcaagtcgttgaagcgttgagaaggtattatgatttctaatcaggcccagaacaggccaagtataggctttctgaatg

SEQ ID NO: 15564 - DNA, 1712 bp, Homo sapiens
ttgaaaacatatattactctcgaggcttcctgtctcaagaaatagaccagaaggccaaattcttctctttcaatacatcagtttgcctccaagaatatactaaaaaaaggaaaattaattgctaaatacatttaaatagcctagcctcattatttactcatgatttcttgccaaatgtcatggcggtaaagaggctgtccacatctctaaaaaccctctgtaaattccacataatgcatctttcccaaaggaactatcaaagaatttggtatgaagcgcaactctcccaggggcttaaactgagcaaatcaaatatatactggtatatgtgtaaccatatacaaaaacctgttctagctgtatgatctagtctttacaaaaccaaataaaacttgttttctgtaaatttaaagagctttacaaagttccataatgtaaccatatcaaaattcattttgttagagcaggtatagaaaagagtacataagagtttaccaatcatcatcacattgtattccactaaataaatacataagccttatttgcagtgtctgtagtgattttaaaaatgtagaaaaatactatttgttctaaatacttttaagcaataactataatagtatattgatgctgcagttttatcttcatatttcttgttttgaaaaagcattttattgtttggacacagtattttggtacaaaaaaaaagactcactaaatgtgtcttactaaagtttaacctttggaaatgctggcgttctgtgattctccaacaaacttatttgtgtcaatacttaaccagcacttccagttaatctgttatttttaaaaattgctttattaagaaattttttgtataatcccataaaaggtcatatttttcccattcttcaaaaaaactgtatttcagaagaaacacatttgaggcactgtcttttggcttatagtttaaattgcatttcatcatactttgcttccaacttgctttttggcaaatgagattataaaaatgtttaatttttgtggttggaatctggatgttaaaatttaattggtaactcagtctgtgagctataatgtaatgcattcctatcaaaactaggtatctttttttcctttattttaaaataataattgcacctgacacataaacatagaccacccacaaccaaaattaaatgtttggtaagacaaatacacattggatgaccacagtaacagcaaacagggcacaaactggattcttatttcacatagacatttagattactaaagagactatgtgtaaacagtcatcattatagtactcaagacactaaaacagcttctagcaaaatatattaaagcttgcagaggccaaaaatagaaaacatctccctgtctctcccacatttccctcacagaaagacaaaaaacctgcctggtgcagtagctcacacctgtaatcccagcagtttgggagactgtgggaagatggcttgagtccaggagttctagacaggcctgagaaacctagtgagacatccttctcttaaacaaaacaaaacaaaacaaatgtagccatgcgtggtggcatatacctgtggtcccaactactcaggaggctgaaacggaaggatctcttgggcccaggagtttgaggctgcagtgagctataatcttgccattgcactccagcctgggtgaaaaagagccagaaagaaaggaaagag

SEQ ID NO: 15565 - DNA, 1960 bp, Homo sapiens
  CDS (51)..(1634)
ttttttcccccttgcctggctcctgtggtggcaggctgggcacgaggaccatgctgggccggagcctccgagaagtttctgcggcactgaaacaaggccaaattacaccaacagagctctgtcaaaaatgtctctctcttatcaagaagaccaagtttctaaatgcctacattactgtgtcagaagaggtggccttaaaacaagctgaagaatcagaaaagagatataagaatggacagtcacttggggatttagatggaattcctattgcagtaaaagacaatttcagcacttctggcattgagacaacatgtgcatcaaatatgctgaaaggttatataccaccttataatgctacagtagttcagaagttgttggatcagggagctctactaatgggaaaaacaaatttagatgagtttgctatgggatctgggagcacagatggtgtatttggaccagttaaaaacccctggagttattcaaaacaatatagagaaaagaggaagcagaatccccacagcgagaatgaagattcagactggctgataactggaggaagctcaggtgggagtgcagctgctgtatcggcgttcacatgctacgcggctttaggatcagatacaggaggatcgaccagaaatcctgctgcccactgtgggcttgttggtttcaaaccaagctatggcttagtttcccgtcatggtctcattcccctggtgaattcgatggatgtgccaggaatcttaaccagatgtgtggatgatgcagcaattgtgttgggtgcactggccggacctgaccccagggactctaccacagtacatgaacctattaataaaccattcatgcttcccagtttggcagatgtgagcaaactatgtataggaattccaaaggaatatcttgtaccggaattatcaagtgaagtacagtctctttggtccaaagctgctgacctctttgagtctgagggggccaaagtaattgaagtatcccttcctcacaccagttattcaattgtctgctaccatgtattgtgcacatcagaagtggcatcgaatatggcaagatttgatgggctacaatatggtcacagatgtgacattgatgtgtccactgaagccatgtatgctgcaaccagacgagaagggtttaatgatgtggtgagaggaagaattctctcaggaaactttttcttattaaaagaaaactatgaaaattattttgtcaaagcacagaaagtgagacgcctcattgctaatgactttgtaaatgcttttaactctggagtagatgtcttgctaactcccaccaccttgagtgaggcagtaccatacttggagttcatcaaagaggacaacagaacccgaagtgcccaggatgatatttttacacaagctgtaaatatggcaggattgccagcagtgagtatccctgttgcactctcaaaccaagggttgccaataggactgcagtttattggacgtgcgttttgtgaccagcagcttcttacagtagccaaatggtttgaaaaacaagtacagtttcctgttattcaacttcaagaactcatggatgattgttcagcagtccttgaaaatgaaaagttagcctctgtctctctaaaacagtaaacatatcttacaaattaaaatgacttttaggctgggtgcagtggctcacacctgtaatcccagcactttgggaggccaaggcgagcggatcatgaggtcagaagatctagaacagcctggtcaacatggtgaaaccccgtctctactaaaaatacaaaaattagccaggcttagtggcgggcatctgtagtcccagctactcaggaggctgaggcaggagaatcacttgaaccctggaggtggaggttgcagtgagccgagatcatgccactgcactgcactccagcctgggtgacaaagcaagactgtgtctcaaaataaat

SEQ ID NO: 15566 - protein, 528 aa, Homo sapiens; identical to SEQ ID NO: 12582

SEQ ID NO: 15567 - DNA, 2716 bp, Homo sapiens
  CDS (47)..(1426)
atctcaagttgcacagctaaaaaattcaagtgaagagaaagaagctatgaattccatttgccagacagcactttctgcagatggcaaagggagcaaaggcagtgaggaggatgtggtgtcaaagaatcaaggcgatagtgccagaaagcagcctggctcatccacctccagttcttctcacctagcgaagccttccagcagcagactgtgtgacaccagttctgcaaggcaggaaagtaccagcaaagcagaccttaactgttctaagaacaaagacctatatcaagaacaggtagaagtaatgttagatgtgacagatacaagtatggatacttatttggaaagagaatgggggaataaaccaagtgactgtgtaccctacaaagatgaagaactttatgatcttccagctccttgtactcctttgtcccttagttgccttcagctcagtactccagaaaatagagagagctctgtggtccaagcaggaggttccaaaaagcactcaaaccatctcagaaaattggtgtttgatgatttttgtgattcttcaaatgtttctaataaagattcttcagaagatgatataagtagaagtgaaaatgaaaagaaatcagaatgtttttcttccccaaagacaggattttgggactgttgttccacaagctatgcccaaaacttagattttgaaagttcagaggggaacacgatagcaaattctgttggagaaatatcttcaaaattgagtgagaaatcaggcttatgtttatccaaaaggttgaattctattcgctcttttgaaatgaaccggacaagaacatccagtgaagcatcgatggatgctgcttaccttgacaaaatctctgagttggattcaatgatgtcagagtcagacaacagcaagagcccttgtaataacggttttaagtcactggatttggatgggttatcaaagtcatctcaaggcagtgaatttcttgaggaacctgataagttggaagaaaaaactgagctaaacctttccaaaggttctctaactaatgatcagttagaaaatggaagtgaatggaaacccacttctttttttctcctctctccatctgaccaagaaatgaatgaagatttttcactccattccagttcttgtccagtaactaatgaaatcaaacccccaagctgcttgtttcagacagagttttcccagggcattttgttaagcagttcacatcgactatttgaagatcaaagatttgggtcatctttgtttaagatgtcctcagagatgcacagtcttcataaccaccttcagtctccttggtctacttcctttgtgcctgaaaagaggaataaaaatgtgaatcaatcaacaaaaagaaaaatccagagcagcctttccagtgccagcccatcaaaagcaactaaaagttgactcattagaaaggtgtcatttgtggttttgtcctgagagaaatagaaaagttgttaaagttaccttttttcctcataaaagttctatacaaattggaattgataatctttagtcaagtatcaagtcaggatggtggattaacctgtacccagaatacttattgttcattttgaaaagactttgttcttttcatttttatttgggagtctttgtgaccagagaagttagggaggaggttatttttgtgttttggggttggttggttggttggttttgtttttggttttgtttttttactgaatttgatatgtatctcggttggatatacattgttttttaaaaatgttatttaactgttagatacagtggcctgttgataagccccacttgtcttcagaacttggatttcttaaataaaacttttagtgttgtctatacactgctcaataagacacttgagtttaagcttttcccagggtggaaattattttacctgtccctttttatttatgtttagtgatggcctagtttttctgcagggccatgatggagaaatagcactctagccttagtccaatattgatttactttctttttttaggttttatgtatatgtttgcattttttagcattgtgttttgtccagttttgtgaaaatgttctgctagtatgaaagaaaacattttctatatgaagacatttgttttatgttaggtagcttacattttctcctctgcgtgtgtgtgtatgtgtgtaaaatcagaaatttagcatactatggaaagaaggcatggagcacttgggtttagaggaacctaaaacatcatagcttcattgttccagatgtaacaggtttgaaagagctcatcgccaagttcttgatccacttgcattccaggggagttttcttttgagtagtatgtttcttgtttgcatgttcctgttctttgtggaaactatgcatggtagcatttttgcttgctgtgttttccatacttaagaaaaagaggtttcagttggctgatagaatatcttttatgtaggacaaaacttttctgtgaagagtgttgagggggtgaagataggtaagaggtaagcacaatttttaatttaggctctgaaaaagtgtattgttctaaacgtatttggtatgcctatataggtctttaaaaatgggtttgtatgctgtttaatgtgcactgaacattttacattaatattgtactgttttacattaatactgcatgcttttctatgtgaattgaataaagaatgtcataagcactg

SEQ ID NO: 15568 - protein, 460 aa, Homo sapiens
MNSICQTALSADGKGSKGSEEDVVSKNQGDSARKQPGSSTSSSSHLAKPSSSRLCDTSSARQESTSKADLNCSKNKDLYQEQVEVMLDVTDTSMDTYLEREWGNKPSDCVPYKDEELYDLPAPCTPLSLSCLQLSTPENRESSVVQAGGSKKHSNHLRKLVFDDFCDSSNVSNKDSSEDDISRSENEKKSECFSSPKTGFWDCCSTSYAQNLDFESSEGNTIANSVGEISSKLSEKSGLCLSKRLNSIRSFEMNRTRTSSEASMDAAYLDKISELDSMMSESDNSKSPCNNGFKSLDLDGLSKSSQGSEFLEEPDKLEEKTELNLSKGSLTNDQLENGSEWKPTSFFLLSPSDQEMNEDFSLHSSSCPVTNEIKPPSCLFQTEFSQGILLSSSHRLFEDQRFGSSLFKMSSEMHSLHNHLQSPWSTSFVPEKRNKNVNQSTKRKIQSSLSSASPSKATKS

SEQ ID NO: 15569 - DNA, 1966 bp, Homo sapiens
  CDS (167)..(766)
gaaatcttttgatgcacatcccaggaaggagagccaagtgcgacagcttgcgtgggtgggggatggcgtgtgggtctccattcgcttggattctacgctccgtctctatcatgcacacacttatcaacatctacaggatgtggacattgagccttatgtaagcaaaatgttaggtactggaaaactgggcttctcttttgtgagaattacagctcttatggtgtcttgtaatcgtttgtgggtggggacaggaaatggtgtcattatctccatcccattgacagaaaccgtaatcctccaccagggacgtttactggggctgagggcaaataaaacctcaggtgtaccaggaaatcgtcctggaagtgtaatccgtgtatatggtgatgaaaacagtgataaagtgactccagggacatttataccctattgttcaatggcacatgcacagctttgcttccatgggcaccgggatgctgtgaaattctttgtggcagtcccaggtcaagtcatcagcccacaaagtagcagtagtggcacggatctgacgggtgacaaagcagggccatctgcacaggagcctggtagtcagacgcccttgaagtctatgcttgtcatcagtggaggagagggctacatcgacttccgaatgggtgatgaaggtggagaatcagaacttcttggagaggatcttccacttgaaccttctgtcaccaaagcagaaaggagtcacttgatagtgtggcaagtgatgtatggcaatgagtgagcccatgggaaacaggtggagatggggaagccgtctcttctgcatggtttattttccctctatccttttatttaatgctcttttgtgagataagtttcaccacataatgtgtgagcattttttcctgttaactttatattacaaaatccgttctaccataacaatacagaggaactagctgtgttactgcaccagtgttataggtaacttcagtatattatgaacaaatcaaagaatgtttacttcctgcaaactggtgaattatagaaagcaatccagatgtggtttactctgccacagtctaatgtcattcacttcatttgatggggtcacttgttagctgtcactaataatggaattaatgggaaacacttgataaatgaaactgtaccgttaaatacaatagctgagttttccccagtgtattgtaaaattgacacacactaatacaagatggattatcaggatgtatctaaatgtcccgagagggttaaaagctaactgtaaattactttaactttcactttcaaatctgacaaatcttgtttatatggtatataaaactttgttttcatcagatttgggggggttttatattaaagaaattaagactacactatttaaataaacgtttcctgtttctgacttattagagctctaaagtttatgaggcctacttctctgaatattctgatgggttttttttgagaccagtctcattttcatactgacatgtctgaaagatttattatttataaagcttaggacatactctgggaagcttagaagatacttcagcactgggaggattttttaaaggaaatgtgttttgtatttcttgtaccagagaatggtgatgttgattgagttttttccatgtaaaaaatgtacttgtttgccaaatgttcctagattgctcttaacctgttaatacaagtaaaactgtagtggggatggagtctggcctaagtacagaatgagggatttaattagaaaagttattttcttttgttctgtatcaaactgcagaacagctatatacttggtattttgtacgtgaataacgttttagcttttgtgcccttttgagcttgaagggttatcctcaaaggggaaaactatgaaggggaagaagacaaacctaagataccataaagtaaaggttgacattacatattttcattcacaatgcccatt

SEQ ID NO: 15570 - protein, 200 aa, Homo sapiens
MLGTGKLGFSFVRITALMVSCNRLWVGTGNGVIISIPLTETVILHQGRLLGLRANKTSGVPGNRPGSVIRVYGDENSDKVTPGTFIPYCSMAHAQLCFHGHRDAVKFFVAVPGQVISPQSSSSGTDLTGDKAGPSAQEPGSQTPLKSMLVISGGEGYIDFRMGDEGGESELLGEDLPLEPSVTKAERSHLIVWQVMYGNE

SEQ ID NO: 15571 - DNA, 2786 bp, Homo sapiens
  CDS (118)..(1326)
cttattcatgcaggctctgcattagctgctaatgtatgtaaaaagattactggacgtcttacaagtgcaatagcaaaacaggaagatgtctctgttcagctagaagccttggatattatggctgatatgttgagcaggcaaggaggacttcttgttaatttccatccttcaattctgacctgtctacttccccagttgaccagccctagacttgcagtgaggaaaagaaccattatcgctcttggccatctggttatgagctgtggaaatatagtttttgtagatcttattgaacatctgttgtcagagttgtccaaaaatgattctatgtcaacaacaagaacctacatacaatgtattgctgctattagtaggcaagcgggtcatagaataggtgaataccttgagaagataattcctttggtggtaaaattttgcaatgtagatgatgatgaattaaaagagtactgtattcaagcctttgaatcatttgtaagaagatgtcctaaggaagtatatcctcatgtttctaccattataaatatttgtcttaaatatcttacctatgatccaaattataattacgatgatgaagatgaagatgaaaatgcaatggatgctgatggtggtgatgatgatgatcaagggagtgatgatgaatacagtgatgatgatgacatgagttggaaagtgagacgtgcagctgcgaagtgcttggatgctgtagttagcacaaggcatgaaatgcttccagaattctacaagaccgtctctcctgcactaatatccagatttaaagagcgtgaagagaatgtaaaggcagatgtttttcacgcatacctttctcttttgaagcaaactcgtcctgtacaaagttggctatgtgaccctgatgcaatggagcagggagaaacacctttaacaatgcttcagagtcaggttcccaacattgttaaagctcttcacaaacagatgaaagaaaaaagtgtgaagacccgacagtgttgttttaacatgttaactgagctggtaaatgtattacctggggccctaactcaacacattcctgtacttgtaccaggaatcattttctcactgaatgataaatcaagctcatcgaatttgaagatcgatgctttgtcatgtctatacgtaatcctctgtaaccattctcctcaagtcttccatcctcacgttcaggctttggttcctccagtggtggcttgtgttggagacccattttacaaaattacatctgaagcacttcttgttactcaacagcttgtcaaagctcatcatatgcccgaagctcagtggttacggctgtgaaatttacaatttctgaccatccacaacctattgatccactgttaaagaactgcataggtgatttcctaaaaactttggaagacccagatttgaatgtgagaagagtagccttggtcacatttaattcagcagcacataacaagccatcattaataagggatctattggatactgttcttccacatctttacaatgaaacaaaagttagaaaggagcttataagagaggtagaaatgggtccatttaaacatacggttgatgatggtctggatattagaaaggcagcatttgagtgtatgtacacacttctagacagttgtcttgatagacttgatatctttgaatttctaaatcatgttgaagatggtttgaaggaccattatgatattaaggtaagatgtttgtgcctatttatacaatgttttagaagaagactttgctagagcaactttcacccttgtaatttactcatgtgtctgagaaaaatcaggttgtctgtgaagattttgataagcatattgtaaactataaagtgcaaaagtaataggcagtgtaacaccagttgacgtgtaagaaagatccagagccctttttattggaggaggaagtggcagtggatgcaaaatgctgtgtgcccacttgcttagtgaatagtccctagatcctttccctcaaaaaagtcccgacagattttgctgtttaaagtataaatctgtaactttttggcctgtcttaacattggaccatagttgctacccatggagggttttcttagcattgtcttgattaagtctcctgagctacctttggggctagtctgaattgtaactgtatcatttacctgaatgaggaatttttgtttttcaatataatatactgtgtttaatatcaagaattttgttataggacatggaacttttcagatatacaaaacaatctgtagaagctacttgagagaaatcatactgcgtcttatgtttggataatgaattttgcatataagtgttctttgttttcctgtgtgttcgtctccatttaaaatgtgaacagtaaaagggtgatttgaaaaatgaaaaatatatgcattgtgtctttttcatctactcttccatttagcgcttttggccaagcaggacaaaagtggtaactcagcagtaattgagccatactacccgaactcctactcttaggtttccatgtgtggtagtgacctgagcctctcaaagttcaatgaagagggcctccccaccaagaagtaaaaggatgtgcttgtttaattctatgagtttatagtccaagagaaaaaggtttatgggttatcaggttttacatggattaatctgaataactggtcaactctgttatgatagtggaaacttattatgaaattgtgttccagttcagtaattttctagttctatgattctcaattctggtgcacatgagctttaaaaaat

SEQ ID NO: 15572 - protein, 403 aa, Homo sapiens [sequence omitted]

SEQ ID NO: 15573 - DNA, 2107 bp, Homo sapiens
  CDS (133)..(486)
gtgcggaccagtttagaaggatatcctgctgggggctctcttccctatagcatccagacagctgaaaaacagaattggctgcattcctattttcacaaatggtcagctgagacttctggccgcagcaatgccatgccacatattaagacatatatgaggccttctccagacttcagtaaaattgcttggttccttgtcacaagcgcaaatctgtccaaggctgcctggggagcattggagaagaatggcacccagctgatgatccgctcctacgagctcggggtccttttcctcccttcagcatttggtctagacagtttcaaagtgaaacagaagttcttcgctggcagccaggagccaatggccacctttcctgtgccatatgatttgcctccagaactgtatggaagtaaagatcggccatggatatggaacattccttatgtcaaagcaccggatacgcatgggaacatgtgggtgccctcctgagaatcttgaggcactgtgaaatttaagtgtaagacattgagccacaaacatggaatctcttctttgtactggatgtccacttcccttaaagtcttatttgcacccttacaaaatctttccaaaggtcactcttatgaatggatgttggttatacttttaatggacattaacattcctaataaagtattagtttcttaattcacttttatatgttttggaaagaaaattagtgaacttctctatgttaaaaatacgtactgcttgagtatcccctgtctgaaatgcttgggaccagaagtgtttcagcttttggatttttttgaattttggaatatttgcatagcataatgagatatcttgggaatgggacccaaatctaaacacaaaattcatttatgtttcatatacaccttatatacaataacctaaaggtgattttatatgatattttgagtaattttatgcatgaaacaaagttttgacaggcttttgaccgtgattcatcacatgagttcaggcatggaaattttcatttggagcatcatgtcagcactcaaaaagttctggatcttggagcagttcagattttcagattagggatgctcaaatctatatagatataaaattatcctcacagtaacatagaatctcttggtgctgtcagctgttgggaattgaagattgactttgtgcttccaccctccatccagaaaggcacccttcattccaccagaactttacccaggaagaacacgatcatttcctttttcaccgatgccctctctcagctttctgagtacgtctcttggggtcgctggaggtgatcctaggatctgtctctgagaccaatgtgctgtttcagccccctgcagctaagaattgtattgactgtcctcacagcggcttttcatagctttcagcttcagctttacgaggcttctcctctctccctggcaccctgctggctgcctcactgcttacagacaggtcccaccaaacccaaacacctgcctagggtgaatgggtctctcttctatccccagaaactttcagaggaagcagctcatagaaacatacaaaagcacacaagtattttgggaaaaaatcctaaaaggtgacttaatttgatgccttaaattcacaagtgaggaagctaaggcctagaaggttaaggatgtccccagggtcacacagtgagcggggctcagagcttgagtgtctttgtgctttgtgtacattgtgttctccctagggtgctttagaccctgtttgttttcttctgcatgaggctgatttccagtttgtcatcaacctctttatcttataatttaggatagagttgaacgttagtcttgaaagattttctaaagtagtctttcaaactgttcctcagaggcctaggattttccaaaagtaccttaggaaccttgtaggctgcagtgggggtgtggcgatagagcaggaggcagggagacagggctgcagggcctcccaccttccaacagacaggctctgctgtatctgttgtacatactgggattctgtaaaggacattatctggggtgttgtatgtatttttgtgtgttctgcttttttaaataaacttgaaaagctactg

SEQ ID NO: 15574 - protein, 118 aa, Homo sapiens
MPHIKTYMRPSPDFSKIAWFLVTSANLSKAAWGALEKNGTQLMIRSYELGVLFLPSAFGLDSFKVKQKFFAGSQEPMATFPVPYDLPPELYGSKDRPWIWNIPYVKAPDTHGNMWVPS

SEQ ID NO: 15575 - DNA, 1498 bp, Homo sapiens
  CDS (362)..(1435)
ttacattagcaagagagcaagttgttccagtagttgcctggcaggagaatttgaaagggtgccccaaaggacaatctctaaaggggtaagggagatacctaccttgtctggtaggggagatgtttcgttttcatgctttaccagaaaatccacttccctgctgaccttagtttcaaagcttattcttaattagagacaagaaacctgtttcaacttgaagacaccgtatgaggtgaatggacagccagccaccacaatgaaagaaatcaaaccaggaataacctatgctgaacccacgcctcaatcgtccccaagtgtttcctgacacgcatctttgcttacagtgcatcacaactgaagaatggggttcaacttgacgcttgcaaaattaccaaataacgagctgcacggccaagagagtcacaattcaggcaacaggagcgacgggccaggaaagaacaccacccttcacaatgaatttgacacaattgtcttgccggtgctttatctcattatatttgtggcaagcatcttgctgaatggtttagcagtgtggatcttcttccacattaggaataaaaccagcttcatattctatctcaaaaacatagtggttgcagacctcataatgacgctgacatttccatttcgaatagtccatgatgcaggatttggaccttggtacttcaagtttattctctgcagatacacttcagttttgttttatgcaaacatgtatacttccatcgtgttccttgggctgataagcattgatcgctatctgaaggtggtcaagccatttggggactctcggatgtacaacataaccttcacgaaggttttatctgtttgtgtttgggtgatcatggctgttttgtctttgccaaacatcatcctgacaaatggtcagccaacagaggacaatatccatgactgctcaaaacttaaaagtcctttgggggtcaaatggcatacggcagtcacctatgtgaacagctgcttgtttgtggccgtgctggtgattctgatcggatgttacatagccatatccaggtacatccacaaatccagcaggcaattcataagtcagtcaagccgaaagcgaaaacataaccagagcatcagggttgttgtggctgtgttttttacctgctttctaccatatcacttgtgcagaattccttttacttttagtcacttagacaggcttttagatgaatctgcacaaaaaatcctatattactgcaaagaaattacacttttcttgtctgcgtgtaatgtttgcctggatccaataatttactttttcatgtgtaggtcattttcaagaaggctgttcaaaaaatcaaatatcagaaccaggagtgaaagcatcagatcactgcaaagtgtgagaagatcggaagttcgcatatattatgattatactgatgtgtaggccttttattgtttgttggaatcgatatgtacaaagtgtaaataaatgtttcttttcatt

SEQ ID NO: 15576 - protein, 358 aa, Homo sapiens
MGFNLTLAKLPNNELHGQESHNSGNRSDGPGKNTTLHNEFDTIVLPVLYLIIFVASILLNGLAVWIFFHIRNKTSFIFYLKNIVVADLIMTLTFPFRIVHDAGFGPWYFKFILCRYTSVLFYANMYTSIVFLGLISIDRYLKVVKPFGDSRMYNITFTKVLSVCVWVIMAVLSLPNIILTNGQPTEDNIHDCSKLKSPLGVKWHTAVTYVNSCLFVAVLVILIGCYIAISRYIHKSSRQFISQSSRKRKHNQSIRVVVAVFFTCFLPYHLCRIPFTFSHLDRLLDESAQKILYYCKEITLFLSACNVCLDPIIYFFMCRSFSRRLFKKSNIRTRSESIRSLQSVRRSEVRIYYDYTDV

SEQ ID NO: 15577 - DNA, 2216 bp, Homo sapiens
tgcaaagatgagataaaggcgcgggaaagaagggtctgaattaggggttgagctctgaaatcggacgattctgtgtttcctgccgcatggagggcgtgtgtggttcgcaggctgtggggggtttcttgcagcgggggctgctgcctaaacagactccgcgggccccatgatggcaaaccccctcgccccgttcatgacttaatgcctcctagaagaaaaggctaaaaacaagacacacagaacaagaaattgcactctctcaaaacgacagtcgccctgaaacggacgctggaagaggtttccaggcccgtggcgacggtgaggggggtgaaggtcgcaggtggagggcacggggcggcggctgcggagcccggggaggaggcggcgggcgcccgggtcttcctcggagcgcgccccctgggctgggcggcgtgtccctgcctcccgccggcgccctcgtccccgcagcagcgtccccgccgccaccccgctgcctcgtcgcctttctcgcaaacagcggtgccctctacgtgggggatcctggaggctgctgagcacgagcgccctccgcgacccgcccctgctcccgcctccactcttgcctcggggggagggtctcagtcttctgcctaaggcgccctcctcccttgggaagtccgccgtcctctgccgtgaagattgcccctctctcctccagtgcctcctccccagcggcttcggtggctcccaccctccgcaccccgtctcgcgacctccccgccagcccagcccctcaccagaagaggctttctcttccagcccctgaaatctggcttctgccccagccaggaggctccgcagggcgctccgccaccaggtggcatttcccacaaaccggccactccgccctgacccctctcctccctggacctccgtctcccagttttcctccctccaggatcccactctcagtgtcttgccggattccagtccactgccagccattgaaggcggaggttccttaacccctatcctggggcgagcccttccctctcactgcagaagagcttctcagctaggggggtcgtgcgggcccggagagctgcatttttaacaaactccccacactgacaatctttgccaacccttcccaggcaaatcttgcccccacgttcatggtctcgcctcccagcaggtttggcccacccagctagagctccagctcggcccttcctaagccccaagctgcatagctgcctggtgggtgcgtgttccacaggtacctcggactcgccctgaccccagaacgtctcttctacgccaggccgatccctcctgccatcctctgtctgttaaatggcactgccattgcctgcaggacgaagtccatatttgctggtttggctacagagtccagcgtcgccttcctctgagcagcctgcagcctctggtgcagccacactgcacagcttgcagtttccagacacgcattggcctttgcagtgcggccccgaagtgggaaggccccgcccctggccctggccagaaaagcacccactcatcctttcccatcccagcttgcccgctgagtgactttgaatcaatgattcatgttgtctgtgcctcagtttccttaaccttaaagtggcataataattagttcctgcctcatggaattgtgagtgctaaataaacagtaagtctagtgcccgacataaaagtgctcagcatacgacgatcatgagccatgtctaagcaggcgcaagccctcccaggcttctcatctgcaatattggccatttctcttcatgcttcagtgtcctgtttgagttgagcatgttttttttacaagtgagtctctcctccattggccgggaaccgcccgagagccgggagcatttgtcattcttgatggacccccaggtcttaaatcagtacttgacccttaagaggtgttgggcgggcgcggtggctcacgcctgtaatcccagcactttgggaggccaaggcgggcagctcacgaggtcaggagttagagaccagcctggccaacatcgtgaaaccccatctctactaaaaatacaaaaattagacaggtgtggtggtgcgcgcctatagtcccagctacctgggaggctgaggcaggagaatttcttgaacccaggaggcagaggttgcagtgagccaagattatgccactgcactccagcctgggcaacagagcaagactccatctc

SEQ ID NO: 15578 - DNA, 1890 bp, Homo sapiens
  CDS (387)..(884)
tctacagaacaaactgcacagcttggtactgagctcttcattgtcaggcaacttcttcaaatagtgaagcagaaaaccaatcaaaattcagtggacactacattgaaatttactttgagtgcactttggaacctcacagatgaatctccaaccacttgtagacactttattgaaaaccaagggttagaactcttcatgagggttctagagtctttcccaactgagtcatccattcagcagaaagttctaggacttttgtgtggatctgctgatgatgaattcttcagcttttgtctgactgaaaacatctttacttaacctttgtttttgaaagatacttttaccagaacaatatagctgaagtacaagaattacattctgaattaatgtggaaagattttatagaccacatcagtagtctcctacacagtgtggaagtggaagtcagttactttgcagctggaattattgcccatttaatatccagaggtgaacaagcttggacattgagtcgtagccagaggaattctctgctggatgatttgcattcagctattttgaaatggccaactccagagtgtgagatggtagcatacaggtcctttaatccatttttcccattacttggctgtttcacaacaccaggagttcagctatgggcagtttgtgccatgcaacatgtctgcagcaagaatccttcaaggtattgcagcatgctgattgaagaaggaggattgcagcatttgtacaacatcaaagatcatgaacatactgatccccatgtccaacagattgctgtggccattctggatagcttagaaaaacacattgtgcgccatgggaggccacctccctgtaaaaaacagccccaagccagactaaattgatagccataagtattggatagttgaatcacaggaatcctttttgtgattggtccatttggaatatcttaccctccctgatgttttgggggtttctatgacaagagtcataaaatcagtttgggattgataatgtgtagtactgcccatgtgaacagtctctaatttgtcttgtgattttaaacttatgagtcaagaagggtctcttcctttatcattgccttttaggaaattttccacatctttcagtgtttgaacttacttgtgcttgagattctacagttttatggtaaagtttgcacgaacccttaggccagacttttctgatctcagagtcccttccaatcaatttgcagcttcacataagctgttgacctgatttctgacactgcttcagttgtaaattttatactgcttctgtataaaatgcctttcttctctatctgtgtatattttataagatgtccttcttagtgtgaaagaagggaaatgtggatcatcttgtggaagctaatcactggcaggagcctggatggctggcggaaagatatatgtgaaagaaaaattatgaaggtagaacagagtgtaggaactgggaattggtttcatggtataggttttaaaatgagacaggctacccttcgggagtccacctctcttgaggcggtgagcagaagcttgtcctccatatttatacctagaagtgtggactgctggttcctgcacagactgccggttattcactaggaatatttccccaagcaccacagtataaaatactacagcactctgtgttaaagactaactgtctacatctccatatgttgtagtgttgtgaaaatgtgattttaaaaaattatcgccagttaaaactggctattcttttcctctatttcaaagtcatttttgttcagtggaatagagacagcaacatggtgttgacctctcaattaaaatacaattgacaccagtaaattttgccataaaaagttaaaatctcttgttc

SEQ ID NO: 15579 - protein, 166 aa, Homo sapiens [sequence omitted]

SEQ ID NO: 15580 - DNA, 2432 bp, Homo sapiens
agtctgtgagctgggagcctgttggcaggtccctctttttattttcgctgagagctttcttttactaaatgccaccatccttacctttcaaggtgtctgcgtgcctaatttttcctggttgttagacaagaacccggattttagttgaactctggagcaaaaatcctgcatcatttgtaggtaatgtttgttttctttggttgcttttatgaccttctctttattcctagtatttgggcatttcacaaaaacatttataaatctgaattaaaaaacaaactgaccttgccaaggaccctactgatcccttttcatataattctatctgctaggtcttgtgctgccttctaagttagttcatcagttctatacttcagtatttaattctatattcagccatgttatcaaatgtttatttcaacctttgagtttctcatttgtaatagtattttttcatttttatgtttttaaaagagttcttttcatattttactatttttgtttagtaactttcagtacttgttgcgtagattttatttcatctttatgtttttgagatgtttgcataacacatttaaagacaattacatattgttgtatgatttccatttccttggtcaagaattctcccatttgttgcatctctgaagagtttcccaaggtgggttaatcttgaatatggtaaacttgctgccctcagttttttagttttaatactttatcagttgtttcttgttctttttttttctgggcatattattacatcatttgaaaataatgacaattttggcctttctcttcgagattttgtaactcattttcttttcttttcacatagaatttgataaggcctccagtactttgtgatatagtagttgtggggatggtccttcttgtcttactgctgatctcaagtttatgtttgtagcaaatttttgctacatgaccattacaagtttaagaggttaccaagagtttttattacaaataccttaaatctcagcaaagactataaaaactgagataaacatgtttttcttctaaatagtaatcatttagacaaatcacaaatgtgatatcagattagtgcatcctacactgtatggaaactataaattcatgattttcaaaaattgtaggtaaatatttatttttcaaaataatttatccatcttgctttaccaaaaaaggcaaggtcttgtttttctttccctatacagtagtaatggctctttggtgtaaaaactttataggacctaaagtaaaaaagaagataaaaaccagtttgtctttcaaagtcttaaaatatttcattaacctcgtagtgcctgatctctgtcaccaagcaaatagtctgaactattatttccaagctcaattcaaacaggtaaagttttactacaattatatctggccatcactacagtgttttctccaatcacttccaaagcctaccccttttctttatcatacttccacctacattgcataatacagagcttagctagtgaggtacaagtgataaggattatctccccagagtctccgggccttggtaattcctagaccacagcaccatgcattaggttatagtcacaggcctctatatagtcttccacatatcccattacattttaaatcctatgcataccctttatatcctgcacttatctgtcaaaattctaaggtataagatttttttttacttatccctgctgtttaattttgaagaaagaaaaatataaaagaaaattttttaaaaagaggccttcatggatatcaaagaatgccaacaataatgctgaagaaagaagttattctacagcaatgagacacaaagaaaagaattttgtaaacattagcatcttggttactggagaactataacttttatgtagtcatgcttggaaaacactaaaagggaaatcgagtctgtttgacaatattctgtcttcactgttgttcacttcataatgtgttggaatataaagttctatacagttaatatgaagctctctttagcatttaaaacatgatttgcattttcatgaggcattttggctaattttattgatttccttatatttcatagtccttagccttatgagaatcttatgtttctgtgtgttttctatcatgtagcacaatttctgacacacaaaacatacaataaacttgtgttaatttttctatcaaagtcagaatttattcataaggaatctgaagtaaggtgtactaagcttgtttatgggttaagtgatatagccaaattcaaaactttactttttatgtcagtctagaaatatctcagattaaaacatatcacttcttagttccaattagataagggaaatcttttataataatgccaggattgctataatctgataggagacaacaatttcattttgctacaggaaaatttggaggac

SEQ ID NO: 15581 - DNA, 1984 bp, Homo sapiens
aataacaatctagttttttttcccccagtactaaaattgtattgtctttcagacaatataatttttatttaaaattggagcatactatcttcatgctttctaagctaaatcttcatttagatttcactcctcagtagatcccagagaagaagctatataggatccagattcaaatttaacagtgtcttctacttttttagttatgttttctatcaactcctgctgccttttcaaatacggatatttttcaggagactcttctacttgtccactgactgtattttttcctttttgatccgtagccctggttaaatggctgacatccttccgtggatgattcttggaggtggtctcagagttccaaagtgattgtctgtcttcttcttgtcttgatcctaatgcagacattcacctctattatttatttattttttttagacagagtctcgctctgtcaccaggctggagtgcagtggcacaatcttggcttactgtaccctccacctcctgggttcaagcgattctcctgcctcagcctctcgagtagctgggactacaggtgtgtgccaccatgcccagctaatttttgtatttttggtagagatggggttttaccatgtttgccaggatggtctcgatttcctgaccttgtgatctgcccaccttggcctcccaaagtgctggaattacaggcatgagccaccgtgcctggccacctctattaaatttttgtggacaaaaataaaattgtcattatttgtttgctctcatggagcactttcagtaatacaattttttttaaattccagttgccctctttgttgctctgtcctctgtaatacctgactttgctaaagacttgaggggtggtttcagaggagggtcaggtgatgggaaggcaggatgagaaaagccctggacttgcatgtttgagaaggcttccaaccacatcttcactcagactcttggaattcctgtccccaaaacaagcttctgttttttgctcacaatgctatatttctaaatttttcctgaattactgagaagcagtcattagctttgttaagtttggtttggggacattgttggtatcaaaaatcgaagtcttattcatttgatgtaggccatgaatcatcaataactggttgctggaaagcttgactaccatccactggggtgctattttgagaaggatttttgggtatctttatagtctgcaattagttgatgattgctttctagtttatcaactgcatttatatttgcttttctgttcatggaaaatcctttatttgctggggttttttgtttgtttgtttgtttttcccacttacagcaagtaaaagtggtctgaggttatccttgtttttcttcgcggtttgccatgtgtgaaagtagatttcctgctattgatatattctcattatagacagaatagtggagaacagtgttgccatggacaaaatccagttttggtccactctggggagcatttggacctgtggtgcttctaacaattaaaagtctagatggtccttgactgtcccccagccatactgcatactactttgtgcattctactttgtgtcattaatgaaagattggttctgtccctgtaacttaggcatttattattcttaactcttcattcctgttctgtagccacccagcagtccattttccctatgttcaggccaaaccacagggcattggggaaggtttttgggattttcttattgagattttgttgaatctgtagtttaccccagctttcctaaggtacagtgaggggttggagggatctgtgtttggcccggggagcaattgtctctaccttaaggttcagttttgagggcataaaatactactttgcaatgtcatgagaacaccattagatctgaaatgtggaaatggtttctcacaatttaaaggaaaaacccactttgcacccatgatcccatcattttggttgagattttagaat

SEQ ID NO: 15582 - DNA, 2918 bp, Homo sapiens
  CDS (117)..(824)
atcaaggccctgggctggaggaagacatcccagatccagaggagctcgactgggggtccaagtactatgcgtcgctgcaggagctccaggggcagcacaactttgatgaagatgaaatggatgatcctggagattcagatggggtcaacctcatttctatggttggggagatccaagaccagggtgaggctgaagtcaaaggcactgtgtccccaaaaaaagcagttgccaccctgaagatctacaacaggtccctggaggaagaatttaaccactttgaagactggctgaatgtgtttcctctgtaccgagggcaagggggccaggatggaggtggagaagaggaaggatctggacaccttgtgggcaagttcaagggctccttcctcatttaccctgaatcagaggcagtgttgttctctgagccccagatctctcgggggatcccacagaaccggcccatcaagctcctggtcagagtgtatgttgtaaaggctaccaacctggctcctgcagaccccaatggcaaagcagacccttacgtggtggtgagcgctggccgggagcggcaggacaccaaggaacgctacatccccaagcagctcaaccccatctttggagagatcctggagctaagcatctctctcccagctgagacggagctgacggtcgccgtatttgaacatgacctcgtgggttctgacgacctcatcggggagacccacattgatctggaaaaccgattctatagccaccacagagcaaactgtgggctggcctcccagtatgaagtgtgggtccagcagggcccacaggagccattctgagtttctggccaaacacattcaagctcacattcccttttgtgtctccagatcctatgatttcatggaaggggaccctcccacccaccgccactgccaaccaagacatagctcagtggtcaagacttgggcttgggagtcgggatcctgtaacgaatgtcacttgaccgctttctttttttatgaaacagtctcgctctgtctcccaggttggagtgcagtggcacgatctcggctgactgcaacctccacctcctgggttcaagcgattctcctgcctcagcctccccagtagctgggattacaggcgtgggcccccatgtccagctaatttttatattttcgctctgtctcccaggttggagtgcagtggcacgatctcggctgactgcaacctccacctcctgggttcaagcgattctcctgcctcagcctccccagtagctgggattacaggcgtgggcccccatgtccagctaatttttatatttttagtagagacagggtttcaccatgttgtccaggctggtcttgaacccctgacctcaagtgatccacccacctctgcctcccaaagtgctgggattacaggtgtgagccaccatgccaggccctcttaacctcttcaagtctgttttctcatctgcaaaacagaggtaataagatcagtatcttcttaatggaagcacctgggctacatttttttcattcattgttatcataaatgaggactaacctgtctcccgttgggagttttgaacctagacctcatgtcttcatgacgtcatcactgccccaggcccagctgtgtccctacaccagccccagctgacgcatcttctttttctgcctgtagagatggttacaatgcctggcgtgatgcattctggccttcgcagatcctggcggggctgtgccaacgctgtggcctccctgcccctgaataccgagccggtgctgtcaaggtgggcagcaaagtcttcctgacaccaccggagaccctgcccccagggatctcttcacatgtggattgacatctttcctcaagatgtgcctgctccacccccagttgacatcaagcctcggcagccaatcagctatgagctcagagttgtcatctggaacacggaggatgtggttctggatgacgagaatccactcaccggagagatgtcgagtgacatctatgtgaagagctgggtgaaggggttggagcatgacaagcaggagacagacgttcacttcaactccctgactggggaggggaacttcaattggcgctttgtgttccgctttgactacctgcccacggagcgggaggtgagcgtctggcgcaggtctggaccctttgccctggaggaggcggagttccggcagcctgcagtgctggtcctgcaggatccctggagttgcagctaccagacatggtgcgtggggcccggggccccgagctctgctctgtgcagctggcccgcaatggggccgggccgaggtgcaatctgtttcgctgccgccgcctgaggggctggtggccggtagtgaagctgaaggaggcagaggacgtggagcgggaggcgcaggaggctcaggctggcaagaagaagcgaaagcagaggaggaggaagggccggccagaagacctggagttcacagacatgggtggcaatgtgtacatcctcacgggcaaggtggaggcagagtttgagctgctgactgtggaggaggccgagaaacggccagtggggaaggggcggaagcagccagagcctctggagaaacccagccgccccaaaacttccttcaactggtttgtgaacccgctgaagacctttgtcttcttcatctggcgccggtactggcgcaccctggtgctgctgctactggtgctgctcaccgtcttcctcctcctggtcttctacaccatccctggccagatcagccaggtcatcttccgtcccctccacaagtgactctcgctgaccttggacactcacccagggtgccaacccttcaatgcctgctcctggaagtctttcttacccatgtgagctaccccagagtctagtgcttcctctgaataaacctatcacagcc

SEQ ID NO: 15583 - protein, 236 aa, Homo sapiens
MDDPGDSDGVNLISMVGEIQDQGEAEVKGTVSPKKAVATLKIYNRSLEEEFNHFEDWLNVFPLYRGQGGQDGGGEEEGSGHLVGKFKGSFLIYPESEAVLFSEPQISRGIPQNRPIKLLVRVYVVKATNLAPADPNGKADPYVVVSAGRERQDTKERYIPKQLNPIFGEILELSISLPAETELTVAVFEHDLVGSDDLIGETHIDLENRFYSHHRANCGLASQYEVWVQQGPQEPF

SEQ ID NO: 15584 - DNA, 2295 bp, Homo sapiens
tatataaaaattattactttaaaaatagctgcataatattttatagtaactacgtgccatgatttatctaaacattccactactgatggattaacagattgtttccaattttttggaaacaatgacaaataatgctgcagtaagaattcttggacatatgctcttgaatactttctgtggcatagatttgttttggcttgctggctgaaattgtaagagcatttcaaatttaatagatattgcgaattttccttccaaaaatgtatagcagtttacattaacaataccagaaaggggtcatcattctcctgaatacccaacagtactgaatatattgctctttagaaatttttgccaggctgatgcatgaaaaattctatcttgttttagtttgcatttctctgactactgctgagattaaacatgttttagatgtttatgaatcctttggatttcttcttccatgaattgtctaattatgcatgtggctgtgtatgtgtgtatatgtgtatgcatctgtatgtttgtgtgtgtatgagatcaagtgattttcctattgggtaggttgtctttttgaaaatctagtgtaaaggtgcattagttaaaatcaggcctagctgtataaataacagaaaattacaaaataatattaaatatatttctctttcatgtaaatgaagtccagaggtacaaaggttaaggactgatatggcagctctgccccactaagtcctctgggtcttaacttcctaccagctcatttttctgctatttctgtgtagtggtccttgttttcatggtctcaggtggcagcttctgtttcaggaagcaggatggaggaaggactgaaaaggaacaaaggccaaaggcacaatgtctctttatatatatgtaacttaaattgtaaaatataatgttcacatagaaatataatgtttacacagaaactgtaccacaatgtatagttataaaaattattttaaggaaatgtccatggagcctcccctcaagtgaagaaacagagcattggaatttcagaagcccgcttttcctttctaatcacaactctccctagaggaagtctccctctagacctagagattactataattctgactttatggtaatcattgccttgcttttctttaaagtgtttcacccaagtatgcatttctaaatgacatagtttgcctatttttgaatcttggtgtttgtgttactttggttcttgcttcttctattcagtggatgtttattgtatatgatgattcaatttcatcaatttcattcgatgtattatatatgatgatttcagttatatatgatgattattaaataggatacaatagtatcctgttgtataaacatacttcaatttatccattcaactgttgatggacctttggattattctaattcttgtatattacaaagaatgctgctacaatatccttgtacatgtatcctagtacacatacatgtttctctggaatatagatttaggaaaatgttttggattattgagcatacatatcttcacatttattgactaacaccaaactgttttcctaagtgattataccgattcacccatcagtaatgtttaacagtctgtactgctctatatcctcaccaactcttagcaatttcatacttgaaaatgttgagatctagtagatgtctagttgcagcaaaggctggaagatgcagtgttcattctgaacagttatgtgcatagttactatttggaaatcctattattaatataagaaaaaaacatatattgggaaatacacagcaatctctgccacattcagaatactaacttaaaaatagctgccaggctgggcaccgtggctcacgtgtgtaatcccaacaatttgggaggctgaggcaggaggatcacctgaggtcagaagttcaagaccaacctggccaacgtgatgaaaccctgtctctactaaaaatacaaaaattagccagatgtggtggcaggtgcctataatcccagctactcaggaggctgaggcggggagaatcgcttgaacccgggggcagaagttatagtgagccgagattgtaccattgcactccagcctgggcaacagagtgagactccatctcaaaaaaaaaaaaaaaaaaaaaattaaccaagtgtggtggcacgcacctgtaatcctagctacttgggaggctgaggcaagagaatcacttgaactctggggggcagaggttacagtgagcgagatcatgccactgcactccagcctgggtgacagagtgagactctgtctc

SEQ ID NO: 15585 - DNA, 2112 bp, Homo sapiens
  CDS (719)..(1771)
tactgtataaggttctatacctggtagcttccaggtggtagttggtaccagaatgggcgcaaacttagtctcttctccattctgacttcaaacctgggtcactacaatttcttggatcacgaaaactgcattcttccttaaatggtgtcactaagttgtctttctgtttctttctgccatggtcattgtcagcagtgaccccaggccaaagaacagtttttcattcattctcaatacctcgatgagaccatgtgctactctgtgtttccacaactctagtgtgattttgaagttgtatgtttttctgttcctgtctagtgagacagtctctaatcttactggatctcatcattaggtaattcaatgacaagtttaattggggaaaagagagaaggatctagtcccccgaatttgttttgggtcctgtcccagttgtcttctggttagtaggtttttgtgcttaagaatatgttgacttcaggcatttaacaagggacaaaacatctatttttagtgacttaaggaagtggtaggaacagaatctaagtgtagccagatgaaaggtgacttattttgtttagacaggcagaactgtggactaccatgatctgtttcatcaaattattccaaaacaacagatcctttttcaggctttctttttctttttcttttctttctttctttttttcctaaacttccttttggcagatgtggcctcatggatgagctggtacacgacttagcctcagccttggagcagacatctgagcagaataagcttggtgaactgtgggaggagatggcgctgagcccccgacagcagaggcggcagcttcggaaacgccgaggtcggaagcgtcgttctgacttcactcacctggcagagcatacctgctgctacagcgaggcctctgagtcaagtctggatgaggccactaaggactgtcgagaagtggctccggtgaccaattttagtgactctgatgacacaatggtagccaaacgacacccagctctcaatgccattgtcaagagtaagcaacattcttggcatgaatctgactcctttactgaaaatgcaccttgtcgaccactcaggcgcaggcggaaggtgaagcgagtgacatcagaggtggctgctagccttcagcagaagctgaaggtgtcagattggagctatgagagaggctgcaggttcaagtctgctaagaagcagcgtctgtcccgctggaaggagaatactccctggacctcatcaggccacggattgtgtgaatcagcagaaaataggactttcctaagcaaaacaggaaggaaagaaaggatggagtgtgaaacagatgaacaaaaacagggctctgatgagaacatgtcagaatgtgaaaccagcagtgtgtgtagcagcagtgacactgggctctttaccaatgatgaagggcgacaaggtgatgacgaacagagtgattggttctatgaaggagaatgtgtcccaggattcactgtccctaatcttctgcccaagtgggctcctgatcattgttctgaagtagaaagaatggattctggattggataaattttcagattccacattccttttaccttctcggccagctcaaagagggtaccatactcgcttgaatcgtctacctggagctgcagctcgatgcctcagaaaggggcgaagaaggctggttgggaaggtgatacctctcacagttagcttggctcagtggggagataatattccctatgggagttgtgtatcctattaacaatcagaggtgctacagaactccctgaagttaatggagccaactggaatgtgttgggagtttacaagagtgaacattatgtagcatgtgaatggatatacaaataaaagatgaaacgtaattcatatagaagtactgacaaaaaaaaaaaacactgtcattacagtgtctattgcctgtaaacctacaagcctgagctgtgtcttctgtaacttttgattaatgttatgttattactgtgtaagttaaaatactcttggcttctttatgactcctcttgaattcatgaatgcatctttgttctttcctaattttggtctttcatcctagaattcatt

SEQ ID NO: 15586 - protein, 351 aa, Homo sapiens
MDELVHDLASALEQTSEQNKLGELWEEMALSPRQQRRQLRKRRGRKRRSDFTHLAEHTCCYSEASESSLDEATKDCREVAPVTNFSDSDDTMVAKRHPALNAIVKSKQHSWHESDSFTENAPCRPLRRRRKVKRVTSEVAASLQQKLKVSDWSYERGCRFKSAKKQRLSRWKENTPWTSSGHGLCESAENRTFLSKTGRKERMECETDEQKQGSDENMSECETSSVCSSSDTGLFTNDEGRQGDDEQSDWFYEGECVPGFTVPNLLPKWAPDHCSEVERMDSGLDKFSDSTFLLPSRPAQRGYHTRLNRLPGAAARCLRKGRRRLVGKVIPLTVSLAQWGDNIPYGSCVSY

SEQ ID NO: 15587 - DNA, 3025 bp, Homo sapiens
  CDS (239)..(883)
atcttggaccagcccgaggaagatactgagggagcacaggagcagtcaccgctgccactgctactgccgctactgctgccggcgcgtctgcacctctcggcctgccagtgtacctgccggcgcctcggtcgaccgcccccgccccctctcccgctgcgtccgcactcctgttcctggtcctgacgcccccctcccgcccggaaagctgcccagccaccagcaaccccccagtgccaccatggcaactgcaccatacaactactcttacatctttaaatatattattattggggacatgggagtaggaaaatcttgcttgcttcatcaatttacagaaaaaaaatttatggctgattgtcctcacacaattggtgttgaatttggtacaagaataatcgaagttagtggccaaaaaataaaactgcagatttgggatacggcaggacaggagcgatttagggctgttacacggagctactacagaggagctgcgggagctcttatggtctatgatatcactagaagaagtacatataaccacttaagcagctggttgacagatgcaaggaatctcaccaatccaaatactgtaataattctcataggaaataaagcagatttggaggcacagagagatgttacatatgaagaagccaaacagtttgctgaagaaaatggcttattgttcctcgaagcgagtgcaaaaacgggagagaatgtagaagatgccttccttgaggctgccaagaaaatctatcagaacattcaggatggaagcttggatctgaatgctgctgagtctggtgtacaacacaaaccttcagccccgcagggaggccggctaaccagtgaaccccaaccccagagagaaggctgtggctgctagtgacctctttgctgtggcccctcatttgacctttcacctctgtctgttggaagcagtactttttactgcctcattgtcttctgtacatcttactgggtttaattaaaaaaaaagaaaaaactctgttgtaaaaacagtttaacacaatactaaactgctaaacaactagatgtaatcaggttatcaaaggcaagtagagtaataaatctctcctgcatggtaaatctagactttttttcccccttgtcctcgtgataagtatgtcaccaatatatgatttaaaccgagcactgatgctggacttcatgatttttaccctccctttggcaaggctttgtctcactgtacggtttaatttggtgatatcttaagcctttcttcccatccttaactgttcaagtatgtctgttgtaaccaataagtatattgctgtgaaattacttctgatggtagagaaggggttctataactgcttttgttttgttttggataaatttcctgttgtgtgggtggcatttttcttaacgagatttgcttctgtcttagcctcacacagggaaaatatccatttatctcctctctcgtgcttaattaatagctttatctttttttataccattttatccttttctctttaacagaaagtaaatatgtataaaatttgaaggaatcgaactaacaatacattctgtgtatattattttaatgaagaaaataaattgattactggcattggaacagtataaaataccagtttgtacagtatgacctatatgtgaccatgttactcccttccatttcacacaaagaaatagacacaactgcagttcacaagtagtactggctccaccccttggtgctggcagtgtttggggacattatgctggaaagagctcctagcatcagaggattaacactagcagattctgttccatctttgcactgttgcttacctgctgattttcttaactgttcttgtgcaatcgacaatgtgctaacctgcttttctctttttgtaaacgtttttgcattacaggctgcattcttgccttactgtatagaaaaagaaaaaaggctgggtttactattgcacattttaagcttttatacctttatcttcttggaatggtcagattctgaactggacagtcagaaccacaggtctgctgttaagggattttaaattgtgcatttttaaccctacagtgaaataacttaagatatccctgtgttcacagtgtgaggggctgttttatgtcatgttggcataaattgttttgtaaaagggaaagtgtttctaaaggtgtttcagcgcttgtgctgatacaaagtaagttattactttgcaccaggtggtttggccactgaattaatactgtatagcaagagaaacaatcttatttttttggacaacatgttttattaagttcttcatttctgttgattttttttattgcatttatgattcagtggctgggaattgagaatttatttgaaatagaataggtaacacctcagcgtactatagaaaatgcactcagctcaactgctgtgtttaaaatacacattttaaatccctctttacagacactaacataaaagtacatctttctgggttgtaaacatgtggtagtaccagagtattgtatagtcaatgttaaataaaagccaaaactggaatgtgcagaaagtaggctttggttaatttgtggattcatttttatttttgtctttgtttaactttttaaaaaataagatttctggagtagattggtatattctgttaaagacttacagtgatccattttgcttacactgtcgcatcacaagggactcacccagggaccatgacctgctggtgtgtgtgtatatttacaaaaacaaaacaaacaaaccacccattgggatataaggtagcaatcacaaactaaagactgcggcttgttgaggtgcaataccctgactcccaaagttagttacagtgggttttattgtttttgtgactgaaggatttattcagactgctgtactcttcatttgatgtaacaaaatgctattaatctaaatatttgtaaataaagtacctgtatctagattaaattaaaaaaaaaaaaaaaaaaaaaaaaaaaaaaaaaaaag

SEQ ID NO: 15588 - protein, 215 aa, Homo sapiens
MATAPYNYSYIFKYIIIGDMGVGKSCLLHQFTEKKFMADCPHTIGVEFGTRIIEVSGQKIKLQIWDTAGQERFRAVTRSYYRGAAGALMVYDITRRSTYNHLSSWLTDARNLTNPNTVIILIGNKADLEAQRDVTYEEAKQFAEENGLLFLEASAKTGENVEDAFLEAAKKIYQNIQDGSLDLNAAESGVQHKPSAPQGGRLTSEPQPQREGCGC

SEQ ID NO: 15589 - DNA, 2526 bp, Homo sapiens
  CDS (133)..(1077)
ataagagtcctctcgttggtcccggaggtggggttgcgctcacaaggggcgaccgtcgccacggtggcggccactgcatcgcgtcccacctccgcggccctgggcgccgtggtgtcgacgggccccgagcctatgacgggccagggccagtcggcgtccgggtcgtcggcgtggagcacggtattccgccacgtccggtatgagaacctgatagcgggcgtgagcggcggcgtcttatccaaccttgcgctgcatccgctcgacctcgtgaagatccgcttcgccgtgagtgatggattggaactgagaccgaaatataatggaattttacattgcttgactaccatttggaaacttgatggactacggggactttatcaaggagtaaccccaaatatatggggtgcaggtttatcctggggactctactttttcttttacaatgccatcaagtcatataaaacagaaggaagagctgaacgtttagaggcaacagaataccttgtctcagctgctgaagctggagccatgaccctctgcattacaaacccattatgggtaacaaaaactcgccttatgttacagtatgatgctgttgttaactccccacaccgacaatataaaggaatgtttgatacacttgtgaaaatatataagtatgaaggtgtgcgtggattatataagggatttgttcctgggctgtttggaacatcgcatggtgcccttcagtttatggcatatgaattgctgaagttgaagtacaaccagcatatcaatagattaccagaagcccagttgagcacagtagaatatatatctgttgcagcactatccaaaatatttgctgtcgcagcaacatacccatatcaagtcgtaagagctcgtcttcaggatcaacacatgttttacagtggtgtaatagatgtaatcacaaagacatggaggaaagaaggcgtcggtggattttacaagggaattgctcctaatttgattagagtgactccagcctgctgtattacctttgtggtatatgaaaacgtctcacatcttttacttgaccttagagaaaagagaaagtaagctcaaagaggacaattccagtatatctgcccaaggcagcaacaagctcttttgtgtttaaggcataaaagaagaattctgcatagaaacatggctcatattcgaaattgctctatagtcattagaagccagagaactgctaagtctcctgcaatgtttttctgctttttgccttccccatatatatggaacttggctacctctgcctgaaatggctgccatcaacacaatgttaaaactgacacgaaggatagagtttcacagatttctacgttttattggtggaagctgatttgcaacatttgctaaatggattagatgaatgtacttctttttgtgagcttacttgcctggattgctttaaaattaacctttgtgcaataccaagaaaatagctctttaaaagaatgtctttgtatgtctcaaggtaaattaaggatttactgaataaggtgttgaccaaatccagaccattttattttatttttttatttatttattttttgagatggagtcttgctttgtcgcccaggctggagtgcagtggcgtgatctcagctcactgcaacctccacctcccgggttcacgccattctcctgcctcagcctcctgagtagctgggactacaggcacctgccaccacgcctggctaacttttttttatattttgagtagaaatggggtttcaccatgttagccaggatggtctcaatctcctgaccttgtgatccgcctgccttggcctcccaaagtgctgggattacaggcgtgagccactgcgcctggccagaccattttagaattgggaaattttagtgagaaaaaatgcactgtaaatatgctttagttttaattcagttgggatgcactacctagcgaaaattgagaaactatatacttctcagagaaatatctgaatctattgtcattccattgctattttttttccccagagacttccataatttaaaataaaatcctagatccagttcttgttttttggcataaatacttaatctattttaaatttataaaatctgagcttctaggatccagctgtgtcaacctttatttagcatatataactataaatcacttattacagatgctaaatagatcaccttttacagatgctgaaatgtttgggatatgtttgttgacaaggtaaatggaaatgagaaactttatacttcagttttcagatatatggatctagatcccaaataaatgattaatcttcattggtttctcaaattcaggttgaaatacaaattaatagcctttattgattttacttttatgagtcattgtagacatctataaatataaaagggcctgtacccaaaggatgccagaatactagtatttttatttatcgtaaacatccacgagtgctgttgcactaccatctatttgttgtaaataaaagtgttgttttcaaagcc

SEQ ID NO: 15590 - protein, 315 aa, Homo sapiens [sequence omitted]

SEQ ID NO: 15591 - DNA, 1860 bp, Homo sapiens
gctaaaatgaatgactcttcctgctcacttaaacctgtgctcaaaatgacatatttgtcaggcaccctcttcatttaccttaaagaaggagagtttaatgtccatcttggttctgccctatgaatcatcttgtcaagaacaggtgttcttatgcagaaacaatgaaaaccttatactgaagtgtgaaccctggatttcttagtttcttctgagtcctagaagaagggttggaatagaataatacatttacaggatttaggttggttttctttctgtccagtctcatctgaatttcgtctgtctcttgtggtccagaagttccacagagcaacgcagctgcatgtggtgacaggtagagcagttaaagctgccaataggaactcgtccatattccacacacctggtatagtgttatgccctccatgggcacttacctgcaataagcagaagccactgccacattcccgtgtattgggaaaatggactactgtgtgcgaacaggccctttaccctaatggcagggaagatggattatctttggccagtggagctgccaatctagacatacacattcaactgaatacaattaaaagcagttctttaaatgcaaatataattactcatctttataatacaatagtattaactgcccatatgctcatagtatgatgagccctgtatagcacaaggtcaacaggtcctctccttgtccttacaatctaaagcagatgacactgacatggacaaacaagtgcacatgcatagttgcggcagttttagagaaatctagaaagctaggtagcaacactatgcataaatgttgtggtccaatgcattagtttgctttaacaaaaatctgggaggtattttttctctttattcaggaaggcttcatgaagcaggaagtggtcaaaggagggaaggttactggttaaattatgataggaagaactttccataactagttgcaaaattgagtggtgggtgggttgaggaatgggaaaaagggggagcaaggtgttttgtgtagatggaacaaagggcaaaggatagactgtaaggaaggccagataaagcttggagtagcatgagaacttgaggaatagtatgatatgggctgtgcagcaggcagagagaatcaccttagctgaaacatgggtgttaggagcagaccatgaggtggtagaaccatcatctatagtaaatcaggtactacgctataactattgataaggaaacagctgactgccactgaaagaataagcagttttaggggactagctcctatgggagataaaggtcagaaatcgtagtatctgatgaagatattttgatgagcaggtgagaagaaagataaacatggccagatggccaaggactgggataagtagccgtttcacattcaattagaattctgtggctggaataagatcagggagagcagtaggaagatatagtattctataattcatagcttgttgtgttagagattaattaggattctgctgttgaatcttagtacaaaaaaatctaatatttattaggaattaagggaagatggtacttctgttatgttgcctaagcagacaggaagctacaagaaacaccagtctgaagcagtgcctcaggatctcagatgatttaggaagtgtgctgtaatgtcaaaaaaaaaaaaagtattgtctttagtatatctatgtatagtctcgtgggaaaagcattggttgtggtatcaacagatattctggttccagatgtcttgtaagttaacctgcctccatttccctttctgtaaagcaaaataatgtttacacctaatctgtctctcagggataccatattaataaaaattatgtctat

SEQ ID NO: 15592 - DNA, 2667 bp, Homo sapiens
aatggataaggactaaagtaaaataattgacagaatctagtaaagaattcaagtaggcagttagatatattaatctggaggtcaagggagagatgaaataaataattttggaagtctttggtgcacagttggtttttaaagccttgagagtggataagctgacaccaaaggactgagtacaaagggtaaaaagaaagggtccaaggactaagccctgagacctaccagcatttagggggtaagcagatgagaagggagcaccacaagggactaagaaggagctgctgccgatctccagtgcaacatggaggcaagagcctcattagatttaggtccagagaaaattagaataaagaaattgcaatagggagtgagtgataacttcacacatatctagctaacccacagctaccttgatgggagctctattggtgggaagaggcaggaagagcctgattaagtgggttcaagaaaacctaagaggaaatgagttggatactaccagtatggaaggtctttgaacaggttttgccctacaagggggaagaaaaacgaggtagcagttggagagaatacaagatgaagacagtttttagaaggcagtgatgttacagaatatttgtgtaagacaagccaatagagaggagaagatgacgatgcaagagaatccattgcaggagcaatgttcttgagtcagtgataggggatggaacataatggacaagtggagtggtgtgatcataaatcactttgatgtaaagaccatctcatcaagaactccaacagctttcccccactgcctcctttgcataacaccaaaggtccatctttgtgttctaaccacagcctacctttcatctatgaaaagtgaatactcttctaacttatatcagtctcctcatgtttatacacacatctaggattcctttcttttgtgtactattgagtaaggaaagaaggctatacatattcactagaagctgtactttgagtatccatacaaccatctgattttttactttcagtaagtatagtattcagtaaattacatgagatattcaacacttttgttataaaatgggctttctgttagatgattttacccaattgtaagctaatgtaagtgttctgaccatgtttaggctaggctaagctatgctgttcagtaggttaagtgtactaaatgcatttttggcttatgatattttctaattaccatgggtttattgggatataacctccatggtaagttgagaagtgtctgtacctggtgaagcattgtattggccaggtctggaagccacatatatcacttctcgcatcccattggagaacagttagttacatggttgtaccagatcacgagagaggctgggaaatgtattgttgctggacatctagctactttattacggtggaaaaagtgtagcatgggtttgggtggacagctagcaaactctttcttaggcatcttttatgataccagtagctctttttgaatatgaatgcgcttatacaattttaagcaataaaacataaaatgtacaaaagggtacaaaaaggaattcaaatatgccattaatcctttcttaacgagactctatcaaatattctcctcttagagctcaaggttagaataatgaacctgttttgactaacagcattcctgtagccttcagattgagctgtttgtatattgagagaggcatttttgtgtgtgtcctctattaaggttttgtcagcattttacagttttagaagatgaatttgtttttgttccaagggtttttaagtgcttcagtcagtggtcaaacaggttttgagcctagctttcaatgccaacacggagagggagaaagaaaaataatcaaaaacaaattccacagtctaaaatgaacttttatcaaggcttttgctcttttagacttgagtttatctttataattaaggagaatggtttttaaaatttagttcctctgacaccccaaaattatcaaaataaattatgttgtagtgaatctgtgttttgaaagtcattgataggacttatatgagtcaaaattttatggattgtaaactaggctttatctggttggaaataattgcaatacaagaagcaactttattaaattagacctaaagtcacaatcttcttctttgctgctttttaaaaattacctattacctttaaaagatcccaaatttagaagaggaattaaaataaaagttaatgcaataacacacttccacaatattctattacttcaacctctaatcaatgaaaacattaatggactactcttactacgcctggtagggatgtgtttgggacataaaacagtttaaaaccttcaaaagacaatgactcaatattttcttgttagacaagtactattagcacctacagcacatttgaaggtctaatggcatacttctgaaaagcattctgcatttcagcattattttgacctgtacattacacttttcccttccctcatcttagtgaagtagagagattactgatctatttctttatcttaatcattcctccctaaccccaagacaaagaatacaaattagaatttacaaaatgtattgtgcccatggaaatacatagttttgttactgtactcatagatatttactacccttgttagtttcattctg

SEQ ID NO: 15593 - DNA, 1731 bp, Homo sapiens
tttattaaatagggtatcctttcccattgcttgtttttgtcaggtttgtcaaagatcagatgcttttagatgtgtggtgtcatttctgagggctctgttctgttccattggtctatagatctgatttgttaccagccccatgctgttttggttactgtagccttgtagaataatttgaagtcaggtactgtgatgcctctagctttgctgtttttgcttaggattgtcttggctatgtgggctcttttttggttccatatgaaatttaaagtagtttttctaattctgtgaagaaagtaatggtaacttgatggggacagcaatgagtctataaattactttgggtggtatagcagtcaggcacagaaatgtccttgtgttaggcaataccattcaggacatagccatgggaagagtcttcatcactagaacaccaaaagcaatggctacaaaaaccaaaatttacaaatgggatctaactaaacttaagagtatctgcagcgcaaaagaaactattatcagagtgaacaggcaacccacagaatgggagaacattgttgcaatctatccatctgacaaagggctaatatgcagaatctacaaagaacaaatttacaagaaaaaaaaaccatcaaaaagtgagcaaagggtatgaacagacacttaccaaagaagacatttatacagccaacgaacatgtgaagcaaagcacatcatcactggtcattagagaaatggaaatcaaaaccacaatgagatacaatctcagaccacttagaatggtcatcgttaaaaaatcaggaaagaacagatgctagagaggatgtggagaaataggaaagcttttacacagttggtgggaatataaattacttcaaccattgtggaagacagtgtgacaattcctcaaggatctgcaaccagaaatatcatttgacccagcaatcccattactgggtatatacccctaaaattataaatcatactaatataaagacacatgcacctgtctgtttattgtggcactgttcacaacagcaaagacttggaaccaacccaaatgcccaccaatgatagactggataaagaaaatgtggcatatatacaccacgaaatactatgcagccataaaaagggatgaattcacgtcatttgctgggacatgaatgaagctggaaaccatcattttcagctaactaacagaagaacagaaaaccaaacaccacatgttctcactcataactgggagttgaacaatgggaacacatggacacaggaaggggaacatcacacactagggcctgtcagggtggggggctaggagagggatggcattaggagaaataactaatgtagatcatgggttgatggatgcagcaagccaccatggcatgtgtatacctatgtaacctgcatgttctgcacatgtaccccagaacttaaagtacaattaaaaaaaaaaagaaatttgcttttaattaagcttttaatcatagaacttgtgaagaaaatccttttgaatcttttattaccacatcatagctgggacaaactgctgacgctttaaaagtaacacaaatatcaaacaggaagaactagacttaggaaccaaactcaggtttctgtagtgaacagggcacaatcttcacattgggtcaccaccactactccttcagtttagccttggctagcaaaagggtggccttgttatgtagatgagaccacttatgt

SEQ ID NO: 15594 - DNA, 2474 bp, Homo sapiens
  CDS (1358)..(2047)
atagcacagctgccagtagacccccggtcaccctgaggctggtggtccctgctagtcagtgtggctctctcattggaaaaggtggatgcaagatcaaggaaatacgagaggctggagtgcagtggcgcagtcatggctcactgcagcaaaacatcgaccttcccagcctcaggcgatcctctcatctcagcctcccaaggagccgggactgcaggctcccaccaccacacccaaatttttgtatttttttgtaaaaatggtgttttgccatgtggcccaggctggtttcgaactcctgagctcaagcaatccacccacctcaggctcccagtgttattactacaggcttgagccagcacacttgcttgcctgcagcgtcatttttcttgaccagacttataaacaacaaggagaaaaataggaagatgtattgggaaatagatgtaattctacatcttttttttttttttgagacagggtctcactcaggctgaagtgcagggcataatcgtgatcatggcttactgcaacctcgacttctgggctcatgtaaccctcctacctcaagcctcctgagtacctggtaccataggcgcgctccacaatgcccggctaatttttcttctttctgttgttgtagagacgagtctcactgttttgctcaggctggtctccaactcctgagcttccgatgattcgactgccttggtctcccaaagtgctcggattacagatgtgagccactgtgcctggcccctacttcctgtttaactatggaagttacgttgaattatggaagattttaattgtatctagatgttactgaatttggtgttggaatgaaactcgaatggctgcttgagtttttgggagcgtatcgtacatggcacgacagagatcttaattttgttaattgctatattcgaagcacttctcatggtacctggcacatagaatggccttgatgtaaatattttttcagtaacataatgaaaggtgggtgatacttgtggggcttttgcttcgcccagagaactatcattagttgaaaggcaactatttagaaggaccttttgcttgagagtaggttaaatttaggctgttattcacgcttattcttgtctttcagtggctaatttatttttaactctaattcactaaacagtcctatctggaataagggaagagtgggacaaagaacaaaaagggaagattggaaatggataaatatctactagagttttaggctctgaaattgctgctggaggaattggaagagcatgaactgtttttctctgattttgaatttctttttactccaaagagtacaggggctcaggtccaggtggcaggggatatgctacccaactcaactgagcgggccatcactattgctggcattccacaatccatcattgagtgtgtcaaacagatctgcgtggtcatgttggagactctctcccagtcccccccgaagggcgtgaccatcccgtaccggcccaagccgtccagctctccggtcatctttgcaggtggtcaggacaggtacagcacaggcagcgacagtgcgagctttccccacaccaccccgtccatgtgcctcaaccctgacctggagggaccacctctagaggcctataccattcaaggacagtatgccattccacagccagatttgaccaagctgcaccagttggcaatgcaacagtctcattttcccatgacgcatggcaacaccggattcagtggcattgaatccagctctccagaggtgaaaggctattgggcaggtttggatgcatctgctcagactacttctcatgaactcaccattccaaacgatttgattggctgcataatcgggcgtcaaggcgccaaaatcaatgagatccgtcagatgtctggggcgcagatcaaaattgcgaacccagtggaaggatctactgataggcaggttaccatcactggatctgctgccagcattagcctggctcaatatctaatcaatgtcaggctttcctcggagacgggtggcatggggagcagctagaacaatgcagattcatccataatccctttctgctgttcaccaccacccatgatccatctgtgtagtttctgaacagtcagcgattccaggttttaaatagtttgtaaattttcagtttctacacactttatcatccactcgtgattttttaattaaagcgttttaattcctttctctgttcagctgttgatgctgagatccatatttagttttataagcttctccctggtttttttttttttttggttttttttttttggctcatgaatttttctgtttgtcatggaaatgtaagagtggaatattaatacatttcagtttagttctgtaatgtcaggaatttttcaaaaaaattaaaagatggactggagctttttctttgtgaatagaaactggatgccacagtgattcatgtgggttttat

SEQ ID NO: 15595 - protein, 230 aa, Homo sapiens
MLPNSTERAITIAGIPQSIIECVKQICVVMLETLSQSPPKGVTIPYRPKPSSSPVIFAGGQDRYSTGSDSASFPHTTPSMCLNPDLEGPPLEAYTIQGQYAIPQPDLTKLHQLAMQQSHFPMTHGNTGFSGIESSSPEVKGYWAGLDASAQTTSHELTIPNDLIGCIIGRQGAKINEIRQMSGAQIKIANPVEGSTDRQVTITGSAASISLAQYLINVRLSSETGGMGSS

SEQ ID NO: 15596 - DNA, 3507 bp, Homo sapiens
  CDS (1524)..(2093)
acaagtctttaggatccaaactttccctcatcttcctgtcttcttctgagccctccacaaaattccaacctctgtccactatgcagttcaaaatcgcttccacattttcagatatctttatagcagtgccccactcctcagtatcaacttcctgtattagttcattctcacgctgctatacagagacacttgagactgggtaatttataaagaaaagacattttattggcttatggttctgcaggctgtacaggaagcataagtagcttctgcttctgggtaggcctcaggaaactttcaatcatgtcagaaagtgaagcagaagtaggccatgtgttacatgcatggctggagcaggaggaagagaggtagaagggaggtgctacacacttttaaacaaccagatctcatgataactcactatcatgagaacagcaccaaaggggaaattcacctccatgatccaatcacctccaatcaggccccacctccaacactggggattacaatttgacatgaaatttgggtgatgacacagatccaaatatttccattctgttgactgcaatctacctaattccattaggtttaatgggataactcaagattcagaacaatataattactctatttacctttagaatggcctaagacaactaatcttgtaagccggattggctttcatacttcattttttcaggccactattggccaccactgtttcagggatttagcagattatttgccaatctgggttatgtataacagttctgctttatatgatgtatttaattcaaggaagcatgtgccatgtgaagatacaatcaaagagataatatgaaatcaaatgaaatttactttcacgtaagatctggtaacattatctatatagtatgtgtgtgtactatttatcacatatcagtatttacaaatactgtttaaaactagataaattaaagtactcttcttttataggtgttgtcagtgctaaagcattcattgctgtcttttaagagacgaagagccatggagactttgaaactttactttttgttttccttgcagctccttatcaaagaggactatttaaataaaaagggtaatccaaagaaatttgcaggacttgcatcatatttgcatggtcatgaaccttcaaatcttgtttttgtaaattttctcaagagaggccttttccataatctctgtaagccagcctggaaaggctcacaacaattttcccaagatgtgatggaaaagctcgtgttagtattggcaaatttgtttggaagaaaatatattccagcaaaattccaaaatgctaatttaagtttttctcagtcaaagacacaacaacaaaataataacaagcaaacagaacccaagaaaatgtgcattagaacctgggaatgtagaagaagcttgtttctatccagtaaccctaatgaatagagaacaaaaaggtgatccttgccgaactcccggaggattttaaagctgctttatatgagtataacctggcagtaatgaaggattttgcctccttcctgctgattgcttccaagtcggtgaacatgaaaaaagagcatcaactccctttgtcaagaatcaaattcacaggtaaagaatgtgaagactcccaactcgtgtctcacttgatgagctgcaagaaaggaagagtagccatttcaccatttgtttgtctttcggggaacacagataatgatttgcttcgaccagagactatcaaccaggtcatcctgcgcacagtcggtgttagtggcactcaggctcctctgctgtggccatggaaattagataaccgaggaaggagaatgccactaaatgcatatgtgctcaatttctataaacacaactgcttgacaagattagaccaaaaaaatgggatgcgtatgggacagcttttaaagtgtttgaaagattttgcattcaacattcaggctatcagtgactccttgagtgaactatgtgaaaataagcgtgacaatgtagtcctggcatttaaacaattgagtcaaaccttttatgagaaacttcaagaaatgcaaattcaaatgagtcaaaatcatttagaataacaccatggaaaactttcaagtctgattatgtggtatttatccctttgcaaggagagatataattaagcttacacaatgaaatggaaaaaatgtttgtcttggagtcaaacagaattaaactcagataccagctctgctattttctaactgaatgactttaagttatgtaatatatctgagctttaacttcatttttggcaaaaccagagtaaaaatgaatacctctagttgttttgaggattaaatgagataatgtaagaaaagtgattgggattgggtggtgacttaatgaacggtagtggtcttttaagtagttaatgtatagcaaaattagtttcacattgtcaagttttcaatacatccccaagttaattgaattttaaattaatgatcaataaatcacaaaggacccaaatcaattctgaacaacaatttagttatgtaagaagacttctgagattacaagaaactcactgctgtggactggatgtttgtgccctcccctccaaaatttttatattgaaattctaaccctcaatgtgatggtattaggagatgataggtcatgagggtggagctccttggatgtaattagtgcctttaacagagagacaagagagcttgttctccaatctctgctcactaccactggatgatacaatgggaagatggccatctgcagaccaagaagcaagccctcaacagaactgaatctacttacaccatgatcttgaactttccagcctccaggattgtgagaaatacatgtttgttgtttagccatctagtctgtggttttctgttgaagcagtctgaattgactaaaacagtcacttggagtagttataaaccactttcctgttgaaagcagaacatgctgattcaactgttttgttcaatagcaatgatagattttgtttaagtcccctacactttcttatttctaaatgatcaagagtacacttcctggcagtgattaaggagtgtgtatctaacagaaaaaatatatataccctgtgaacccgaatatggaattcagattgtttctgccctcagtatcatacttaaaaaacaagcatacaaacaaacataagggaacaaacagcaaccataacaaaaacaaacctttaaaggtgcgtttttgctgtgataaatgaatacggtactctgaaggagaaaaaagtttctcaaatgagcttaaactgcaagtgatttaaaaattagagaatataattcttaaagctattgaaagtttcaaccagaaagcctcaagtgaattttgtatgtaaatgaaatcttgaatgtaagttctgtgattctttaagcaaacaattagctgaaaacttggtattgttgtagtttatgtagtaagtgacttggcacccatcagaaaataaagggcattaaattg

SEQ ID NO: 15597 - protein, 190 aa, Homo sapiens
MKDFASFLLIASKSVNMKKEHQLPLSRIKFTGKECEDSQLVSHLMSCKKGRVAISPFVCLSGNTDNDLLRPETINQVILRTVGVSGTQAPLLWPWKLDNRGRRMPLNAYVLNFYKHNCLTRLDQKNGMRMGQLLKCLKDFAFNIQAISDSLSELCENKRDNVVLAFKQLSQTFYEKLQEMQIQMSQNHLE

SEQ ID NO: 15598 - DNA, 2400 bp, Homo sapiens
tatctaaatatttttttctttgaaagcagaggctgtgcatttcatctaggcacatagcagaagctcactaaatttttactaatagagctgattcatattttagctagtaaaacggttatgtcaaggcagtagcatttcatcatgacataccaaaatactgacttatattcttactgggatgtgttcttccatgggtgtgactatagcggtatctctaggcagaggcaaaatatttttcaagaaacagtctacgttcctgagtaagtactctgttgataccctagaatttcatgccacgcaagatggcagggatccctgtaacaggaaaatgtggaaagtgccaccagttgtccatatcaattctaaggtgactgaattcttcacaatagttgagttgaaataatatcatgtcctattgggcctagcagaaggaattgggtaaaaatatgttcctccaggaattgccctgctgaactgactttgtttggtatttaccttgtgtaaactagaaaatagctgccaaaaaattttgaatttggatatatttgatgatgagcttttccttctcttactagttagacaacaggatccattgcttcttgaaatatttctcaggttgtgataataaaaccatttgaactatttggagaacagcacatataccctgtttgcaacagcaggaagtatcactttattcacatttataaagtgtataaataagttgaaaagaagtgtgtatgtgtttgtggaagttgaaggagtcagttttctttctgaggatgaggtgtgatttcttatttttttatgtttatttttggtgattttataactttatttgatgtatttgatgatcagcagttagttctcatccacaatgactgtctgtagatttttgaaagtggtaacaggtgcataggtaaccaaagtgtagaactcatttggtagatcttcatccttattatgttttctcgacagccacacatggatatggtatggcacattccttattcctttggcccagacagctttgttgagcctgctatcagtgcacagttctggagttcccctctccctcatgacagatttccagatctctttgagtgcctgatgggcatgcttcttgaagcccactccatggatgcacttgtgaatgttgattgtatgctcaggtcaccacctcattgatgggagaatgacccttcttctttgtgggagccattctagtgggcccacgttgggggtgtgatttttaaaagtgaacaatcaggttttatttctcagctggtttttttctgtcaactggtagaataatttttttcacgccttttctctgcagagcaagctacctgttggacagtagagaagaagtggtcattgctgtggccaccagaggcttttctttatctagtgcggcaacatcaccttctgctggtgaactttatgatcactcaaatatgaattttatataattttcatgtgtcacagaatactgtttttttttatcttgaaaaaaactttttgaaatatagaaactattcttagctcatgggccacacaaaaatagttgtagttttcagatacttcaccaggacttcttcagaaagaatcacataatattgctaatggaagaaggatatagatgaaaaaaagagatgattcatgtatggttttaatcacatggtaggggtgaaaaccgtaagtgtcaaatgagaaaatggaaacaatgttcagtatatcatggtggtagcagtagtaaagtaagttaaataaggttagagactgctctagttttaggaagaatttctagggctctatgacccagtctctgttgaaacacgaaggaatcaatgaggaaagatttgaaggaaaccgggaaagatttgaagtttacatgaaagaaatagttatagtatttctcccaataaaggagaaaggagagaataaaataggaaatcagatctctcttcctttgagatagtagaaaaacacaataaaatggatgcatatttagagaaattttgagctttaagcgtgtggtggcatcttggtttgaggtggagtaattagttgtgaaaaccagcaactcttatctgattaagaataaggaatggacaggcgcagtggctcatgcctgtaatcccagcactttgggaggccgagacgggaagatcacctgagatcttcctgacctggagttcgagaccagcctgaccaatatggagaaaccccgtctctactaaaactacaaaattaacggggtgtgttggcgcatgcctgtagtcccagctacttggaaggctgaggcaggagaatcacttgaacctgggaggtggaggttgtgtagagccaagatcgcgccgtggcactccagcctgggcaagaagagcaaaacaccgtctc

SEQ ID NO: 15599 - DNA, 2459 bp, Homo sapiens
  CDS (6)..(1640)
tatggatgaatactgttgggccctaccataatcgtcaagaaacatataagtacttttcacttccattctgtgtggggtcaaaaaaaagtatcagtcattaccatgaaactctgggagaagcacttcaaggggttgaattggaatttagtggtctggatattaaatttaaagatgatgtgatgccagccacttactgtgaaattgatttagataaagaaaagagagatgcatttgtatatgccataaaaaatcattactggtaccagatgtacatagatgatttaccaatatggggtattgttggtgaggctgatgaaaatggagaagattactatctttggacctataaaaaacttgaaataggttttaatggaaatcgaattgttgatgttaatctaactagtgaaggaaaggtgaaactggttccaaatactaaaatccagatgtcatattcagtaaaatggaaaaagtcagatgtgaaatttgaagatcgatttgacaaatatcttgatccgtccttttttcaacatcggattcattggttttcaattttcaactccttcatgatggtgatcttcttggtgggcttagtttcaatgattttaatgagaacattaagaaaagattatgctcggtacagtaaagaggaagaaatggatgatatggatagagacctaggagatgaatatggatggaaacaggtgcatggagatgtatttagaccatcaagtcacccactgatattttcctctctgattggttctggatgtcagatatttgctgtgtctctcatcgttattattgttgcaatgatagaagatttatatactgagaggggatcaatgctcagtacagccatatttgtctatgctgctacgtctccagtgaatggttattttggaggaagtctgtatgctagacaaggaggaaggagatggataaagcagatgtttattggggcattccttatcccagctatggtgtgtggcactgccttcttcatcaatttcatagccatttattaccatgcttcaagagccattccttttggaacaatggtggccgtttgttgcatctgtttttttgttattcttcctctaaatcttgttggtacaatacttggccgaaatctgtcaggtcagcccaactttccttgtcgtgtcaatgctgtgcctcgtcctataccggagaaaaaatggttcatggagcctgcggttattgtttgcctgggtggaattttaccttttggttcaatctttattgaaatgtatttcatcttcacgtctttctgggcatataagatctattatgtctatggcttcatgatgctggtgctggttatcctgtgcattgtgactgtctgtgtgactattgtgtgcacatattttctactaaatgcagaagattacaggtggcaatggacaagttttctctctgctgcatcaactgcaatctatgtttacatgtattccttttactactattttttcaaaacaaagatgtatggcttatttcaaacatcattttactttggatatatggcggtatttagcacagccttggggataatgtgtggagcgattggttacatgggaacaagtgcctttgtccgaaaaatctatactaatgtgaaaattgactagagacccaagaaaacctggaactttggatcaatttctttttcataggggtggaacttgcacagcaaaaacaaacaaacgcaagaagagatttgggctttaacacactgggtactttgtgggtctctctttcgtcggtggcttaaagtaacatctatttccattgatcctaggttcttcctgactgctttctccaactgttcacagcaaatgcttggattttatgcagtaggcattactacagtacatggctaatcttcccaaaaactagctcattaaagatgaaatagaccagctctcttcagtgaagaggacaaatagtttatttaaagcatttgttccaataaaataaatagagggaaacttggatgctaaaattacatgaataggaatcttcctggcacttagtgtttctatgttattgaaaaatgatgttccagaaagattacttttttcctcttatttttactgccattgtcgacctattgtgggacatttttatatattgaatctgggttcttttttgacttttttttttcccaatccaacagcatccttttttttaaaagagagaattagaaaatattaaatcctgcatgtaatatatctgctgtcatcttagttggaccaacttcccatttatttatcttaaaactatacagttacatcttaattccatccaaagaagatacagtttgaagacagaagtgtactctctacaatgcaatttactgtacagttagaaagcaaagtgttaaatggagaagatacttgtttttattaaacattttgagatttagataaactacattttaactg

SEQ ID NO: 15600 - protein, 545 aa, Homo sapiens
MNTVGPYHNRQETYKYFSLPFCVGSKKSISHYHETLGEALQGVELEFSGLDIKFKDDVMPATYCEIDLDKEKRDAFVYAIKNHYWYQMYIDDLPIWGIVGEADENGEDYYLWTYKKLEIGFNGNRIVDVNLTSEGKVKLVPNTKIQMSYSVKWKKSDVKFEDRFDKYLDPSFFQHRIHWFSIFNSFMMVIFLVGLVSMILMRTLRKDYARYSKEEEMDDMDRDLGDEYGWKQVHGDVFRPSSHPLIFSSLIGSGCQIFAVSLIVIIVAMIEDLYTERGSMLSTAIFVYAATSPVNGYFGGSLYARQGGRRWIKQMFIGAFLIPAMVCGTAFFINFIAIYYHASRAIPFGTMVAVCCICFFVILPLNLVGTILGRNLSGQPNFPCRVNAVPRPIPEKKWFMEPAVIVCLGGILPFGSIFIEMYFIFTSFWAYKIYYVYGFMMLVLVILCIVTVCVTIVCTYFLLNAEDYRWQWTSFLSAASTAIYVYMYSFYYYFFKTKMYGLFQTSFYFGYMAVFSTALGIMCGAIGYMGTSAFVRKIYTNVKID

SEQ ID NO: 15601 - DNA, 2750 bp, Homo sapiens
atttattttgatgtcggcggggtgtgcagatgaccctttcctcacgccgtctccgatattggtgttcaccaaaacatctttatccagtagtgcaaaatgtcatgctaaccttgtcttagtttcacgtctttaattctgaaacttgaaacaaaaacaatgcatcagtgggccatggagacttcttcttctgtgtatgggatactgtgtcttttattcttctattctggtatgtcctccctgatttctagtcatttttgaattatttatagacagtaaacattgcccaatatattatgaaaatgtgtttccactttattgttgcctctgaaaacattttgaacagaagcttttataagcaaggcttgaatttttcttttttatgttgtcttaggtttgtgtgagtttccacctttgtgtaacacatttttccttttaacagaaccattttatcactgtctctcttccttcttgggaaaaagaaaaccatctttttcttttcatttgcattacttacaactatgaattgatttatagagtgctaaaatatttgtaaaatcgagcagattcttctgtgtgcctttttctcctggtgatttatttaaatggatttctaaggtgttttcccgtcagtattgatttgttttggtgagtacgattttatgtgcgctatttgtctctctgtttctgaactatagcaacatttttgtgcattctctcttactctccactgaatgatgaacccttgtgaacttccaattgttttctcttcatttcttaatgtttctgagaagaccgacatattatttgtaagtgattttaaaatttgtctccttttctatgttttttcgttgtcttcagagtgtcttcagagtgcattcgtatttttgttgaattggctttgctagagaacacatgatggctttaagtatgagtgaagagagtagacattttttattcctgatttcaaggtaaaaacctaaagaggttcacctgtaaataaaataaattgtctttacaaaaccagatactcattccaagaagatctctctattctagtatacttttttttctaaacatacaatagtataggttctcatactgtgagacttcttatttctttatacacaatatatttgaaaagtcattggttttttagtgattactaatgtactgttacatggttttgaaaagtgttggattcaaagtttccttcatttaagcctcttttttctcccttccccatataaaaagttgatgatggccaggaatagaggttcacacatataatcccagcactttgggaggctgagatgggagcatcttttgagcccaggagttcaagaccagcctgggcaacatagcaaaaccccctctctacaatgaaatgaaaaattagccaggcttgttggcacatacctgctgtcccacctgcttgggaggctgaggcaggaggattgcttgaggccaggaggcggagcctgcagtgagccgtggtcacaccactgcactccagcctgggtgacagaggaagaccctgtctcaaaacaaaacaaaaatggttcctcgactttagttaggatttgaaaagcttagaactggaaggcagcctctgaaattatcaagaatgtcacagcagtttgtggaacacacctgggtgggtagacccactttttagacactctctagcccaaatctgatcacagtcattcttcctcacctcttagggtctccctcacagaaggtgttgggggccttggacgagatgttgatgggatgggaataaacaggagcaaataatgtgcaggcgaagttggagttcctgctcagtctgggaggagaattgatttatgaatttctttctttctctctttgtatctatctcttctttctctctctctctctctctccccccagccaccttctgatctctaatccattcatgtgagagaagagtgatgtgaaaatggtcagcaatttgctttttctgatgagatcctggtgagagtcatgttcaataaagtatttagtcacgtggggctccagtgatttctctgtttacaagctcattccttcctcattttctcagaactttggtgttaacagcctgtttcctatttgtaggggctgactttgacttagcagatgcctttcgtgatggaggaaataacgacccagcacctcttaattcacccaagctgaagccaaatgcgaaccctgagcagcctggattcattggggatgactttgacttagcagatgccttacatgacaaaggaaactacgagccagcaccactgaacccacccaaaccaaagccaaatccaaaccccaagcagcctgattccaccggggatgactttgatttcacagatgtttcttcatggtgaacgaaacagggagttgcctcgattctgatgtgtttgcttcggtgctctgtgtattgtattcatcccactcttcaattcataaactctggagattcttcaattcactgggcaaaccatatgcctaagtctatcctctgatggaggctcgtacatgcaaaatccaatagcaacctgggaagatttcagtcaagacccaagaggaggctggcatcaggctctcggtcaccgatcttcacattcaggtttcctgatgcactttgcgactctttgggcaacctctggactccttgttcccagggtccacatttagttttatctttactgcattgcttttatgaaaaagaataaaattggatgaaacag

SEQ ID NO: 15602 - DNA, 2076 bp, Homo sapiens
ttgcttatcaatttagagctcttctatggaaagagggtgaaaatctgttttgtgcctcttttttttgtatgtaaatgtgcaattatactggattttctcttgtaaaaaacactacaattcttttactgaagctcctaaactgccatttgcctgactccagcaattaattctgcggtgactcattgggcttccagtacttctgttgattggatatggtcccaaaagaaagagcaaaatggaaaatgcgatccatgtcaccaaatataattgctacaagtaacatgaaatacagctcaccaaaacactaaactttgctcttgagcaattatatagttcgatgtccttttaaaaaataagaaaagctaggttttatcatactaaaattttattttgtatatgatgtttggttttttaaacttactaacataaggatttcctttaatattccaaatacagttcttgaaacagtatccaacatgaaatcttatctccttgcttttagacttagtgctatttactatctaaagacttttctatggtaagccagggtacatcctatatactacagataccttaggtttcagtatttttatgcagcttcttcattgtgccacattttgttttcatatctgtaacagagctctgctgaaattaaaaaaaaattatgattaataggattgtttcaccatttcagaaatcagagtagaaaacaaaatagctgccaggtgcagtggctcacacctgtaatcccagcactttgggaggccgaggtgggcagatcatgaggtcaggagtttgagaccagcctgaccaacatggtgaaaccctgtctctgctaaaaatacaaaaaggagccgggcatggtggcacatacctgtagtcccagtttctcaggaggcagaggttgcagtgagccaagatcacatcactgcactccagcctgggtgacagagcgagactccatctcaaaaaaaaaggtaaccatagttctgaagtctttggccatgaatgttctttaatggtctaaaaagcggttttagtcatgctggtgccaaggagttctcctcacacctccatagcgtcaatgttgacctatttgatatatttttaagttgcagattatagatgcagaaagagaaaattgtcctttatgtgtgcatgagtatacatgcactgtgcctgtgatacaccaatgaaatattccaaaagacattgctcactcatagtctgaagttggtatttgttaacttttaaatctatatgtggtcagagtgtaagtggctggtttttattcttgtccaacaatgaaataacttaaagcagcatgggctaatggtggtattttttttaaccacatgttaatttgttgaaggaagaagtgaacataagatttttgataatcagcctaaagcttcagaaactggatcagtaagagctaaagatgaaatcctgggaaactttctcaggcactgtgcaggggagggaggggctggaccgccactgctgcgagggaagaatcagaagagctgcctgtggctggctgagaagggcaaggtggatggctcttcattcctggaaggctgaagcagccagaggcagtgattcacctctttaatgtctaatcagggagagatacaggagtgaggtgggttttattttcatttttgttttaacaagttcccactcttatcttaactctcaaaaatgatctggcctcatctatagaactggctgagttggggaatcatttaaaatttgggattttctgtacaagtcaagaacatatgtgaaagctaaaaaagtaatggaggcagggggactgctcccagctcccttctgccatttacacgaaatatttgaaaacatgtctgtaaataacgttgtggaactgagatattgagtatctaatcatgtaaaggaccctcagatgggacaggctattgggcaactttcctggttcatgaagtggaatttcctttttgagtagtttcttgcatggtgtattccaataggtcaaacccagacctactgtttgcaaacaggccatctgtagagaatacaatctctggactgccc

SEQ ID NO: 15603 - DNA, 1903 bp, Homo sapiens
agaaaaaagataatatactaattcttaattttagtaagtagacagttgtagtgtatggatgttttgttaaatctttgttgatacagaatatataatttcctttttctgtttgtgtgagaagtaaagattgaacaaaaatatgtgagtgctaaactgtctttaaaaagtagataactatatcaaaaagagtaaggaccagtgggcaccatgcagaacaagcaaatagaagctcagcctttgagtagcagctttggtagtatacaaaaatgaactgaaaataggaactcagcagtgttttaagatgacagattaaacaaacatcccaccagaaagaggtaatcacttagactaatttcctcatcccctaggataaaatcttaagtcagtgacttgaaaactattttgacccaatccattgagaaatgcatttttacattgcagcccagcacacacatatgtataactgaagcaagagttgtacttaacaatacttacttatccgtgtgttatgcatcttgatatttcttattctcttttaccccttcctctgtgtgtctgtgtgtattctttttcccccccacccacccgataccgttcaggaaacactacgttgatttcattacctgctaatgtgttgcaacccctttgagatgatcctactagttatgatgagatgcttctaataaaagttacaccagtagaaaatgccaatatttcataaggccaggatgatgacttagatagtactaatattactacactttaggaaagttcatttcattttatttttaggaaggacactaatagagttccataaaagaaaagtctttagtgcatgttatttattattcagggtgtagatactattttaacttccacattctaaattatagtgtgggtatcaatctatgaagtaggtgctgacaagttgtcaacattactgacttttatggtgaagttttaaatttgaatttttattcaaatataaatgaaaagaccattttctcaggtaaaaaaatctatcatgctttgatgcttttcactttaattgaaaaaagactcattataaaagtacaatgcaagaaatatttagaaaaatattcctgatctccagttgttactgtacctagatttttcttgggacctatgtgataaaacttatcatgattcttgaagaaatagaagttcgtacaactgttatcagaatttatataaaatgtttctcagaaaatgtggtttctccagctcgagcattctataactctaagccaaattgaaagagcagattgatgggataaaacacaaagtatggaaataaataataaactgctaccctgaaaaagcctacctctgcacattgtttaaaaattggaaaagatcctacttctgtgttctgatattcaatgcaagtcattagagtaaggtgagactcttcctgtggattcagattgaaatcagggacggtgtagggaggccatggtcaacttttgagctacccttgagggaagaaattaattgatcaaatattaactgcccaagtatattcacaggatggccatccagtaatgagaatgaacagtctccaactaaaggcaacaatatagatgaatctcggaaacatgatattgaccagacagaaaagattccacttacataaacttcaaaagaagataaaactgatctatgacattaatagtcagaatattcattatccttgagggaactaaactgggaagccacatgatagggcatctggaagctagtaatgtcctctttcttgatctgttacattggtgtgtttatttcattagatttattgagctatacatttaccaccgtgtacttgtctctgtatatgttttgcattgaaataaattttaccaataaaatgataaagcaaaat

SEQ ID NO: 15604 - DNA, 2496 bp, Homo sapiens
  CDS (196)..(588)
gatcgggggcgcgaggcctcacggagctcgtagtttcccggacgggccgctcccggcctcgcggcctcgcctccccacactacaactcccacggggcagcgggcgcggctccccgtacccaccagctggccgggcagggcagccacttcgcggtcgggcccgccggctgcgggcacccgcgcgacgggcgggaagatggcggacgtggtcgtgggtaaagacaagggcggggagcagcggctcatctcgctgcctctatcccgcatccgggtcatcatgaagagctcccccgaggtgtccagcatcaaccaggaggcgttggtgctcacggccaaggccacggagctctttgttcaatgcctagccacctattcctacagacacggcagtggaaaggaaaagaaagtactgacttacagtgatttagcaaacactgcacagcaatcagaaacttttcagtttcttgcagatatattaccaaagaagattttagctagtaaatacctgaaaatgcttaaagaggaaaagagggaagaagatgaggagaatgacaatgataatgaaagtgaccatgatgaagctgactcctaaaccaaaagtgctttaaaaaccagcctggcgaggacagccctggacccactccactgtctctaagtaaacacagcactgcccgcttttagcgtcttcacttcttcacagagttccagtgcgtggtattctttcgaggtattctttccaggccgagattgagcacctcatgtacctacgccacagacagccagagggaaagcgacccagacagcagcccctcctcgacaggcccaccctgcagctcaggcaccaagaaaacagccgatactggcagccattgcagctccaaactgcagaggcaaggccaattttaacttttcaatttacagtcgattttgaagagcttctacatatcggttatgtaaattcatatatgtatttttggaatcagttcttataaacagctcgattcagttttagctaaatttatagtttaggtagtatgttacatttgaatttttgtcttaagaaaagttgactgttcagatatttttctactgtaaagaaatatacttttctattaaagatctgtacatatttttacagtaaaatgctttatggaactagttttagagccctctatggctttaaggccttgcttactgcctgcaaattttgagaaatttaaaaataagcattctaacacttttattcccacagaaaaattccaagtcaaattatcaaatcaaacacaaaaataagtcttacctcttgtataagcatgttgtactaaaaaaaaattttgaaacattttgtatattggagatctctctcatcttactgttctttgctttaaattcctggcacttctttttactgtctataagagaaaacctatcataagcccaatttttttttttccacttagggtaaatgtttggctcttctcatttcattatcttttttttttttttttaaagacagattctcactcagttgcccaggctggattgcggtggcgctgtctcagctcactgcaacctccgcctcccaggttcaagtgattctcctgcctcatcctcctgagtagctgggattacaggcgtgtgccaccatgcccaacctatttttgtattttttagtagagacggggttcaccatgttggccaggcttgtctcaaactcctaacctcaactgatccacctgcctcagcctcccaaagtgccgccgggattacaggcgtgagccaccatgcctggccttcattatctcttttttaaaaatgaaaaagtttataatttacattcagtaaaatcaccctttttagtgtctagtctgtgaattttgacaaatgcatggttttgtaaccaatcgataggacagttctgccacccaggacattcccctctgttcctctgttcctctcttctcctgccccctagcaaccactggtgttttctgtccctcttgttcattgacatttattttaaaataaaatattttaaaatctactttttggtgtacagttctgagttttggcaaatgcagtcaagtcactaccaccaccacaattaacagctatatcaccctccagtaaattccctgtggtcagctccttccccaccttttaccgtggcaaccgtcaagctattctctgtccctataccaggtgtcatcaaatttttttctggaaaggcccatgcagtaaatagttcaagctttgtgggcttttatagtctctgttgctgctgctgaactcagctgttgtagcacgaaagcagccaggtaattactagatgaaggaatgcaggtggctgtgtttcaatagagctttatttctgcaaactgaaacttgagttttgtgtaattttcatgtgtcatgaaatactgttttctccaaccatttaataatgtaaatacttgctagcttatgtgccattaaaaaatgacttgatttggcttac

SEQ ID NO: 15605 - protein, 131 aa, Homo sapiens
MADVVVGKDKGGEQRLISLPLSRIRVIMKSSPEVSSINQEALVLTAKATELFVQCLATYSYRHGSGKEKKVLTYSDLANTAQQSETFQFLADILPKKILASKYLKMLKEEKREEDEENDNDNESDHDEADS

SEQ ID NO: 15606 - DNA, 2978 bp, Homo sapiens
atcactgatgggtattttgcttggttccaagtctttgctattgtgaccagtgccacaataaacatatgtgtgcatgtgtctttatagtagaatgacttacaatcctttgggaatatacccagtaatgggattgctgggtcaaatggtatttctggttctagatccttgaggaattgccacactgtcttccacaatggttgaactaatttacactcccaccaacagtgtaaaagcgttcctatttctccacatcccctccagcatctgttgtttcctgactttttaatgatcaccattctaactggcatgagatggtatttccttgtggttttgatttgcatttctgttatgaccagtgatgatgagcattttttcatatgtccgttggctgtataaatgtcttcttttgagaagtgtctgttcatttcattcacccacttttgatggcattgtttgtttttttcttgtaaatttgtttaagttctttgtagattctggatattagccctttgtcagatggatacattgcaaaaattttctcccattctgtaggttgcctgttcactctgatgatagtttcttttgctgtgcagaagctctttagtttaattagatcccattcgtcaattttggcttttgttgccattgcttttggtgttttattcatggagtctttgcccatgcctatgtcctgaaaggtattgcccaggttttcttctagggtttttatgattttaggtcttaggctccggttttaactttatatcactgaaagaggcactgaagaggtggtaaaacagtcttgaatcaccgacaccacccctccctcatcctgtgacagcagtggcatggtgcagagagcttttctgtgcactggggagagagagagtgcagtaattatgaggcattgagctcagcgctgtcctattataaaagaaaaaaactggatgaaacttaactgatgctcacccatggagggagcatttaatccagccctaaacagaggggaatcactgacccccagcagtctaaacttgagttccccgcaagccttgccaccatgggctacagtggcagtctaggccactgggactacaactcctaggcaagccctaatgctgaactgggcccagagacagtgatagtgggctaagcggggcatgtgacctaatgacacatcagtcaggggaagctaagggagtgctggcatcaccattcccctaaccccaggctgcacagcttgtggctccaaaagagaccctttccctccacttgaggagaggagatggaataatgtggaaaactttgttttgcatcttggataagctcagccacagcaggataggacatcagtcagagacatgaggtcccctttccaggctgtagctcctggacaacatttctatacatacctgagaccagaagagaacccactgccttgaaaggaaggacctactcctggcaggattaattatctcctaactaaagagtccttgggtcctgaataaccagcagtaatagccaggtatcatggcaagggccttgggtgagcctctgagacttgctgccttcaggtgagactcagcctattcccaaatctggtggctaggtggcaagatgcctttcacgtgaagaacagaggagggaaaagtaaaggggactttgtcttgcaccttaggtgccaccttggctacagggggataaagcaccaagaggactctcagggtccccaattccaggagttggctcttggatggcatttctggacctgccctgggccagaggggagcctgttcccctgaaaagtgagtcccaaaccaggcagcattcaccacaagctgactgaagagctgttaggccctcaaggaacatcagaggtagtctggcagtactcctcatgagcctatggtagtgtggccacagggtgaggctcctctctgtttggaaaggggtgggaagagtgggaaggactgtgccttgtggcttgagtgccagctcagccgcagcacactagaataccacgtagaattctaaggtttttgcttttagttcttagctcccagatggcacttctggacctgcgtggggagtggaggaactcaccacctgaaaggaagaacacaggcctggctggctttaccacctgctaagtgtagagccctagggccttaagcgaacataagctgcagccaaggactggttatggtaagccttgggcaacacccaatgctgtggtgactttgggtctgatccagcacagtgctagtggtggtggccacaagggtgcttgggtcactccactgccagctccaggtggctcagaacagagagagaggctctgtttgggagaaagtaaggaaagagaacaagagtctcagtctggtaatccacagaattcttctaaatcttatccaagaccatcaaggcagtacctctatgagtctggaggaaccactgcattattgggcatggggtggcccctaaagcacatacagcttagatcacaactcccaagtccttctgaatatatggaaagccttcccaaggaggatgggtacaaacaagcccagactgagaagactacaatgaatacctaactcttcaatgcccaaacacagacaaatatctacaagtgtcatgaccatccaggaaagcatgacctcaccaaatgaactaaataaggcactagggaccaatcctggagaaacggatatgtgacctttcagacagagaattcaaaatagctgttttgaggagactcaaagaaaaatcaagataacacaaagaaggaattcagaattctatcagacaaatttagtagagattgaaataactaaaatgaataaagcagaaattctggaatttggcatactgaagaattcatcagagtcttttaataggagaattgatcaagcagaagaggaattagtgagcttgaagatagagtatttgaaaatacaaagttagaggaaacaacc

SEQ ID NO: 15607 - DNA, 1620 bp, Homo sapiens
ctggacaaccaaaacttacataggctttttatcattttactgggcctatgtaactgagttttagccagtggaatgtccaagtgacatttgccacttctaggtctggcacattaacacttgatgtattacatttcagaccctcttatcattctgcagtgtgtttggcgatctgttgtttaagatctatatgcactggttactgttgcttgccttccattcctacccttactaatcagattcctattatagctacttctgtccttgattcattttgtatattagatgtgtgtgtgttcatgtgcatgcatgcaccctcacatgtaggtgtatatgggagtggtggtaaagacaggatatttcttcagttcatgggattttatttcaggagaattcaaacattcacgtattggagaagatgacacatttcttgaatgtctttggctttgagctgaatgcactaactagaagggactccagattgtcctccttcgggggaggtaagtatattcttcatatacaggtaagagtgaaatgatagaagaatgttcctcctctccttttcttcctggacaacagatcaaatatttctcagatcttttacagctgaattggagtcacatggacaggtatgatcttaaaatataaaaaattattttaaaattacatgctaaaattttataaaaataaatgctaaaactaacttaaacggaagcatttgattaaaaaatttatccaaaaaagtttgaattttatatgaaacaggatagaagatgaaaaagctaaagaaataaaatataaataaattatggctggggacagtggctcacacctgtaatcccagcactttgggaggctgaggtgggaggactgattgaggctaggagtttgagacctgttatttgaggcacatgggaaggaaagttttctttgagatattccacattttataatattcttcaagagatttacagagttccttgagtgaattgttggtttgttcttaatactgaatttcctattcaaatttatttagaagttcatttcttacagtgatctcatctcctattaagatattcttcaaggtaggttcttggccagtttctcaatgacagatttttaaaaatattgttaatctttttattaatatgagaacataattgttccagatctggaggccatcctttaagcttcttgcaacagtctgggagcaaagagtttactcgccactgggtagtgggccatggacaccccagtctccaccagaagttcgggattgcaaaatgggactctggcagcaaatttcaaactgtatgccagacctggccctttgcagagttaaaagaagccaggtgtggtggctcacacctgtaatccctggactttgggaggctgaggccagagaatcacctgaggtcaagggtttgaaaccagcgtggccaacatgacaaaaacccatctctactaaaatagaaaaattagccaggagtgatggcgggcacctgtaatcccagctacttgggaggctgatggaggagaatcacctgaacccaggaggtggaggttgcagtgggccaagattgcaccactgcactcctgtctgggcaacagagtgagactgtc

SEQ ID NO: 15608 - DNA, 1988 bp, Homo sapiens
  CDS (267)..(1760)
acgcgcccagggcagcgcgccacgctgccacacatgggccggcggactgctctgaagaggtggccgaggtgaagccaaagccagagacagaagctaaggcagaggaagccagtggggagaaggtgtcaggctccgcggccaagcctaggccctatgcgtgtccgctatgccccaaggcctacaagacggcacccgagctgcgcagccacgggcgcagccacacgggggagaagccctttccgtgccccgagtgcggccgccgcttcatgcagcccgtgtgcctgcgcgtgcgcctggcctcgcacgctggcgaactgcccttccgctgtgcgcactgcccgaaggcctatggcgcgctctccaagctcaagatccaccagcgtggccacacaggcgagcggccttacgcctgcgccgactgcggcaagagctttgctgacccttcagtgttccgcaagcaccggcgtactcacgctggcctgcggccctacagctgtgagcgttgcggtaaagcctatgcggagctcaaggacctccgcaaccatgagcggtcccacaccggcgagcgccccttcctctgctccgagtgcgggaagagcttctcccgctcatcctcgctcacgtgccaccagcgcatccacgcggcacagaagccctaccgctgcccggcctgcggcaagggcttcacgcagctcagttcctaccagagccacgagcgcacgcactcgggggagaagcccttcctgtgcccgcgctgcggccgcatgttctccgacccctcgagcttccgtcgccaccagcgcgcccatgaaggggtgaagccataccactgcgagaagtgcggcaaggacttccggcagccggcggacctggccatgcaccggcgtgtgcacacaggcgaccggccgttcaagtgcctgcaatgtgacaagacgttcgtggcgtcctgggacctcaagcggcacgcgctggtgcactctggccagcggcccttccgctgtgaggagtgcgggcgagccttcgccgagcgtgccagcctcacgaagcatagccgggtgcactcgggggagcgccccttccactgtaacgcatgtgggaaatcctttgtggtgtcgtcgagcctgaggaagcacgagcggacccatcgaagcagtgaggccgcgggtgtgccccctgcacaggagctggtggtggggttggcgctgcctgtgggcgtggcaggtgagagttcagccgccccggcagcaggggcggggctgggggaccctccagcagggctgctagggctgcccccggagtcaggtggtgtgatggccacacagtggcaggtggtgggcatgacggtggagcatgtggaatgccaagatgctggtgtccgggaggctcctggtcccttggaaggggcaggcgaggcggggggtgaggaggctgacgagaagcccccccagtttgtgtgccgagagtgcaaggagaccttctccacaatgacgctgctgcgtcggcacgagcgctcacacccggagctccggcccttcccctgcacccagtgcggcaagagcttctctgaccgggctgggctgcgcaaacacagccgcactcacagctcagtgcgcccctacacctgcccccattgtcccaaggccttcttgagtgccagcgacttgcgcaagcatgaacgcacccaccctgtgcccatggggacccccacacccctggagcccctggtggctttgctaggaatgcctgaagaggggccggcctgaagcccatgaccccccagcaccacactccgggagcccagcccccatcgggggcttcctgtacctccttttgcctggctctgctctttagactccagatccctacccctcagcaactagctcccctgtcggccagctaagagagctgggacagtggaggctggcagaagctgagacgtgactgtctaggagtaacactcattaaagctttcattttggcaccaggtc

SEQ ID NO: 15609 - protein, 498 aa, Homo sapiens
MQPVCLRVRLASHAGELPFRCAHCPKAYGALSKLKIHQRGHTGERPYACADCGKSFADPSVFRKHRRTHAGLRPYSCERCGKAYAELKDLRNHERSHTGERPFLCSECGKSFSRSSSLTCHQRIHAAQKPYRCPACGKGFTQLSSYQSHERTHSGEKPFLCPRCGRMFSDPSSFRRHQRAHEGVKPYHCEKCGKDFRQPADLAMHRRVHTGDRPFKCLQCDKTFVASWDLKRHALVHSGQRPFRCEECGRAFAERASLTKHSRVHSGERPFHCNACGKSFVVSSSLRKHERTHRSSEAAGVPPAQELVVGLALPVGVAGESSAAPAAGAGLGDPPAGLLGLPPESGGVMATQWQVVGMTVEHVECQDAGVREAPGPLEGAGEAGGEEADEKPPQFVCRECKETFSTMTLLRRHERSHPELRPFPCTQCGKSFSDRAGLRKHSRTHSSVRPYTCPHCPKAFLSASDLRKHERTHPVPMGTPTPLEPLVALLGMPEEGPA

SEQ ID NO: 15610 - DNA, 2892 bp, Homo sapiens
tttttaaatcaagagtgtatttaaagttattttttcatttgtatataattttaaaccatgttttcttacagtttgtcatcatcctgctcttggtttttgtcacagaagttgttgtagtggttttgggatatgtttacagagcaaaggtatgttgtctactgtaattcacataatgccttaaaaggtggtttaagtgtttcaagtaaaatagaacacattcattttatcagagtaaacattttcttttgccttacttgtttaatctgtatttcaaatatctaaagttaattggcaaatatttacatgtcaagactccttacctcatttaatatagcagagtgttatatatgtattgttcttgattataggtatttatagctgcaaatgaataattagctgagaagtttgttcagatttcctcagcacacagattgcctatatgaggggaggcataattttctgatttctgctttagaagaaccaaactcagaattgcgttttccattgtctctttaaaaaatgctttggtcctaaacatagaaaaaggtgttgtgagttgtgatcccaccttccacccctgtcctgaggaacaaggggtcctgccaacttagaacaccaaggcagctggtgccagcactcctttcttgcccttcattctttttaatcatttcaccgttccttcctttctattttgcctgattttgctgtctacctgtagtactacttaaggctaaacaggctgctttaaattaattaatatgggtataattttagaggcatggtaaagacataatagactcattctcattataacttaatggttttgagtcaagggcataatatgccaagttaattttcagatcattgatacgtaaggtactgtaaagctgtgctaaaaaaaaaatgcaatggattatgtccctacctatgatctggttatcaattttatggacttatgatattactgttgtaattaccagataagtccagtcctccgaggggtaaggaggatctggtacaagcaaactttactaagtgatacttgcttgccattttagtaattggcagcaataagctatgaagcttgtttcctgtctcctttttgcaatacattgaacagtagctttttcataaagtgccatttctaaggactgatttttttaaacctgccgattacttttgcacatttagccaactctaaacgttgaataaataaaatggaaataatgttggcatttgtcctaaaagtatcttacaggagcttcagagttactttgttttacctcctttaggaaaggaaaatgagtaacttatttgtaaaaggaaggcatccatttataatttaggacatctatcccaagcctcaacttttctcccttttgaatacattgttagcctgccattttgcacacaatcttctctttgaatgcttgaatgtatgtggtatatgtctgaatttttacctgtcacttttctccctcctgccttcatctatatctatatgaagatgaaggcaggaagggagaaaactttacaggaaattcatagatatctggcaacttgcaaacatttcatttaagtattttagtaggagccttgactaatgttacttttactagtatttttgagggactgaattctttgttctgattcaggtggaaaatgaggttgatcgcagcattcagaaagtgtataagacctacaatggaaccaaccctgatgctgctagccgggctattgattatgtacagagacagctgcattgttgtggaattcacaactactcagactgggaaaatacagattggttcaaagaaaccaaaaaccagagtgtccctcttagctgctgcagagagactgccagcaattgtaatggcagcctggcccacccttccgacctctatgctgaggggtgtgaggctctagttgtgaagaagctacaagaaatcatgatgcatgtgatctgggccgcactggcatttgcagctattcagctgctgggcatgctgtgtgcttgcatcgtgttgtgcagaaggagtagagatcctgcttacgagctcctcatcactggcggaacctatgcatagttgacaactcaagcctgagctttttggtcttgttctgatttggaaggtgaattgagcaggtctgctgctgttggcctctggagttcatttagttaaagcacatgtacactggtgttggacagagcagcttggcttttcatgtgcccacctacttacctactacctgcgactttctttttccttgttctagctgactcttcatgcccctaagattttaagtacgatggtgaacgttctaatttcagaaccaattgcgagtcatgtagtgtggtagaattaaaggaggacacgagcctgcttctgttacctccaagtggtaacaggactgatgccgaaatgtcaccaggtcctttcagtcttcacagtggagaactcttggccaaaggtttttggggggaggaggaggaaaccagctttctggttaaggttaacaccagatggtgcccctcattggtgtccttttaaaaaatatttactgtagtccaataagatagcagctgtacaaaatgactaaaatagattgtaggatcatatggcgtatatcttggttcatcttcaaaatcagagactgagctttgaaactagtggtttttaatcaaagttggctttataggaggagtataatgtatgcactactgttttaaaagaattagtgtgagtgtgtttttgtatgaatgagcccattcatggtaagtcttaagcttgttggaaataatgtacccatgtagactagcaaaatagtatgtagatgtgatctcagttgtaaatagaaaaatctaattcaataaactctgtatcagccccc

SEQ ID NO: 15611 - DNA, 1934 bp, Homo sapiens
  CDS (165)..(545)
tgcatttctaacagcaatgaatgagagttcctgttgctccacatccccaccagcatttggtggtgtagtgttttgaattttggctattctaataggtgtgtagtgctaccgcattgttttaatttgctgtccctaatggtatatgatgttggtcatcttttcctatgcatatttgctatctgtatatattttttggtaaggtgtctgttaagattttttccctttttaaaataggatttttttttattgttgaatttaaagagttctttgtatattttggatacatgtcctctatcagatatatgttatgcagtattttttcccagtgtgtggcttgtcttttcattctcttaacaatgtcttttgcagagcagaagtttttaattttaatgatgtccagcttatcagttttttctttcatgagtcatgcctttggtgttgtatctaaaaactcaatgctagaccatggtcacttagattttcttgtatgttatcttctagaagttttatgttttgcattttacatttatgtctgtgatccattttgaggtaatttttgtaaaagatgtgaggtccatgtctagatttttatattttattttattttgttttgcacgtcaatgtacagttgttccagtactatttgttgaaaagaccgtccttttcccattggatcgcctttgcttctttgtgaaagattagttgaatatatttgtgtgggtctgtttctggactcttgtgttaatttgctatagcttctattagaaagtaccacagactaggtggcttatacagtggaaatttattttctcggttctggaggctagaagtctgagatcaaggtctcaatagatttggttcttctgaggcctcactctttggcttatagttggctgttttctcctggtgtctatacatggtctttcctctgtttccaaacatgaggagtttgggattgtaatttggagtcagatatatagcagagaactaggggagataaggactgggagaagactatcgagtctagttaggagggtataattgctgttcagaaagagtagttggtaaagcatcctaattagaaatgattgagaaggcaggaggaaatggtgacattgtctgtggtctcttttcaaggagtttgatcatgctgctttcttctagtaccatagcatttctatcttagtgtttttctcaggagtatttattgagcacccatgctgagctgtgtaccatggctgacagaggatgaacagaatgtaatccctcttctcaagttggtggcagactagatacgggaatagtatggagtaattatagcgttaagtaatatggggtattttgtgattaagtattgtgtaattcccaataaaagttcagaagatcagaaaaaatgcagcccatggccaaataaaggctttttagaagagatagaatgaaagtttggctttaatgtgttgtttagatttaaatggataaagtggaagggcactgtagttgaggtgaaaatcgaagaatgaagtcctggtagggggaggaataagcaagaagagatcatgcaggaaacgggccaaactacatcaaatgatttgtattggagaataatagagaacattagatattaataacaatagttataatcatagcagatgccatttatagagtatatactatgtactaggccttattttatttaagtgctttataggtattctcattttaattctcttcacaaccttacgaggtaggtattgttatttccattttacagatacagaaactgagacacaaaaagaaaggtcaagaataggcccaggtcaggtgcagtggctcacctctggaataccagcactttgggaggcccatgtgggtggatcgcttgaaaccaggaattcaagaccagggtgggcaacatggcaaaaccctgtctctac

SEQ ID NO: 15612 - protein, 127 aa, Homo sapiens
MHICYLYIFFGKVSVKIFSLFKIGFFFIVEFKEFFVYFGYMSSIRYMLCSIFSQCVACLFILLTMSFAEQKFLILMMSSLSVFSFMSHAFGVVSKNSMLDHGHLDFLVCYLLEVLCFAFYIYVCDPF

SEQ ID NO: 15613 - DNA, 1857 bp, Homo sapiens
  CDS (1139)..(1495)
ctgagggcagctggggctacttctgcccttggctatgccaggctttgcatctcgggctatggctcactgcagagtttcgtgggggaagggcaggggaagccaggtgggggccagctgaatttcagtgtggaagaaactttttacggtctcatctcggcccagtcggtcaggtgggtggcactcggcctttctgaggcttctctctctaaaccatccctgagcagcaattcagaagacaagctagaaagccctttgatggcatcacagtgtccctttaacccctgagcacgccccagtcctctgtagctgcccactcagcacagccgttcctggaggctgagcggcacgggccctcggggcagctgcccggtgcctgccacccacacatctctccaccggtcctctcctttctcctcacctcacttgtctgccaggccctgcgtgtgggcccagccatcccaggcaggacaggcagggctctccagctgcctcacagactcaccgtcagccatgcgggagaagaaccgcagcacccaggcaggtctttctggctctttccccaaggccagcaggtcttagaaatcgtcagacttgccagattctctgagtaggaaacggaaccctggggtctccccactcggcctcctggcctatctctccctgagccttgtggaggctcaatgaaggaaaagctcttgctggggatcttggcagtgtccctctcagctaccacaacaagatttcttctgtacgggtcacttcaagccacctaaaaccctgcgtagaagggacttcttggttggagaggtgccctccctggggctggcggggctgcgtctgctggggctgctggtggtatcttttgccggagtgtctctgagacccctggaggccccagctggtgagtttatccaccaggcttaggaggcctgtgggctccaccctctccgtccctggaggcttctccagctaccgggtggagagatgtaggcggcatctgtggggagcatcgggcagcatggggtcctgccgaggcacttgtctgctgagggcattctgagaaagcccctctgccccgagccctagcctggcgaatgagctgtcggccccaccatggagccctgggtggcacaggcccatgaaccggcctcttccccagctgagcgacctcctttggtcactggctctctgcctggagagtgagtggccgggccatgtgctccaagcagaggggcctcagcagggctccctgagcccagagagatgggataggtgggccttttggggccttgcccatcagaatccccaggccgggggactgctggtgagtgcagctgcggcagctttaggggactcagtcctggggttttgtccccacttcacagccaccacccaagagtggcgtggcaggcaggaaccacagcctcatagagggggcaggaccctctcacagccttgcctggcagcagctgcagggagccaggtgtcacccatgtaatgtcaggtacttggcctggttgctctttcccgtggaggttcgcagacaaccttgcaaacgtgattttgatggcttctcaccctggagagtgctcatgttatgcttaaaatttagtgcctaattcggatcacgaggtcaggagatggagaccatcctggctaacacggtgaaaccccgtctctactaaaaatacaaaaagttagccgggcgtggtggcgggcgcctgtaatcccagctactcgggaggctgaggcaggagaatggcatgaacccgggaggcggagcttgcagtgagccgagatcgcaccactgcactccagcctgggcgacataacaagactccgtctcaaaacaaaagc

SEQ ID NO: 15614 - protein, 119 aa, Homo sapiens
MNRPLPQLSDLLWSLALCLESEWPGHVLQAEGPQQGSLSPERWDRWAFWGLAHQNPQAGGLLVSAAAAALGDSVLGFCPHFTATTQEWRGRQEPQPHRGGRTLSQPCLAAAAGSQVSPM

SEQ ID NO: 15615 - DNA, 1929 bp, Homo sapiens
  CDS (27)..(845)
aagttcggtgggctccaggcgtcgcgatggaggagagcgggtacgagtcggtgctctgtgtcaagcctgacgtccacgtctaccgcatccctccgcgggctaccaaccgtggctacagggctgcggagtggcagctggaccagccatcatggagtggccggctgaggatcactgcaaagggacagatggcctacatcaagctggaggacaggacgtcaggggagctctttgctcaggccccggtggatcagtttcctggcacagctgtggagagtgtgacggattccagcaggtacttcgtgatccgcatcgaagatggaaatgggcgacgggcgtttattggaattggcttcggggaccgaggtgatgcctttgacttcaatgttgcattgcaggaccatttcaagtgggtgaaacagcagtgtgaatttgcaaaacaagcccagaacccagaccaaggccctaaactggacctgggcttcaaggagggccagaccatcaagctcaacatcgcaaacatgaagaagaaggaaggagcagctgggaatccccgagtccggcctgccagcacaggagggctgagcctgcttccccctcccccaggggggaaaacctccaccctgatccctccccctggggagcagttggctgtggggggatccctcgtccagccagcagttgctcccagttcagatcaacttccagccagacccagccaggcacaggctgggtccagttctgacctgagcacggtttttcctcatgtgacttctgggaaggcgctccctcatctgggccaaaggaaggaggacgaagccctcctcagctggcctgtgtttggggcatgaatctctcctctcctccttgtctggctctgttgacaaaccgggcatgtttggcagtaaattggcaccgtgtcacactgtttcctgggattcaagtatgcaaccagaacacaggagaagaaaagctccaggatccctgtccccatctgtcctcttgatgtgagagagactctgagacttcttccatcgcaatgacctgtattaaacacaagccccccaagcaaaagaagaggttgagtttgctgccaggattcagatcagcccttcccagggtctgcaggtgtcacatgatcacagttcagcgggaggctttccgtacccacactggctgtagccacttcagtccatctgccctccagaggaggggtttcttcctgatttttagcaggtttagaggctgcagcttgagctacaatcaggagggaaattggaaggattagcagcttttaaaaatgtttaaatattttgctttgctaatgtgctgatccgcactaactcatctttgcaaaaggaactgctccctcggcgtgccccagctggggcctctgaagggattcctcactgtgggcagctgccctgagcttcaggcagcagtgttcatctctggccagttgtctggtttccatgtattctaggccaggtaggcaacacagagccaaggcgggtgctggaagccagacggaacagtgttggggcaggaaggtggatgctgttgtcatggagctgtgggagttggcactctgtctgctggtggccctctcggctcacatgttcacagtgcagctcctggcagacttgggttttctctttggtggtttctaaagtgccttatctgcaaacaacttcttttctccttcaggaactgtgaatggctagaagaaggagctcagtaaactagaagtccagggttgcttggtttactggtttataagaaatctgaaagcacctctgacattccttttattaactcacctctcagttgaaagatttcttctttgaaaggtcaagaccgtgaactgaaaaaagtgttggcctttttgcgggaccagatttttaagataaaataaatatttttacttctgtc

SEQ ID NO: 15616 - protein, 273 aa, Homo sapiens
MEESGYESVLCVKPDVHVYRIPPRATNRGYRAAEWQLDQPSWSGRLRITAKGQMAYIKLEDRTSGELFAQAPVDQFPGTAVESVTDSSRYFVIRIEDGNGRRAFIGIGFGDRGDAFDFNVALQDHFKWVKQQCEFAKQAQNPDQGPKLDLGFKEGQTIKLNIANMKKKEGAAGNPRVRPASTGGLSLLPPPPGGKTSTLIPPPGEQLAVGGSLVQPAVAPSSDQLPARPSQAQAGSSSDLSTVFPHVTSGKALPHLGQRKEDEALLSWPVFGA

SEQ ID NO: 15617 - DNA, 2416 bp, Homo sapiens
  CDS (81)..(2111)
aaattattcacaaatatgaaccatccaaagagggtcaggaaaagggctggctctccatagacgggttcactaattaccttatgtcacctgactgttatatattcgatccagaacataagaaggtctgtcaggatatgaagcaacctctgtctcattactttataaactcatctcataatacatacttaatagaggatcagttccgaggtccctccgacatcacaggatatattcgagctcttaaaatgggttgccggagtgttgaattagatgtatgggatgggccggacaatgaacctgtaatttacacaggccacaccatgacctctcagatagttttccgcagtgtcattgatattattaacaagtatgcattctttgcttcagagtatcctcttatcttgtgtttagaaaaccactgttccattaaacaacagaaggtaatggttcagcacatgaagaaacttttaggagacaagctctatacaacatcacccaatgttgaggaatcttatctaccatccccagatgtcctgaaagggaaaatactaattaaagcaaagaagctgtcctcaaattgctctggggtagaaggagatgttactgacgaagatgaaggagcagaaatgtctcagaggatgggaaaagagaacatggagcaacccaataatgtgcctgtgaagcgatttcagctttgtaaagaactgtctgaactggtcagcatctgcaaatcagttcagttcaaagaatttcaggtgtcgtttcaggttcagaagtactgggaagtctgttcctttaatgaagtgcttgccagcaagtacgccaatgaaaatccaggggactttgtaaattacaacaaacgttttcttgctagggtttttcccagtccaatgagaattgattccagtaacatgaatcctcaagatttttggaaatgtggttgccaaattgtagccatgaactttcagacaccaggactgatgatggacctgaatattggctggtttaggcagaacggaaactgtggctatgtcctccggccagccatcatgagggaggaggtctccttcttcagcgccaatacaaaagactctgtcccaggggtctcacctcaacttcttcacattaaaatcatcagtgggcagaactttcccaagcccaaaggatcaggtgccaaaggtgatgtggtagatccttatgtctatgttgaaatccatggaatccctgctgattgtgcagaacaaaggacaaaaacagtgcaccagaatggagacgctcccatttttgatgaaagctttgaatttcaaatcaacctgcctgaactggccatggtgcgctttgtagtgctggatgatgactacattggggatgaattcatcggccagtacacaattccctttgaatgtttacagacgggctaccgccatgtccccctgcagtccttaactggagaggtccttgcacatgcttctttatttgtccacgtggctattactaaccgaagaggaggagggaagcctcataaaaggggcctttctgtgagaaaagggaagaaatccagggaatatgcatctttgagaacactgtggattaaaaccgtggatgaggtattcaagaatgcccagccccctatacgggatgccacagatctgagagaaaacatgcagaatgcggtggtgtcattcaaggagctgtgtggcctctcctctgtggccaatctcatgcagtgcatgttggcggtgtctccccgctttctggggcccgataacacacccctagtggtcctaaatctcagcgagcagtaccccacaatggagctgcagggaattgtgccggaggttctgaagaagatcgtaacaacttatgacatgatgattcagtccctcaaggcgttgattgaaaatgcagatgctgtatatgaaaagatcgtacattgtcagaaggcagccatggaattccatgaacacttgcacagcataggcaccaaggaaggtttgaaggaaagaaaactacaaaaagcagtggagagctttacctggaatattaccatcttaaagataagaaagacaggaaggaggagtatttttgtgcctcagactcccataatggtatgagtaccctcctccttctcctccctcacactgcatgtgatttggaagaaaagtgtctgctggcccccagggaatggaaggtgctaatctttgctgtcttcaacatccaagcatgtggccattacacaggtggcagagggcaggggaagtcttagctgccgcactggatccctcacctcagaagtaagtcaactttttttctctaatagatagttggacaaaaggactttgaaaaaattagccagatgtagaatccctgttgttttgcccctacgtctgaataaaagcaatgacttgtgattgtt

SEQ ID NO: 15618 - protein, 677 aa, Homo sapiens
MSPDCYIFDPEHKKVCQDMKQPLSHYFINSSHNTYLIEDQFRGPSDITGYIRALKMGCRSVELDVWDGPDNEPVIYTGHTMTSQIVFRSVIDIINKYAFFASEYPLILCLENHCSIKQQKVMVQHMKKLLGDKLYTTSPNVEESYLPSPDVLKGKILIKAKKLSSNCSGVEGDVTDEDEGAEMSQRMGKENMEQPNNVPVKRFQLCKELSELVSICKSVQFKEFQVSFQVQKYWEVCSFNEVLASKYANENPGDFVNYNKRFLARVFPSPMRIDSSNMNPQDFWKCGCQIVAMNFQTPGLMMDLNIGWFRQNGNCGYVLRPAIMREEVSFFSANTKDSVPGVSPQLLHIKIISGQNFPKPKGSGAKGDVVDPYVYVEIHGIPADCAEQRTKTVHQNGDAPIFDESFEFQINLPELAMVRFVVLDDDYIGDEFIGQYTIPFECLQTGYRHVPLQSLTGEVLAHASLFVHVAITNRRGGGKPHKRGLSVRKGKKSREYASLRTLWIKTVDEVFKNAQPPIRDATDLRENMQNAVVSFKELCGLSSVANLMQCMLAVSPRFLGPDNTPLVVLNLSEQYPTMELQGIVPEVLKKIVTTYDMMIQSLKALIENADAVYEKIVHCQKAAMEFHEHLHSIGTKEGLKERKLQKAVESFTWNITILKIRKTGRRSIFVPQTPIMV

SEQ ID NO: 15619 - DNA, 2283 bp, Homo sapiens
  CDS (256)..(2013)
aaaaggcaggcattctctttccttttccttctctcctgagcgctcctgcagttcctggggcgtagtaggggatccacaagcgtttgtgaccagtgaagttctttacaagggtgagatctgcacgggaggacccgagcgagggtctcggcttgccaggaagccggggttccccgggaagcgtggagttcacccgcgcactcgaagtgcctttgcaaaattatatctgggtgttggcacccagccactattctgccaatgaagtacatcctggtcacgggtggggtcatctcaggcattggtaaagggatcattgccagcagcattggaacgattctaaaatcatgtggactccgagttactgccataaaaatcgacccctatattaacatcgatgctggcactttttcaccttatgaacacggtgaagtcttcgtcttaaatgatggtggagaagttgatttagaccttggaaattatgaaagatttttggatattaatctttataaagacaacaatatcaccacggggaagatatatcagcatgtgatcaataaagagaggcgtggtgattacctggggaaaacagtgcaagttgtccctcacattactgatgctgtccaggagtgggttatgaatcaagccaaggtgccggtggatggtaataaggaagagccccaaatatgcgttattgagctgggaggcaccattggagacatcgaaggaatgccgtttgtggaggcgtttagacaattccagtttaaggcgaaaagagagaatttctgtaatatccacgttagccttgtcccacagctcagtgctaccggagaacaaaaaaccaaacccacccaaaacagcgtccgcgcactgaggggtttaggcctgtctccagatctgattgtctgccgaagttcaacgcccattgagatggccgtgaaggagaagatttctatgctttgtcacgtgaaccctgaacaggtcatatgtatccatgatgtttcttccacataccgagttcctgtgcttttagaggaacaaagcattgtgaaatattttaaggagagattgcacctgcccatcggtgattctgcaagtaatttgctttttaagtggagaaatatggctgacaggtatgaaaggttacagaaaatatgctccatagccctggctggcaaatacaccaagctcagagactgctacgcctctgtgttcaaagccctggaacactcagccctggccatcaaccacaagttgaatctgatgtacatagactccattgatctggagaagatcactgaaaccgaggaccctgtgaaatttcatgaagcttggcagaagctatgcaaagctgatggtattcttgtgcctggaggctttggaatcagaggaacattgggaaaactccaggcgatttcttgggcaaggacaaagaagattccttttctgggagtttgtcttgggatgcaactagcagtgatagagtttgcaagaaactgccttaacttgaaagatgctgattccacagagtttaggccaaatgccccagttcctctggtgattgatatgcccgagcacaaccctggcaatttgggaggaacaatgagactgggaataagaagaactgttttcaaaactgaaaattcaatattaaggaaactttatggtgatgttccttttatagaagaaagacacagacatcggttcgaggtaaaccctaacctgatcaaacaatttgagcagaatgacttaagttttgtaggtcaggatgttgatggagacaggatggaaatcattgaactggcaaatcatccttattttgttggtgtccagttccatcctgagttttcttctaggccgatgaagccttcccctccgtatctggggctgttacttgcagcaactgggaacctgaatgcctacttgcaacagggttgcaaactgtcttccagtgatagatacagtgatgccagtgatgacagcttttcagagccaaggatagctgagttggaaataagctgaaatgaatacatgactgggaataatggggactgcctgtgaggcctctgaaataattgaaggcaagatgaaggaactatctgaagaaatcactacactcttagagaatccctctgttctccagcaaacatgggatgtaaagcctcacagggaatctgataatacatacttctgtcaaccagaaccagaggggtagttttcttttccctccagaggcagcctttggtacttaaaatatctgtagctgattaaatttttcccaacaacctc

SEQ ID NO: 15620 - protein, 586 aa, Homo sapiens [sequence omitted]

SEQ ID NO: 15621 - DNA, 1783 bp, Homo sapiens
  CDS (19)..(1752)
acttccgtagaggtggacatggcgtgcggctttcgccgcgctattgcttgccagctttccagagtgttgaatcttccaccagaaaacttgatcacatcaatatctgcagttccaatttcccaaaaagaagaagtagctgattttcagctttctgtggatcctttattggaaaaagacaatgaccattcaagaccagatattcaagttcaagccaagagactagcagagaagctaagatgtgatacagtggtgagtgaaatcagtactggtcaaaggactgtaaatttcaaaataaacagagagctcttaacaaagacagtgctacaacaagtaattgaagatggctcaaaatatggattaaaaagtgaacttttctctggacttccccagaagaagattgtggttgaattcagttcacctaatgttgccaaaaaatttcatgttggacatttgcgttctaccgtcataggaaattttatagcaaatctcaaagaagctttaggacatcaagtaataagaataaattaccttggcgattggggcatgcagtttggtcttctgggaactggcttccagctgtttggctatgaggaaaaactgcagtccaatcctctacagcatctctttgaagtttatgtacaagttaataaagaagcagcggatgataaaagtgtagcaaaagcagcacaggagttcttccaacgattggaactgggcgatgtgcaagcactttcactgtggcaaaaatttcgggacttgagcattgaagagtacattcgggtttacaagcgtctgggagtatattttgatgaatattcaggagaatcattttatcgtgaaaaatctcaagaggtcttaaagttgctggagagtaaaggactcctactgaaaacaataaaaggaacggctgtagtagatctctctgggaatggcgacccctcctcaatttgtactgtaatgcgaagtgatgggacttctctctatgcaaccagagatcttgcagctgctgtagatcgaatggacaagtataattttgatacaatgatatatgtgacagataaaggacaaaaaaagcattttcagcaagtattccaaatgctgaagatcatgggatatgactgggcagaaaggtgccagcacgtgccctttggagtagtacagggaatgaagactcgaagaggagatgtcactttcctggaagatgttttaaatgagattcaattaaggatgctacagaacatggcttcaattaagacaactaaagaactcaagaacccacaagagactgcagagagggtcgggctcgcagcactcattattcaggacttcaaaggtttactcttatctgactacaagttcagctgggatcgtgttttccagagtcgcggggacacaggagtcttcctacagtacacacacgcccgcctccacagtttggaagagacttttggatgtgggtacctgaatgacttcaacactgcttgtttacaagagccacagtctgtttcaattcttcagcatcttctcaggttcgacgaggtgctttataaatcatctcaggactttcaacccaggcatatcgtcagttaccttctaactttaagtcatcttgcagctgtggcacacaaaacactacaaataaaagatagtcctcctgaagtggctggggccagacttcatcttttcaaagctgtccgttctgtcctagccaatggaatgaaacttcttggaataacacctgtatgtaggatgtaatttccattaaaatggcttttaaaatgtc

SEQ ID NO: 15622 - protein, 578 aa, Homo sapiens [sequence omitted]

SEQ ID NO: 15623 - DNA, 2336 bp, Homo sapiens
  CDS (82)..(1416)
attttccacgctgtaccggcggaaattcaagcactggaagagaggttccggggctgggctggcctgactgaaggcggcggaatggagacgcggaccgaggacgggggcctcacccgccgccccacgctggcctcttcttgggatgttgcaggcggggccctgacccacagcctcctcctcacccgggccggtctcggccccggtgacttcgactgggaggagctgctggcaccgcctgctccaggtcaggatctggtgattttgaagagaaaccacaacgacaaagatgaaaacccctgcttcctttacctgaggtgtggccctgatggaggtgaagaaatcgcttctattggcattttaagttcagcaagaaatatggaagtgtacttaggagaggagtactgtggaaccagtaggggcaagaatgtttgtactgtcctggatgacagtgaacatgaaaagatcattttgtataaaaaaaatctaaaattggagtcctccacacatgcttgtaaaataaagttgctctcctttggcgaaaggcagtgtgtgttcatcagtaaagttgtggtacacatgagatcagtttttgcaaattcttcaacaagctctcctgctctaggatcaaggatagaccttgacaaggtccaaaccataatggagtccatggggtcaaagttatctcctggagctcagcagttgatggatatggttaggtgtcagcagcggaattgtattcccattggagagcagcttcagtcggtgttgggcaattctggatacaagcatatgattggactacaatcctcatctaccttaggaaccttaaacaagtcgtcctccacaccttttccttttagaactggattgacatctgggaacgtgactgaaaacttacaaacttacattgataaaagtacacaactgcctggtggagagaattctaccaagcttgatgagtgtaaagttatgcctcaaaaccattcctttcttgaaaatgatcttaaaaatgcaatggcctctttcttaccaaagaaagtaagtgacaactcaaatatacccaactccgagttgctgccttttctccagaatttatgtagtcaagttaatcatctccatgtgggaaataagaccgagtgtcaggaaaacatcaccaagcatggtgaacgcattcttggtgttggaatggaagagcaatctatttgctcctacttggaaaagattctttctaaaaatatggaactgatggaaaagaaacttatggattacattgatcagcgaatacatgaactccaggagcacattgatgataagattgctttgttactggatttgctgcaaaatcctaactccccgcccactgggatacctctaagacattatgactctggagaaagactttcaaatggagaaagataagctctcaacataaacagtgtactgcagatatttattacatatttattacaaagccaaaacccaaaaatatttataaaaagcaagtatttaatgtcctttgagggatcattgtcttacacaaagtgacctcagttttcgtttttactacacttgttattttaaatccagtactgtacactgagttaatatgatacagtcaaattatttttgctcacgatatttttcagtcttacagaaatgtatgtatatttgtgttaagagtttaaaatgcttgaggatttctaatacagttcattagtttgtattgtatatgtgtttaagtataatttttatttatacaaagatcttatagtcttagaagtatgaaaaataatgcttaagagtatttgatttttttctttttctaattatcttggaaaattggatacttaagacttggagcctttacttcagattaccagtttacattttgtattgcttgtgtgagataatgaataagatgtgatatttggcatgtgtaaacttagttcactctggggttgttaatattatttgtttcattacagagtagctgtaggtaggaaagtaaacatcagaactagcctagtccttgttacgattagtactttggatttgatttttcctgtaaaacagatgcagtcatcttgtttgacctcagtaaccccagacagtttaagaaaacctctccttttgagctgatacaggttttttccccagaatccttttctggcatgtttattgtatgaaataatgaggctctccatggaaggatgaacacatatgagtcaagggattgcaattctctctgatagacttagttttcagaccttataactattgtatatgcattgaagggtgatatatttgcatataaaaataaacgcacctgctctggg

SEQ ID NO: 15624 - protein, 445 aa, Homo sapiens
METRTEDGGLTRRPTLASSWDVAGGALTHSLLLTRAGLGPGDFDWEELLAPPAPGQDLVILKRNHNDKDENPCFLYLRCGPDGGEEIASIGILSSARNMEVYLGEEYCGTSRGKNVCTVLDDSEHEKIILYKKNLKLESSTHACKIKLLSFGERQCVFISKVVVHMRSVFANSSTSSPALGSRIDLDKVQTIMESMGSKLSPGAQQLMDMVRCQQRNCIPIGEQLQSVLGNSGYKHMIGLQSSSTLGTLNKSSSTPFPFRTGLTSGNVTENLQTYIDKSTQLPGGENSTKLDECKVMPQNHSFLENDLKNAMASFLPKKVSDNSNIPNSELLPFLQNLCSQVNHLHVGNKTECQENITKHGERILGVGMEEQSICSYLEKILSKNMELMEKKLMDYIDQRIHELQEHIDDKIALLLDLLQNPNSPPTGIPLRHYDSGERLSNGER

SEQ ID NO: 15625 - DNA, 1958 bp, Homo sapiens
  CDS (144)..(509)
atttaaaattatagagcttttcatcactacggagatgctcttgcctatgataggaacgatggctacatctgaagctgagcaaatttatcttttctcttcgtctgcatcagggtgacctctggaaggtctgaaaattgaacaagatggacgggtccaggaaagaggaggaggaagacagcacactcaccaacatttctcttgcagatgacatagaccattcctcaagaattttgtatccaaggcccaaaagtttgttacccaagatgatgaatgctgacatggatgcagttgatgctgaaaatcaagtggaactggaggaaaaaacaagacttattaatcaagtgttggaactccaacacacacttgaagatctctctgcaagagtagatgcagttaaggaagaaaatctgaagctaaaatcagaaaaccaagttcttggacaatatatagaaaatctcatgtcagcttctagtgtttttcaaacaactgacacaaaaagcaaaagaaagtaagggattgacacccttctgttttatggaattgctgctgaacattttttctttaaaacttggatagattccaaaagttacagtacctttgtggcttcattggatatttatgaagataatgtcagatgtagacaaaaataacacaataacaggagacttccataagtttgtgtattatgttagtctatgaaaacgtgcaaatgtattgtagagactttatgattagaattgcatatatttatgaaacttaaagatgaatgttttattgaatttgtaggtttagcactgtcttttattataggattagtaagatatacaagaaaataaccaccgtgttgtgaaaaagtgaccaaaatcatgtactaaatgcacagctttatgtaccctgtccaccatcttgtgcctcttctccatttgcctcttccttcctatttcccttccgctaaggaaaaaaattggtgtcacatttgtaaaagtaattttaatagttaatcatctctgagagtaacctgtattttaattgttgaaacttaaccaaaataagatactgtctcagctagggcttgtcatttgtgtatttagtgttaagataggaatgctagtgtctctttaattaattggaaatagatggaggctaaaaatgaaggtttttctttgaaactgaattaacttgggaatatttgttgttaaaaacttctttttgcccaaaataactcattttgtattatctgaaaatatataatttctggtcatgtgtatgttaaaatagaaaattttgaggaaaaatggaaatagggtggaaaagtactcggtaaacagtagtaaccaaatattttcactccagatttgtgttttctctggcacagagtagatcttttgggaaatatatatgaaagtggattaagtttgactacccttatgttagccacatctggatgagaacagttacaaagagtttggtctctaagttgatttgtacccagtgggtcaacttctgcaaaattccgtaatggtgtattagtattagaatagtgaataaaatgggaaagttatacatgtatacttattatcttgctcagtattttatctcacttgttctagaattttctgtaaaccctgctactgggtttgaagagttttagtcatcctttaacaatttttaaaaatttagcttctagattccatttggtaaggaaatcaatattggaagtattgctaaaatcttataatatgaaaagagatccactaatgtagcttaaggttattagatttgggcttttaatcatggaataatcttatgtattggtgtaagagttgatgaatgactttagctgtgtgaatatataatagtcaaactgcaaacattttgcatcccttttgtgacctaatttacagacatttaaattgtgttgcagttctgctttgccgtttaataaaaagctatttcag

SEQ ID NO: 15626 - protein, 122 aa, Homo sapiens
MDGSRKEEEEDSTLTNISLADDIDHSSRILYPRPKSLLPKMMNADMDAVDAENQVELEEKTRLINQVLELQHTLEDLSARVDAVKEENLKLKSENQVLGQYIENLMSASSVFQTTDTKSKRK

SEQ ID NO: 15627 - DNA, 2080 bp, Homo sapiens
  CDS (513)..(1382)
gtacagggctggatgattgaagcaccagcgggaactagtcggacctccgagctctttaaactgtcctcagctcggctggttctccacgagctccgggcagacggcggggggtgggtcggcgtttaagtcaaaggccttggggctccgagtcccttcctctccccgtcctgtgaaggcacgacccagttcagctgtctgtaaagtggagccattagtccctgcctcgtagtgggaaaactgggaggcggaacgaggaggccgccggtcccaacccggcccaggagcatctttctccgcagaccgtttcctggcgagatcctgcgcagccgaggctgtgttagcgccaaggacttccagcagctgttagcagaggctgctgccagggctgctgccccgctccctcctcctccttcccctggagtcagtggtgggaagcttcccaggagagtcctcagcaacctctggaacacaggacttggccatgactgtctcctgtccctgtgtgggcccagatggttgagcttgagcaggaggtggagcggcggcagcggctggggcaggagtcagcagctaggaaagccctcatcgcgagttcctaccacccggcacggcctgaggtctacgactcactgcaggatgcagctctggcccccgagttcctggccgtgactgagtacagcgtgtccccagacgcagacctcaagggccttctccagcggctggagacagtatcggaggagaagcgcatctaccgggtgcctgttttcacagcgcccttctgccaggccctgctggaagagctggagcacttcgagcaatcggacatgcctaaggggaggcccaacaccatgaacaactacggggtgctgctgcacgagctcgggctggacgagccgctgatgacaccactgcgggagcgcttcctgcagccgctgatggccctgctgtaccctgactgtggcgggggccggctcgacagccaccgggcctttgtggtcaaatacgcaccgggccaggacctggagctgggctgccactatgataatgccgagctcaccctcaatgtggccttgggcaaggtcttcacagggggcgccctgtattttgggggcctcttccaggcacccacagccctgacggagcccctggaggtggagcacgtggtgggccagggtgtcctccaccgtggcggccagctgcatggagcccggcccttgggcactggtgagcgttggaaccttgtcgtctggctccgagcctctgctgtgcgcaacagcctctgtcccatgtgctgccgtgagcccgacctggtggacgatgagggcttcggtgatggcttcacccgagaggagcccgccacggtggatgtatgtgcgctcacctgagcttgcttgggcccagtgtgggggtggcaggcaggtgagggctccgttgccttggtctgggggcagaaataaaatccccgcagcctactgcacttcttggctcaacggtgtgccagcttctgggtcattctatgggcaaagatgctgccttagttcaggtttgtcagaagcagggtctggaatggggcttcagcgagggagtcagggaagcaggggaggggagggagcagctgggcaaggaagtggcttcagaggacgtccagcctcagctggccccacggagagctccaggcagagcccacagtaccacagtgtgcccacaccaccggttactggctcctggatgagggggccagagaggagtgaataacttcccagacacttacctccagggcagggtgccttccagtagccaagggaagcctccagagagcacagatgtgaaccctcagcagcaggcatcaccccccagtggactcgggtgggccaccagtagcatcttctagatggcaggggggtgaatggcagggccaggaaccaggctgcccgggttcccattctgcttctgccacttccagctgtgtggctttaggtgagccttcaccttttggtgccttcgtttcctcatttagcacctacctcctagagctgttttgggagtcaaatgcgctgacgtatataaagtgctttgcaag

SEQ ID NO: 15628 - protein, 290 aa, Homo sapiens
MVELEQEVERRQRLGQESAARKALIASSYHPARPEVYDSLQDAALAPEFLAVTEYSVSPDADLKGLLQRLETVSEEKRIYRVPVFTAPFCQALLEELEHFEQSDMPKGRPNTMNNYGVLLHELGLDEPLMTPLRERFLQPLMALLYPDCGGGRLDSHRAFVVKYAPGQDLELGCHYDNAELTLNVALGKVFTGGALYFGGLFQAPTALTEPLEVEHVVGQGVLHRGGQLHGARPLGTGERWNLVVWLRASAVRNSLCPMCCREPDLVDDEGFGDGFTREEPATVDVCALT

SEQ ID NO: 15629 - DNA, 2302 bp, Homo sapiens
ttaaatctatatgtgagactgacaaaaaccttaatgtaatttacttataatgccagaaggaaaacactattttcataccctactttttctgtacctaaattttcttaaaaaaaaatctagtatagcactacattcttttttaagtgatgcagaccttagtttctttagcccctttattttgaatacaatgctacatatgaatgttgaagctgatacattgcacagttctgtagacatcactacaccgatgtagtttctcaaattttagcaatatgctctacataaaatcactacagagatactagtggggaagacgattaacacacctcttacagtaatactgcctgttattggtatagcagtggtatttgcagactgggatcataaggagcccttaaatacttgttattgactggggttatttttatgctgtagcaaatgtgacaggctctttttagcaaaatttttgaaaatttttttggtattactctgaaacaaaatttaagttggagtttcagggatttagggagtagttttcattctacatgaactgaggtaatattatggtaactccaatatttggttaaaaaaactatacaaatcagaatagtactaaaatactgtagaattttagcatttttattttgcactttgtgtggattgaggtgttcagaaataccaaccataaaaatgtaatctagttggcaaaggtgtgcgctaaaacacggaaccgaacatgcattgatttggataacttttgagggtttttgtcaaatagcatgtgaagagttacatttttcttaaaagattggtggtcccaatgtcagagttcttggaacagataactgaatgatagattttttttttttaaagataaaactttacaacctgcacatttgttatgcatactaaatggtgtgttaaaattagggtttctttgcctctctacactacactaatctgcctaaaggtggttgtttcatatttataatgctaattatcatacctacctactttaaattttaggtagaaaattatctgatttaaatacaaacatatttttctcacattgagtaatatgcataatgtagttccaaatgtatttcattactatagtcacaatatccaactaaaaattacgctatctagaattgtaccaaccaaaatctcgtattggcagatcttgacaggctggacctgcaagatgtggcttgaattttaaccatttattacataatctctagtgatcatgcatctagttatcataagaaataatttaaaaggttttgttgctgaaagcagtaagtggtgcagtaaaatacttaagttattcaaagaatgttatctttcttgcaagagtaatttaagcacatgggaaagattctagactttttgtttcttgcaacaacagtgccctctgctgctagaaacctttttctacttactatcatttttattgtggcttgagctcagtcaatctggtgcagatgaggctggacaactactaaccaataaaatcaggagtttgtacaaaagttaaatggaacattataattattttaagtaatgttaattgaaaaatttttttctttttgacaatataaaaaacattttaaatttcctagaaatgtcttcagggtaatgccaatttaagatctctcttaacttgtggccaagaaattctagattttccagctgactttggtataatatatatttatcaggaacttctctcagcagagagtacccattcttcgagttcaaagcacaattttaaacatgtaaaatggatatataatttgccaaaggtaattaatttattctttttttcttaaagaagaaaaagacattggttgttgttacaaaaagtctaaattactgttggttgaaacacagcagctgtggagttcagtccaggcatgaagactaaatctgctttaccaagtaaggtgtaaggttgcatgtttcagtcctctaccatcctgcactgtgagcagcactatacctgtgcgttgtctgaaagccttccgtatattctccagctaaatggtcgtctggtagcctttgcatttaacaaactagcatgaggctttttatatctaaatgctacgtgatagacaatttcagctagccacatattgtatgtatgagattcataaagactttcaatcatttcattttcagacaactgaaattttgtttagtatgtgaattctttttttgaaatgtatagtgaataggatgttgcactggtggcaattcatcatggagcataataaaattaatttgacccaaatagaat

SEQ ID NO: 15630 - DNA, 1724 bp, Homo sapiens
  CDS (1)..(711)
atggcccgggaccccccaaacagagttccccccaccactgagggcacccgagggctcctcagctgcctgccagatgtggaaagggccacgctgacgcttctcctggaccacctgcgcctcgtctcctccttccatgcctacaaccgcatgaccccacagaacttggccgtgtgcttcgggcctgtgctgctgccggcacgccaggcgcccacaaggcctcgtgcccgcagctccggcccaggccttgccagtgcagtggacttcaagcaccacatcgaggtgctgcactacctgctgcagtcttggccagatccccgcctgccccgacaatctccagatgtcgcgccttacttgcgacccaaacgacagccacctctgcacctgccgctggcagaccccgaagtggtgactcggccccgcggtcgaggaggccccgaaagccccccgagcaaccgctacgccggcgactggagcgtttgcgggcgggacttcctgccctgtgggcgggatttcctgtccgggccagactacgaccacgtgacgggcagtgacagcgaggacgaggacgaggaggtcggcgagccgagggtcaccggtgacttcgaagacgacttcgatgcgcccttcaacccgcacctgaatctcaaagacttcgacgccctcatcctggatctggagagagagctctccaagcaaatcaacgtgtgcctctgagccagatgacggggtgggaccccggttagtaaggaccgggcgcccagtggctaaggcggtgccctggtgaccaaggagagccagacctgttgctcaggccgagctcctggttgccagcgagttaccacgggaccagtcgcgtgtatggctgagactcattcccagtttccagggcccggtatttggacactagttgccaagtctggggcctggggattttagggaccagcggttgtgaccatctttcctgagcaccaagggcttccccttttgttgccaaaaaggtagttctcgcgcttgctaggctggcctctcttgcctccccttggccggggcaacaccagttactgtgagcatcaccctggtgtggtgagtcacctctagtcggccctcttgctgctgccaaccaaatcagtattagctttgagcactgcactgtttctccctcccttggacgacacaaagactagcatgaggcactctttgtggggggcagcccctatcctgggttccagcatggacacaggggtagcctggggcttatagagaaacagctggtttcccctaccctttcccggggaagaccccacgattggcctctagtcagcaaatggagataacagagtctggcctttccaatccccatctccttgccccccccttgccccccccccgaaaaaaattgagcacttaaacccctcccttttggagggggccccctgaagcgtcaggctgggggcagtctggtacggaacatatttattgcctccatgcatgtgtgtgtgtgtctgtgaggactggtgtgcgtggacacgtctgaagcaggcgtgtggggctctttcagggaccacagaggagggagcagtttgcagtgcccagccaccctgaaatccccaataatggtgcctcagtgggccccagagttccagtgggagagtacggttccctcctgtctccctcttcttttccgcacctccatctttgtggataataaataaatatgcacaggt

SEQ ID NO: 15631 - protein, 237 aa, Homo sapiens
MARDPPNRVPPTTEGTRGLLSCLPDVERATLTLLLDHLRLVSSFHAYNRMTPQNLAVCFGPVLLPARQAPTRPRARSSGPGLASAVDFKHHIEVLHYLLQSWPDPRLPRQSPDVAPYLRPKRQPPLHLPLADPEVVTRPRGRGGPESPPSNRYAGDWSVCGRDFLPCGRDFLSGPDYDHVTGSDSEDEDEEVGEPRVTGDFEDDFDAPFNPHLNLKDFDALILDLERELSKQINVCL

SEQ ID NO: 15632 - DNA, 2292 bp, Homo sapiens
  CDS (174)..(2051)
aagagccgctaggctgccctgcccgaagggctcaactgtcagtgagcctgcgcaggaggccaataggctgccaatactccttggactccccgccagggccctgctgtcagtgcgcctgcgcgcgggtccggcgccgaggttcttgactgctgtgccggacgccaggtgtagccatgcagcgagccgattccgagcagccctccaagcgtccccgttgcgatgacagcccgagaaccccctcaaacaccccttccgcagaggcagactggtccccgggcctggaactccatcccgactacaagacatggggtccggagcaggtgtgctccttcctcaggcgcggtggctttgaagagccggtgctgctgaagaacatccgagaaaatgaaatcacaggcgcattactgccttgtcttgatgagtctcgttttgaaaatcttggagtaagttccttgggggagaggaagaagctgcttagttatatccagcgattggttcaaatccacgttgatacaatgaaggtaattaatgatcctatccatggccacattgagctccaccctctcctcgtccgaatcattgatacacctcaatttcaacgtcttcgatacatcaaacagctgggaggtggttactatgtttttccaggagcttcacacaatcgatttgagcatagtctaggggtggggtatctagcaggatgtctagttcacgcactgggtgaaaaacaaccagagctgcagataagtgaacgagatgttctctgtgttcagattgctggactttgtcatgatctcggtcatgggccattttctcacatgtttgatggacgatttattccacttgctcgcccggaggtgaaatggacgcatgaacaaggctcagttatgatgtttgagcaccttattaattctaatggaattaagcctgtcatggaacaatatggtctcatccctgaagaagatatttgctttataaaggaacaaattgtaggaccacttgaatcacctgtcgaagattcattgtggccatataaagggcgtcctgaaaacaaaagcttcctttatgagatagtatctaataaaagaaatggcattgatgtggacaaatgggattattttgccagggactgccatcatcttggaatccaaaataattttgattacaagcgctttattaagtttgcccgtgtctgtgaagtagacaatgagttgcgtatttgtgctagagataaggaagttggaaatctgtatgacatgttccacactcgcaactctttacaccgtagagcttatcaacacaaagttggcaacattattgatacaatgattacagatgctttcctcaaagcagatgactacatagagattacaggtgctggaggaaaaaagtatcgcatttctacagcaattgacgacatggaagcctatactaagctgacagataacatttttctggagattttatactctactgatcccaaattgaaagacgcacgagagattttaaaacaaattgaataccgtaatctattcaagtatgtgggtgagacgcagccaacaggacaaataaagattaaaagggaggactatgaatctcttccaaaagaggttgccagtgctaaacccaaagtattgctagacgtgaaactgaaggctgaagattttatagtggatgttatcaacatggattatggaatgcaagaaaagaatccaattgatcatgttagcttctattgtaagactgcccccaacagagcaatcaggattactaaaaaccaggtttcacaacttctgccagagaaatttgcagagcagctgattcgagtatattgtaagaaggtggacagaaagagtttgtatgccgcaagacaatattttgttcagtggtgtgcagacagaaatttcaccaagccgcaggatggcgatgttatagccccactcataacacctcaaaaaaaggaatggaacgacagtacttcagtccaaaatccaactcgcctccgagaagcatccaaaagcagagtccagctttttaaagatgacccaatgtgaatgtctgtagtcagttgtttacaaactccctctcctgcacaattcatttagaggcttcaatcatagaattctgcaaattaatgacaactcatgctttaattttgtattttgaatgtacacgcatgctgaagctaagtaacttttaatcaaagaaataagatggtattaggcaaatcttactatactatgaaaagcattaccttgcctatttttaatattattaaagcctttctccttc

SEQ ID NO: 15633 - protein, 626 aa, Homo sapiens
MQRADSEQPSKRPRCDDSPRTPSNTPSAEADWSPGLELHPDYKTWGPEQVCSFLRRGGFEEPVLLKNIRENEITGALLPCLDESRFENLGVSSLGERKKLLSYIQRLVQIHVDTMKVINDPIHGHIELHPLLVRIIDTPQFQRLRYIKQLGGGYYVFPGASHNRFEHSLGVGYLAGCLVHALGEKQPELQISERDVLCVQIAGLCHDLGHGPFSHMFDGRFIPLARPEVKWTHEQGSVMMFEHLINSNGIKPVMEQYGLIPEEDICFIKEQIVGPLESPVEDSLWPYKGRPENKSFLYEIVSNKRNGIDVDKWDYFARDCHHLGIQNNFDYKRFIKFARVCEVDNELRICARDKEVGNLYDMFHTRNSLHRRAYQHKVGNIIDTMITDAFLKADDYIEITGAGGKKYRISTAIDDMEAYTKLTDNIFLEILYSTDPKLKDAREILKQIEYRNLFKYVGETQPTGQIKIKREDYESLPKEVASAKPKVLLDVKLKAEDFIVDVINMDYGMQEKNPIDHVSFYCKTAPNRAIRITKNQVSQLLPEKFAEQLIRVYCKKVDRKSLYAARQYFVQWCADRNFTKPQDGDVIAPLITPQKKEWNDSTSVQNPTRLREASKSRVQLFKDDPM

SEQ ID NO: 15634 - DNA, 2082 bp, Homo sapiens
  CDS (276)..(674)
gtcaacaacccccgaggaaatttccaccccaatagaaacaacatatagaacggaacattcaggtccaccagagtgggcaacttaaatcctggagctaaaatatgggtacagtgtccatcagatcctgcccctaagactgctgaccttgtagctattggagcagaatatgaaggcacagtacaatttcctaaagatgaaaaacagtatcatgttcccctccatttttgttactacagagaataacctgtctgctagtaatcagcacctggatcaccatgtctgaggctgagaatgagttcatcaactgggtagccactgctgcaatagaagccaactgcagtcagtgctggctctgtgttgagttgccagaggccgctgggaatgggctaccttggagaattgtccctgctaacatttctgaatggatatgccaataccaatgggagtgggataacacttggttttgttttgattttttgagccagagtgtctctctgtcgcccaggctggagtgcagtggcacgatcttggctcagtgcaacctctgcctcctgggttcaagcgattctcctgcctcagcctcccaagtagctgggattataggtgcatgtcgccacgcctggctaattttttgtatttttagtagagacggggtttcaccgtattgcccaggctgatgtcaaactcctgagttcaggtgatctgccctcctcggcctcccaaagtgctgggattgcaggtgtgagccaccgcgcctggcccgggataacacttgaaatccaacctggacttcttttaaccaaacagtctatttttgcccttgcccaaacaaaacacagcacccttgttacttcaattacacattacagcgatacaattataggagaactcttcctgttccctggggggccctctaggtatgcgaatcctacaggtggcaatacctgcttggacggggagacacacttgggggtggccattaattccattcaccatctgggataatatttctctccccagtaatctagatgcttacaaacattgctggttatgaatgcgccggactccctggtgacggtaccctatcacagtattctcccctgccaccggtacaatcctgcttcagcaacaaattcaaacattcagcttacatgtagaaaaagctcttaatgatagtagcatggaacttatgttgtaatcagataaatttgctcagctgtgtactgtcatgttgcaaagtcaaatggcattaggtttgcttactgcagcccaaggaaaggtttgccccttactgcatcctgaatgttatgtgtatatccctgacaattctcacaatatgaatctccttgcgaagccatgaggggtgtggtttttattaattatgcttttagttctcctgtgcttaccctgtatctgtaatctatatcaattgtggcttccctgtgtatccgtaagagtattttcctacagttgagtatcagattgaggccaaatgtggaggaaaagttaaatattaaatttgaactcaattgaacatggacacaaacaatggtcaccaagtcccggaacaggttgtgtgagccccttgaggcattcatccagcgctgtttcagataaatctctatttcaatctattcctatatgttagttattgaaaaacaacagacaatcgcaaaaacaagttgacctttttgtgttccttgagcctggtcatgaagggccctcgtgcctggagctcatgccaaacaactcattacaaaagagctagggtcctagattgtgccgaagcttcatgagacctctcctcgtctgtgcacggacgagtggccgactctggagcccaggccgttgtttcctagtctggtggtgaatccgccatagtctggtgagtgcagtgtccgactctcgagcccaggctgttgctgttgcttcccagtctggtggtgaatcctccatagtctggtgagtataaatacatatatctcttttcctttctccccttcccattgcaacttgcttactatatcatttgcttattatatctgcattgccatttatgtgggataaagcttgtttaccctt

SEQ ID NO: 15635 - protein, 133 aa, Homo sapiens
MSEAENEFINWVATAAIEANCSQCWLCVELPEAAGNGLPWRIVPANISEWICQYQWEWDNTWFCFDFLSQSVSLSPRLECSGTILAQCNLCLLGSSDSPASASQVAGIIGACRHAWLIFCIFSRDGVSPYCPG

SEQ ID NO: 15636 - DNA, 3157 bp, Homo sapiens
  CDS (122)..(2191)
tcaccagattgatgcagtgctgttgtctcaccctgatcctctccaccttggtgccctcccgtatgctgtcggaaagttgggtctgaactgtgctatctatgcaaccattcctgtttataaaatgggacagatgttcatgtatgatctttatcagtctcgacacaatacagaagattttacactctttacattagatgatgtggatgcagcctttgataaaatacagcagctaaaattctctcagattgtgaatttgaaaggtaaaggacatggcctgtctatcacacctctgccagctggtcatatgataggtggaacaatatggaaaatagtcaaagatggagaagaagaaattgtttatgcagttgacttcaaccacaagagggagatccatttaaatggatgttccctggaaatgctaagcaggccttccctacttatcacagattcattcaatgctacatatgtacagcctagaagaaaacagagagatgagcagcttctgacaaatgtcctggaaacacttcgaggtgatggaaatgtgttaatagcagtggacacagcaggcagagttttggaacttgctcaacttcttgatcagatttggaggactaaagatgcaggattgggtgtttactcattggcactcctaaataatgtcagttacaatgtggtggagttttctaagtcccaggtagaatggatgagtgataaattgatgagatgttttgaagacaaaagaaataatccgtttcagtttcgccatctctctttatgtcatggtctttctgacttggcccgtgtacctagccctaaagttgtacttgccagccaacctgacctggaatgcggattttcaagggatctctttattcagtggtgtcaggaccctaaaaactcaatcattctaacctacagaactactcctgggactttagcacgtttcctaattgataatccttctgaaaaaattacagaaatagagttgaggaaacgtgtgaagcttgaagggaaagaacttgaagaatacttggaaaaagagaaactaaagaaagaagctgccaaaaagcttgagcagtcaaaagaggcagatatagattccagtgatgagagtgatattgaggaagatattgaccagccatcagctcataagacgaagcatgacttgatgatgaaaggtgaaggcagtcgtaaaggaagttttttcaaacaggcaaaaaagtcctatcctatgtttcctgccccagaagaaagaattaaatgggatgaatatggagagattatcaaaccagaggatttcttagtgccagagcttcaagctactgaagaagaaaaaagcaaattagaatctggtttgacaaatggagatgaacctatggatcaggatttatctgatgttcctactaaatgtatttctacaacagagtctattgaaataaaagcccgggttacctacatagactatgaaggacgctctgatggggattccattaaaaaaatcattaatcagatgaaaccacgacagttgatcatcgtccatggcccaccagaggccagtcaagatctggcagagtgctgtcgcgcctttggtgggaaagatattaaagtgtacatgccaaagctacatgaaacagttgatgccactagtgaaactcacatctaccaggtgaggttaaaagactcacttgtcagctctcttcagttttgtaaggcaaaagatgctgaattagcttggatagatggtgtcttagatatgagagtttccaaagtggacacaggggttattttagaagaaggagaactaaaggatgatggagaagactcagagatgcaagtggaagctccctcagattctagcgttatagcacaacaaaaggccatgaaaagtctgttcggagatgatgaaaaagaaacaggtgaagaaagtgagatcattcctactttggaacccttgccacctcatgaggttcctggacatcagtcagtttttatgaatgaaccaaggctgtcagacttcaagcaagttctcttacgggaggggattcaagctgaatttgtaggaggtgtacttgtttgcaacaatcaagtagcagtccgcagaacggaaactggacgcattggattagaaggctgcctttgtcaagatttttataggataagagaccttttatatgaacaatatgccattgtataaaggacatgatgtcaagaagtatctgcttgacctttctaagaaaaagggattcttatcttactctgagcttttgatgttttgttttgtaacatacaaaaagaatctgccagaaaaacttacatgtatcagatttttaaaaatataaatagagaacattttgcaaatgctcaaatgagcattctatcttttggctttcagagtgatagagctcctaacaggtgtacaggcccaagagttgaaggtgattggttttctttacagactccttgttctctagaagggctttttacttgaataaaacaatgcaacttagcaaaccaatttatggccttagagaaacatttttgcatgagttcttacaaactgtttgttatattttctggaatgataagtgagaattatttagaaaagacatgctccaaaaaaaaaaaacaaaactgataaaacagtttttcgaaacttacttttaaaagcatacgtgctatgactctctccagtttgaatatgcaattgttttcacaggcaggatgtctgttttctgcctgtatttcccagtgatttactctagggtaaggtagtacacatttggttcagaaattaatttttatttctcctatatcttgttttatcaagattttgttgtggcatttcaatgtaaattataacaccatcatttgagtatacataattcaaaagaactacttgatgcagtatagtcttaagggttctgcatacattttagaaacatcttagccgtaagttaggtcctgtgttaaactgtttagtgctctgtttttaagaaaacaaatgttgaacctcacacttttatgtggtgacagtgtaatttaattaaaaggtgtaaatgttttcatctcttaggcttgctgtctcctaaggtcacccaagcagtggttggattttatacacattactactaaaataatactgaagttggataaggtt

SEQ ID NO: 15637 - protein, 690 aa, Homo sapiens
MGQMFMYDLYQSRHNTEDFTLFTLDDVDAAFDKIQQLKFSQIVNLKGKGHGLSITPLPAGHMIGGTIWKIVKDGEEEIVYAVDFNHKREIHLNGCSLEMLSRPSLLITDSFNATYVQPRRKQRDEQLLTNVLETLRGDGNVLIAVDTAGRVLELAQLLDQIWRTKDAGLGVYSLALLNNVSYNVVEFSKSQVEWMSDKLMRCFEDKRNNPFQFRHLSLCHGLSDLARVPSPKVVLASQPDLECGFSRDLFIQWCQDPKNSIILTYRTTPGTLARFLIDNPSEKITEIELRKRVKLEGKELEEYLEKEKLKKEAAKKLEQSKEADIDSSDESDIEEDIDQPSAHKTKHDLMMKGEGSRKGSFFKQAKKSYPMFPAPEERIKWDEYGEIIKPEDFLVPELQATEEEKSKLESGLTNGDEPMDQDLSDVPTKCISTTESIEIKARVTYIDYEGRSDGDSIKKIINQMKPRQLIIVHGPPEASQDLAECCRAFGGKDIKVYMPKLHETVDATSETHIYQVRLKDSLVSSLQFCKAKDAELAWIDGVLDMRVSKVDTGVILEEGELKDDGEDSEMQVEAPSDSSVIAQQKAMKSLFGDDEKETGEESEIIPTLEPLPPHEVPGHQSVFMNEPRLSDFKQVLLREGIQAEFVGGVLVCNNQVAVRRTETGRIGLEGCLCQDFYRIRDLLYEQYAIV

SEQ ID NO: 15638 - DNA, 2492 bp, Homo sapiens
  CDS (131)..(733)
caaagatggaatacgtctgaatcttattttgatacgatacactggagacaattcaccctattccccaactataatttattttcatgggaatgcaggcaacataggtcacaggttgccaaatgcattacttatgttggttaacctcaaagttaaccttttgctggttgattatcgaggatatggaaaaagtgaaggagaagcaagtgaagaaggactctacttagattctgaagctgtgttagactacgtgatgactagacctgaccttgataaaacaaaaatttttctttttggccgttccttgggtggagcagtggctattcatttggcttctgaaaattcacataggatttcagccattatggtggagaacacatttttaagcataccacatatggccagcactttattttcattctttccgatgcgttaccttcctttatggtgctacaaaaataaatttttgtcctacagaaaaatctctcagtgtagaatgccttcacttttcatctctggactctcagatcaattaattccaccagtaatgatgaaacaactttatgaactctccccatctcggactaagagattagccatttttccagatgggactcacaatgacacatggcagtgccaaggctatttcactgcacttgaacagttcatcaaagaagtcgtaaagagccattctcctgaagaaatggcaaaaacttcatctaatgtaacaattatataatgtttccctttttgattattgcattgtattttaatttgtgcagaatgataaagaatgttccttttagaagtgtgttatgtctgtacctgtctgaagagtgacattaaactttgaaaggacttcactgctcctttacgatattccaaatagttttttacattggaaaaactaattcttgggattctttcatacattttcatcaaaactttcagtgtgattatgtattcatatcttcagtttaatatgtcagtataatagatattgttcaaaagtttcttgttgctaaagtggtgtaatctgttacacagatgaatagctagatgtggaaagagatatgtaaacaagaaacctttgggtattgtttcttaagtaaatattgggacaatcatggtaagcaaacttagttctgtaactgcatttttcaccttaaaagttaaatgaaatgcatgatggtattttattccttgaattatgcaatgcaacattttacatgtaaatagcactggtcatatactgatgtatatggttatctgggttatatctatttttatgtaaactctattttgtttttggcaagaagtgaaattgagacttatgtgcaggttgccattgaattttgctctggtgaatgctgagatccagctttttcttacaaataaatgggaccctgttttccaatacaaatgtaccgtgtttttgttaggtacagtctggatcatggcatgtagaaatagaaatttagaattttactgcagctttgatgtgcatatttgaactttttaacatttgtaactttggtggcaaagagaattttagcttctatcgattttgtaagtcttcagctgaaccactaatagcagtcatagtgaagattagcactacttagaattaaattaggaagtcttttatcattgcaggattgtacatactactttataaaaattctcacctttgattttaaatcccagtacctagttatatctaacctatcaaaggcaagatatcatttattggacttcttgaaaataaaagttacaaaatccaacaacaacaacaacaaaacaatgttcttggttttaatgttccagttgctgtgaaatagaactcctacaatcaaaagacagttttaggaagtcttatttattgattttaaaagttttacatgtaggagtgtgggaatgaaggaattctggagctttttgacacaaaacctattaccacatttagcagttaaatggctataggtgggaagtaggatttagatgtatagaaaagtaagaaaatcttacttagaaaaaagccccttgaaacttgcaggatttacttaataaaaatacacgctatgagtcataattgtgccaagttgtttcatgcagtcctcaaaaattagatgtaattgagctttgtgtaatattatgtcagctttaacatataatattttgaatattttagctatatttagtggctttctgcaagcaactagaacagagaagtaatgggtcaataatcttgaccttaatttaaaactttcaatggagatagggctagaaatacttttgccaaatagcattcttattcactttatgccggtatttagaaaaaataaattatagcaagtatgatttctaagaatgtttttctataaattactaattgtaaaaagtcttgctttttaaaacaagttggtaatgcatatcatggaaggcatattttgtatgtataaattcaccacaattaaagattattcttgtcagtc

SEQ ID NO: 15639 - protein, 201 aa, Homo sapiens
MLVNLKVNLLLVDYRGYGKSEGEASEEGLYLDSEAVLDYVMTRPDLDKTKIFLFGRSLGGAVAIHLASENSHRISAIMVENTFLSIPHMASTLFSFFPMRYLPLWCYKNKFLSYRKISQCRMPSLFISGLSDQLIPPVMMKQLYELSPSRTKRLAIFPDGTHNDTWQCQGYFTALEQFIKEVVKSHSPEEMAKTSSNVTII

SEQ ID NO: 15640 - DNA, 1969 bp, Homo sapiens
  CDS (415)..(1653)
tatgaatgcacagcttgcccatcggggacatacaaacctgaagcctcaccaggaggaatcagcagttgcattccatgtcccgatgaaaatcacacctctccacctggaagcacatcccctgaagactgtgtctgcagagagggatacagggcatctggccagacctgtgaacttgtccactgccctgccctgaagcctcccgaaaatggttactttatccaaaacacttgcaacaaccacttcaatgcagcctgtggggtccgatgtcaccctggatttgatcttgtgggaagcagcatcatcttatgtctacccaatggtttgtggtccggttcagagagctactgcagagtaagaacatgtcctcatctccgccagccgaaacatggccacatcagctgttctacaagggaaatgttatataagacaacatgtttggttgcctgtgatgaagggtacagactagaaggcagtgataagcttacttgtcaaggaaacagccagtgggatgggccagaaccccggtgtgtggagcgccactgttccacctttcagatgcccaaagatgtcatcatatccccccacaactgtggcaagcagccagccaaatttgggacgatctgctatgtaagttgccgccaagggttcattttatctggagtcaaagaaatgctgagatgtaccacttctggaaaatggaatgtcggagttcaggcagctgtgtgtaaagacgtggaggctcctcaaatcaactgtcctaaggacatagaggctaagactctggaacagcaagattctgccaatgttacctggcagattccaacagctaaagacaactctggtgaaaaggtgtcagtccgcgttcatccagctttcaccccaccttaccttttcccaattggagatgttgctatcgtatacacggcaactgacctatccggcaaccaggccagctgcattttccatatcaaggttattgatgcagaaccacctgtcatagactggtgcagatctccacctcccgtccaggtctcggagaaggtacatgccgcaagctgggatgagcctcagttctcagacaactcaggggctgaattggtcattaccagaagtcatacacaaggagaccttttccctcaaggggagactatagtacagtatacagccactgacccctcaggcaataacaggacatgtgatatccatattgtcataaaaggttctccctgtgaaatcccattcacacctgtaaatggggattttatatgcactccagataatactggagtcaactgtacattaacttgcttggagggctatgatttcacagaagggtctactgacaagtattattgtgcttatgaagatggcgtctggaaaccaacatataccactgaatggccagactgtgccaaaaaacgttttgcaaaccacgggttcaagtcctttgagatgttctacaaagcagctcgttgtgatgacacagatctgatgaagaagttttctgaagcattggagacgaccctgggaaaaatggtcccatcattttgtagtgatgcagaggacattgactgcagactggaggagaacctgaccaaaaaatattgcctagaatataattatgactatgaaaatggctttgcaattggtaattaaattctgtggcatcggtagttggcaagactaatctgcaaaataagaataattccagaaaagtgaggcaaactagaaacattaacttctattaatttattcatcaagtattttaggatggctaaataatttgataatgtgctgaaagatcattaaggttatatcaaattttagtaacaaataaattatttaaaattatttgccaggattcttaaaaatgacaaaaactaagaaaactaagtcacatatgctggtaaaattcaaatgttgatgtatcctaaaagagaatagtaataaagtcctaacagcaactttt

SEQ ID NO: 15641 - protein, 413 aa, Homo sapiens
MLYKTTCLVACDEGYRLEGSDKLTCQGNSQWDGPEPRCVERHCSTFQMPKDVIISPHNCGKQPAKFGTICYVSCRQGFILSGVKEMLRCTTSGKWNVGVQAAVCKDVEAPQINCPKDIEAKTLEQQDSANVTWQIPTAKDNSGEKVSVRVHPAFTPPYLFPIGDVAIVYTATDLSGNQASCIFHIKVIDAEPPVIDWCRSPPPVQVSEKVHAASWDEPQFSDNSGAELVITRSHTQGDLFPQGETIVQYTATDPSGNNRTCDIHIVIKGSPCEIPFTPVNGDFICTPDNTGVNCTLTCLEGYDFTEGSTDKYYCAYEDGVWKPTYTTEWPDCAKKRFANHGFKSFEMFYKAARCDDTDLMKKFSEALETTLGKMVPSFCSDAEDIDCRLEENLTKKYCLEYNYDYENGFAIGN

SEQ ID NO: 15642 - DNA, 2587 bp, Homo sapiens
  CDS (27)..(344)
tactttctaacagtagtatttttagaatggcagctataaagttaactcctggacacaagtatatactgtgcactgaaaaaatatccatctacacagcacccaaggggagggctgggggcaccggcacgggggcagcgtgcagccctgccctgtcaggctgtcagacaagccccggggggcagcaggtgggctcgggacgggctgggggagggacggccatggcacttgggggctccagggtgactcccatgaggcctcccttcaaccaggctttttggccccacaaatactttaagcaaatcattaaaattataacagttaatggtttgggggtgtttaggctgtaactgctaactcctaggaaacagccttttccctggacacagatggtccatacgctgagccacgtgaaactgctgatgttttgtttagatgcacacacatggcagcgtttcatacaggtcagcaggttagaccggcttttgaccatattcatcgctatttaaaacctgtggcaaaatgaacgcttattttacagactttctaatttgaccagatttcttaatgaatagacacagaattaactaaaaacagtctcaccccatgtagtgcgccgtgtcctgagagaggtgccctccctacgaggagggaagaacaggccctggggtgcagaggcccggcacgtagagaacccagatagacgccggtggtggaactggtcaaactccacgcccgcctgggaggttgtcaggttgctgtggatgtaaggataggaggtgcccagtgctccgctcaaggaaggctggatctgggccccacctacagagagggctcagggctggaccgggggcattgtgtgcttgggccgacccgggccggtggcagacgctgttctctgtcgggagatttgcgtccccaggaccctgttacacagtgggctgttgggttggtggctggcttttcctctatggacttcctcttcctgccccacctgcataggcacacacaccttgaatctgcaccctctggagggcatctgtactcctgtgcaaaatgcccagtccagagacaaaacctcagactttgtgcacctaggtttccttctcagcagcggagactgttctttgagttgccttgaagtggaggccgagcggctgcgggcccttcgcctccctgcggctgaccttgatgtagctttaagtcacactagactgcagaggggtccgaggccagaaacccctgtcctgcatcagactttcattcccacgttcttaggctttgttactgatacctcaaatcggaagttttagttctgagaaaggcaagtcagcgctcttgaaatgcctgactggtagatatgcaactctggcctccagtcttccatgaaaataaatgctgcctggacccccacccagaccacacactgacggccggctccggcggtgcccacccctcaggctggcccggcacccaagactggccacagccagctctgtcagcatgttgtgctcggacaagctgtttccttcttctgaccaacccaggtgtgacctggggatgcagagctttctgttttgggtgttgggaggagcagcaggaaggagtcgccagatgatcaagctccccctttgctgtcatctgtgaatgagcttcgccaggtggtgggcacctgggagccatgcagaggctgtggtgctgagttagactccaggtactttgtggtcaaaggaaatcgcctagctccaggctgtgttaggacagtattagcatgaaggctgtgcgaccatcatgcctgctgatccttgaggcaggcctggtccagaaaactctgggtcagtgactgcgcagggccagccgctaccaggacggccctgaaacaggacacatctgttttttgtccctcaccctgggcaggccgcgtcacaatcacagtcctcctcctccccaccctgacgtctgagcgcagggcttgaattgttagtcccaactctggccaaagatactttttccagagacagaggccaggaggcagtgaggggagccccgcggggaggcggcggcgactgccacagcccttccagcctgtcttgctggccgccctggttcatatttgagtttaattgtactgaccctggacccagataagcagcaactttgtgtctttggggtcacagaacattttggggcagtttaatgtggtaccaaactgaaaataggagctatttatagatggagcagcacttagtgcttcatagaaagcaatgcctatttttaaagttacaaacgcagatatctacatagatatgctttgctgagaagttaggtctgtggtagaccagaaaccacaaattgactttttttcttagaaaatatttctatttgcggtaaatatagtaatatgtaaataatgtacatctgttgatttctggagtgtctgttattcaatgatgtatatactcccacagctcgcatgaaggaacagcctctattgatacttggttgtaaagtgaagtaagattggagggtggatggctgtcagagctcttgcagatactgtgttcactaaataaaaatcacatgtattgtt

SEQ ID NO: 15643 - protein, 106 aa, Homo sapiens [sequence omitted]

SEQ ID NO: 15644 - DNA, 1882 bp, Homo sapiens
  CDS (51)..(368)
tttctccagcggcccggtcgtgaagggcggtcggcgccgcagcggctccgatgcccgcccggaagagagcgctctggccccggcctcgcagctgcgggacagccgggagcggagcagagggcagccgcggccagttgtctccccagcggactgggaagggaactttatctcggcctggactcccgctgtacctttgttgggggttagtggtgaggctgcggtcgtccgagctcctgggtgtcgcgggcgccgcgatcccctcttcccgtagaagggcccagggcgctgctcgaggcgcgggaacccctggccagaggcgggcactggcgcagccccgcggctgctgctggccaagccgactgcagggatgagaaattccttgtaagagtggctggaaggctccgcggagagggaagaaactcttcccagagcgagctcccactgctccttgggaatggtgcactttccagttccagttggaccctctgggattgtcacaggaagcgctgccatgtatgaggagccctctgcaaactacagaaggatggatgctcttagcttataaataagattttgacgccctggttggtttgatgacttgtgtcatgaggagtaggggtgtgcgctgattccaaattcttccacgcggcatcctgctccggagcctcccttgtctcctagagaaagggacagggaatcgaaggatggggagtctgagggagaggcccctattccgcacgctgtctcctggctggctcctgaagggctggctgcttcccccacctggaagtccaggcccctgttcggaagtcctctccgcacagcctgacagtcccttggttctcttatgattgctctcctcccgcttcaggcctaggatggcaaggacagctcccacttaccagagccaaggcactacgccgttcctgggtgtcctcttctcctccagctcctttgtaagtcccatgctcctctatttacctagtggagggtgtcatgccaggaccctggcatatgatacaccagagctgcattgcttttccgaatctgctcaagctgtacaacatttctgagcctcagtaccaccagccatctgtggtcctccatttgtcctcttctcctacaaatacctccagcccctctcttccttcatgatgcttctagcattggaaatcctccaggacaattctgccttcaagtttcctagcctgagccactgagttgatggaggaaaatgtgatagagatgactcgtcctcctttaattttcccacttctataagcatataaacgtgccctgcaactctcctaagtgtccccagaggacccgctttcccagtctctgagacaaacatttcttagccttctctcctgcaagagataacatttctcaaagtttctttgagcatgtagatgctgacaggggatgatctatcccttccaccaccaaacctccacaccagttggcactccacccttgttatagtggaggaagctgcaggctagttccagcacagtgaaccccagtagtgtttcgcttctcagcctttgccatctcctcatccctgagccatctccctgtggcagacactgatgggccaccagcactgcatcagtgaaggacttgctgccccagctgctggcgtgctgtcagcacagcctcctgcagtccgcctctccacgattgcggaaagcatctaggctgaagggtgcaggtgctgtatgcattggtttatatgcttcctgtacatttcctcaggaacccaacctgcacccgtccttctctaaagtatggttaccatcagcatccagacatactcctttttttttttttttttttttgcttctcttcatagcaaaatatatgaacagtttttaccttt

SEQ ID NO: 15645 - protein, 106 aa, Homo sapiens [sequence omitted]

SEQ ID NO: 15646 - DNA, 3057 bp, Homo sapiens
  CDS (47)..(1066)
agacaatacctgcgtgaatttgcttttggaagctagcaattaccaaatgatgccatatatgcagccagtgatgcagtcagatagaactgccattcgatctgactccactcacttggttacattaggaggagttttgaggcagcagctggttgtcagtaaagaattacggatgtatgatgaaagggcacaagaatggagatctttagccccaatggatgctccccgttaccagcatggtattgctgtcattggaaactttctttatgtagttggtggtcagagtaattatgatacaaaaggaaaaactgctgttgatacagttttcagatttgatcctcggtataataaatggatgcaggttgcatcattaaatgaaaagcgcacattctttcacttgagtgccctcaaaggacatttgtatgcagttggtgggcgcagtgcagctggtgaactggccacagtagaatgttacaacccaagaatgaatgagtggagctatgttgcaaaaatgagtgaaccccactatggtcatgctggaacagtatatggaggcttaatgtatatttcaggaggaattacccatgacactttccaaaatgagctcatgtgttttgacccagatacagataaatggatgcaaaaggctccaatgactacagtcagaggtctgcattgcatgtgtacagttggagataagctctatgtcattggtggcaatcacttcagaggaacaagtgattacgatgatgttctaagctgtgaatactattcaccaacccttgaccagtggaccccaattgccgccatgttaagaggccaaagtgatgttggagttgccgtctttgaaaataaaatctatgttgttggtggatattcttggaataatcgttgtatggtagaaattgtccagaaatatgacccagaaaaagatgagtggcataaagtttttgatcttccagagtcacttggtggcattcgagcctgtacactcacagtttttccacctgaagaaaaccctgggtcaccttctagagaatcacctctttcagcaccttcagatcattcttaggtctaaggtgtaacacctttgcagtacgtcatgggtgatctaatacttccccttcagttgtatcttcttacagtgattggtacagttattagatataaaggtaactgatgttattcgtcttgtatggcttttagtatgtttatcaagtggctaacaaatgcattctgaaaatgtatttaacatagctgttttaacaaatgaaaaaaagacgtagaaaaatgtttagatgtctttttgtgatgttatataaaattgtagatgactgtggtaaatgtgtaattatgtccattatgcttcaaagttgagttttcatctttgactccaaaatgtcagagggaggccgctctaaactaaaaataacgaaaggttgccaagtattaatactagttacctccctcttttcgtagtttttgtcatgtctgtcaacttactcgattgtgtggttgcattcagaatatttgaagtttcttacgtagacagaaataataaaaatattaactaggaaaaaacagtatagcaccaagccagtatttggtatctctctctagagcgagcaagagagggagagaggaggaaaaaatacacataatacaaacatacatgcatgcacacatacatacatatgtatacacacacataatttgaaaactgattggcacttcaacgatgctgaaattgtttttaaattgaagtttctttcttccacaaagcagccgtttctattcaaatggaaattcagtaccagagaataaatgtctatgtagtcatactgaatttagatagataagggctacagcatactaaatcgacaaccaaatttgtcatgtgactaaaccgttacttcagatgaagcttacattactgttttctgcttgtgtattttctgtagagtacttttacacagattggtaaagttcaggtttcagagaactgcttttgtgcagaaaattcaggttcttttttccacctttttggtcagtaaaacttaataaaaaaagcaaagaaaaaaatattctgaacaaagctatagggttttaagttcagcctcccaacttagtcatcctaacatgattattttgtgatttggggtgcttgccctggtgctgttccagtccatgtgcatcctgagctgtgtgatctgcctcgaggctatgatctgagcaagcaggagataacattttcttctgcatcaagtgaggaaaaatgtgcttttggccatgtctcaaagacaggaccaacttcagattcccaaagaagccagctacagagcctctggaacactatggtcttacaagcagtactaaaatcaaccctcagcctcttcaatgccaaaggtatccctattggttgagaaccacatggtaatttttaatgggacttttatcagcaaatggagttacaggaattctctgtaatgagtgattctgaagaggtactttcctggaataattgtctacctgaagaaaaaaaatttatatatacattgtgtgtgtgtgtaatacacacacacacaaccccctatacctggaagattgtcagcatgtaaatcaggaacaactttctccttattgacaatcccataataaaactcaggaaccaaggcaaaatgaattggcttctaggggtctgaaccttactgcccatacaagtgttgattcattttaatgctgtttatgatttctgcattggcagaaattttcatactttctatgtttttttaattactcagttttttattactaaaaatagcacatttgagtacatttgaaaagtagaaaaattagaaattattaactttattgaataagcaagaagtgcatcctaatcctttgattattaatgaggttgaatatttgtgtgctatcggtagctgtgtttctttgatcagatgttcctgtccttttgcccttctgttatctgttggagttgctttgtttttcgtatcaagttataggatctctttatataatagatgtaatttaacttgc

SEQ ID NO: 15647 - protein, 340 aa, Homo sapiens
MMPYMQPVMQSDRTAIRSDSTHLVTLGGVLRQQLVVSKELRMYDERAQEWRSLAPMDAPRYQHGIAVIGNFLYVVGGQSNYDTKGKTAVDTVFRFDPRYNKWMQVASLNEKRTFFHLSALKGHLYAVGGRSAAGELATVECYNPRMNEWSYVAKMSEPHYGHAGTVYGGLMYISGGITHDTFQNELMCFDPDTDKWMQKAPMTTVRGLHCMCTVGDKLYVIGGNHFRGTSDYDDVLSCEYYSPTLDQWTPIAAMLRGQSDVGVAVFENKIYVVGGYSWNNRCMVEIVQKYDPEKDEWHKVFDLPESLGGIRACTLTVFPPEENPGSPSRESPLSAPSDHS

SEQ ID NO: 15648 - DNA, 2046 bp, Homo sapiens
tctgtaattcatggctaatccgaagagtttgattgagttgatggcggcagggaccagatagacaccttggtgattgtctttggccataagaatagaccaaggataggttttccagagacaccttcatactgtaaacatggtttagacacggtcatagggaaggctgctggtccatcatttgttctgaacaaatggcatttcctgctcctgaccctggcagttggccccagattccttgtcgatgacttggaaacgtccattctgggtaaggtcagcactccctgagagatgttaacaaagtttacctatgagtcttactgtgtagacaatctgaagtcaattttagttacacaatcagcattcccatgtgtcctcagtgtcttatcaatgaactatgtgtatcaagccatactaaactggagtttagcaggacagaggcaaactaaatgtagaacataacatatcagctgaatatgtctatccaggactgtttttctagaacataaatcatggagctccttgacagtgtatccactgtttttggggtttaataaaaccaactagaatttagacttaaaagaaattattattccttttggttgtccacataaagtagtccagggctatcatatggctaaaatcaagttatttggttcatctctggtatgtatttataaagtcaacttatcagccattaagatggagatttgctttaaatttttgcagtgtgtgtggcagtcagaaaaacccatatctagttttcaacttcacctctggtgtttttatggcttaaccttatatcattgatccaacatctagcctgatgctggagctcttatttctagcctgatgctggagctcttatatctagcctgatgctggagctcttgaagctgactcttggaagtttggagggtgtagagtttcccatctagtatttaatttgtccctgtgccattagtcccagcttgaagtcatttgccagtgtcgatgttgacaggattgtgacaatattgcctttcataaaaccgagaaccaaagaattccattattctaacaaagcctgagtttcatagattgtgggcacatctagacagatatgtgcatgcttgatggtgcagagaaactgctgacttccaccaacctcatgctccccctggctggccatacagagggattcgttgtcatattgaaaaggctctgaaagatgagtttctaattgaagctcactatctcaggttggtgtttctactgtgcagtcccaagcctgtatccatatcataaaagtggaggcctggtactcctccaggttatctggccagtgtagactcctccacctgaatatgaacctccagggtaagaatttttcagacatgtctatactgaacagtaggatcctgcactttccaaatgtctgcctccttttgttcttcattgacccattctaattcctgttaggtgtgagaagaattgtcttcagttctctctccattctcattcatgatggaatcattgatccattgaccagttgagaaatgattgatgctgaagaggtggtattctgttggtaaggcttattaccaaacttccgataatgaagcaggctaccaaaaacttatccagcccaccctaggagtgtttggatttgatcatggatgtagcatacaccaaaatccaccgagacctttgcaaaattaggctacttgttttattttgccagattatcatgggagagtctttaactagttctgaatatttgtaagtctgagtacttcatagaattataaagaaggtacagctgaccccttctcaccatgttgtaaatatttactgagactgggtgcagtactgagggataataatcttctgatttatcaaatcctgactgtctagagcaaattgtacactctctttgtgaatggtcctgtaacgtgtatgaacacatttctgggtgccttagaagttgtatttttcatgtgtgctaatatgcagtatttatacattgtgagaagctgctttgaataaaaaggttgaaacttcgtctgc

SEQ ID NO: 15649 - DNA, 1863 bp, Homo sapiens
acaaagtcagcttcctgccagcccagggagaaatctggagggattccttggattgcaaccccgtcatcttccaatggacagaaaagccttggtctgtggacaactagtcctgaatcaagttccagagaagatgcaaccaagacagatgcagaatcagactgccagggtgttgcttcggtcactagcccaggagacatttccccacccataggcctagtcaagaaagagccttatgggctttcaggactgaaaagagcttctgcttcttctctcagatccatctctgcagctgaaggaaacaagagctacagtggatctattcaaagcttaacttctgtaggttccaaggagacacccaaagcttcaccaaacccagacctgcctccgaaaatgtgcaggagattaagactagacactgcctcaagcaatggctatcagcggcctggctcagtagtggcagcaaaagctcaactgtttgaaaatgttggttcacctaaaccagtttcttctgggcgccaagccaaagccatgtactcctgtaaagcagagcacagtcatgagctttccttcccacaaggagcaatattttctaatgtgtacccatcagtggaaccaggatggttaaaggcaacttatgaaggcaaaacaggactagttccagaaaattatgttgtcttcctctaatactatttagtggatggcagtatcttcatggtatccatggtaacgaataaatgctatgattttatctgacacagatacacggggatcagcccactaagtgaaaacagtcaatttctatcaagttcttcaccagcagactatgtagctccttattaatggaaaaaaagatttaaattgttggccattcttttttggttggtttcttattttaaaatatcttacttgtgaaaaatgtgtttttggataatatgtaactctccacaatgtcgcttccgtagcaattgtagagtttcaaatactgtgttaaatactgtatcccagaaatttggaaaccagaaatctgctatatggattttgagatctgtcctttactgcctggcattctctgaggatctctgaaattgttacttaaaaatgtaatttaaattgttcatttattgttttttttttcttagaaatatactgcttttatatatgattgttttgctggtcctaaacatttcaaggatgtaagtctttgttttaatataactttatttgttttccaagtagatgataatattcaaaagcaataatgtatatgatatctataaaggaagcaaaattaagtcatacactgattccactgtaaacaatctgtccagaattccagacaccttcagcaaactttttctgtaaaggcctgatagcaaatatttttgtggtgggttgaatttggcttatgggttatagtttgctgacacctagtttagagggtgtgtaaaactatcttcataactttgagatttttataaaattttacatgaaaatatactgataaattatatgcacatattttctaccagtagcattatagtggcatcatagaagaatatttaccaatgatggggaaactgtaaaactacagtatcaaggcatacaacttaaattccacttggaagattgtaaagtgtcaaagtattttaatgataatttaatttgggcttttgaaatgttcttctacaaatgaaaaagatgtttaaaaacgttacaagggaagctatgccttctgaagtctatccttagttgaaacagaaaataaacacaaaggtacaagatccttaaattattttgaaccacagaggttgaaattgttttgtgatcttcagcagaaataaaatctgtacatgattttctttt

SEQ ID NO: 15650 - DNA, 1686 bp, Homo sapiens
ataactatgacaaagcttacatgagaattagaagaccactttacatttttacattccttctgctgttcatattaaccttgcacaattacttcattttttctttgactcttttaccacaatgttttggttatttataatttatcagccatatgtttatcagccatataaccaactagatcccaaatagatccatgtatttgtttccgtgatttggccacattaataaattcataaatttcaatcaaatatcttatatatacacacatatggtttaagctacagccctgtgtatgccgtttaactttatttgacgttgcccacttacttctttgctgaccacttggataaccgtaataaaaatcctataagcctaaatggcatttcttttgggatatttttcctgcattttattccctttttatataagtaggaattaattatttattttatgtcttaatctatttgataaagaagactacattataataatctcaaagatcatattaccaaaggttgcccacttgagcatattttcattttgacacagaaacaaaatttagtacaacctttcctagttcccatgtcttgattttcatcattacatgcacagcagacctttacctattgtgataccagaacacatcattgtctttggttcccgtcaaagagaattttattgttgttttgtattttcaagtccttaatagttcttgaaactcctagttgttttcttgttgaaagcagacacacatttagtgcacggcttattttacctttcgggtgaaagatcagatgtttttatacccttcacttgatcaatatatttggaaagaatgtttatcaaaagtctatgtcactgcttctacggaagaatgaaattaatgcttaggtgatggtacctccacctacatctttttgagtgcattcaattatgtattttggtttagcttctgatttaacatttaattgattcagtttaaacatgttacttaattagcaaatgtagaggaaccaaaaaaaggtgaaaataatatgttttgattcaaacctaaagacataaaaacataaagacattttaactttgggttctctttagctgggatctggccagaaggaggcttaaagttagaaattgctattattttagaataggttgggtgggttggggggcaagggtgtctatttgcagcagagatattttgaaaagaagaaaattgttttatataaaaaggaaagccatgaccacctttctacctcagatccatcttcatccattgcattggaaactgctttatgctgctgcagtctgcaaagtctagagcttttatcaggccatgtcatacccaagaaagcacctatttaaagaaaaaacaattccctgagctctcaactccaagttgtagatttggtgtcttccttgttcttactttaaaaagtcatgtgttaattttttttctgcctgtatttgtatgcaaaatgtcctctatctgctattaaagaaaagctacgtaaaacactacattgtaaccttctaagtaataataaataaaaagaaatatattgcagtaacaatgggaagtaagtatgtagttcttttgaaatatgtggtaaagaaataatcacagactatcatctaatctggttacatattgtatttttcatcctgaataaaagtaattttaacac

SEQ ID NO: 15651 - DNA, 2719 bp, Homo sapiens
  CDS (293)..(1192)
agtcctcttgtgtagcctgaggcggcggtagcatggagggggagagtacgtcggcggtgctctcgggctttgtgctcggcgcactcgctttccagcacctcaacacggactcggacacggaaggttttcttcttggggaagtaaaaggtgaagccaagaacagcattactgattcccaaatggatgatgttgaagttgtttatacaattgacattcagaaatatattccatgctatcagctttttagaatgtggtaggttggtacaaattccgtcgtcattcagatcagatcatgacgtttagagagaggctgcttcacaaaaacttgcaggagcatttttcaaaccaagaccttgtttttctgctattaacaccaagtataataacagaaagctgctctactcatcgactggaacattccttatataaacctcaaaaaggactttttcacagggtacctttagtggttgccaatctgggcatgtctgaacaactgggttataaaactgtatcaggttcctgtatgtccactggttttagccgagcagtacaaacacacagctctaaattttttgaagaagatggatccttaaaggaggtacataagataaatgaaatgtatgcttcattacaagaggaattaaagagtatatgcaaaaaagtggaagacagtgaacaagcagtagataaactagtaaaggatgtaaacagattaaaacgagaaattgagaaaaggagaggagcacagattcaggcagcaagagagaagaacatccaaaaagaccctcaggagaacatttttctttgtcaggcattacggaccttttttccaaattctgaatttcttcattcatgtgttatgtctttaaaaaatagacatgtttctaaaagtagctgtaactacaaccaccatctcgatgtagtagacaatctgaccttaatggtagaacacactgacattcctgaagctagtccagctagtacaccacaaatcattaagcataaagccttagacttagatgacagatggcaattcaagagatctcggttgttagatacacaagacaaacgatctaaagcagatactggtagtagtaaccaagataaagcatccaaaatgagcagcccagaaacagatgaagaaattgaaaagatgaagggttttggtgaatattcacggtctcctacattttgatccttttaaccttacaaggagatttttttatttggctgatgggtaaagccaaacatttctattgtttttactatgttgagctacttgcagtaagttcatttgtttttactatgttcacctgtttgcagtaatacacagataactcttagtgcatttacttcacaaagtactttttcaaacatcagatgcttttatttccaaacctttttttcacctttcactaagttgttgaggggaaggcttacacagacacattctttagaattggaaaagtgagaccaggcacagtggctcacacctgtaatcccagcacttagggaagacaagtcaggaggattgattgaagctaggagttagagaccagcctgggcaacgtattgagaccatgtctattaaaaaataaaatggaaaagcaagaatagccttattttcaaaatatggaaagaaatttatatgaaaatttatctgagtcattaaaattctccttaagtgatacttttttagaagtacattatggctagagttgccagataaaatgctggatatcatgcaataaatttgcaaaacatcatctaaaatttaaatttgtcctacatttgtacttgctaaatctggcagccttaattattacacaactataacacaacacaaacagtaatctctcccctagtttagagtcctttgcatgaaatttagcaaatctatcattttgaatacagtacaagcctggtaatccagtgtatttgggataggccagtggaactcagaactgatacatatatacatgtatgtctatcatattcaatgtctattaggtgtaaatcatctcttcatgtaaaagacactactggtttgagggtagactcgtctaggaatattttgtccttctgtgacagcaccactatccatcccaatgtaacatttctacaaagggaagatatcttaaccaggcatacttatatttgctagttggaaaatcattctgaacagttttaattccattctattgaatggattattgtatgagctatttggggatcagatataaatgacaatcacacagaaccacttttattcaacatagataaaatgtgatgagtgttaacattttaaataagcaatctgcttaatggacattggtatgaaggggaagtgtcattctttacctcactcctcaaacacttttctatccaaaggttggtttgagtcagtattggcatcatacaaccacttactgtaaaataagtttattagtggtaacgtgatagaatttattcccgatatctgatgttacaaactttagggtccttgagatatgcaggatccttgtatgtaactggcataaaccctgtaaagagataattaaagttcttgacaaaacataatgagcaaaatttcagctagctcaattcagttgttgaggtattctttcttacccattatttgagctctcttaattgcttttgtgatttctttctgtttcttcccacaaagacctgtaaaataaaaagctttcttattcat

SEQ ID NO: 15652 - protein, 300 aa, Homo sapiens
MTFRERLLHKNLQEHFSNQDLVFLLLTPSIITESCSTHRLEHSLYKPQKGLFHRVPLVVANLGMSEQLGYKTVSGSCMSTGFSRAVQTHSSKFFEEDGSLKEVHKINEMYASLQEELKSICKKVEDSEQAVDKLVKDVNRLKREIEKRRGAQIQAAREKNIQKDPQENIFLCQALRTFFPNSEFLHSCVMSLKNRHVSKSSCNYNHHLDVVDNLTLMVEHTDIPEASPASTPQIIKHKALDLDDRWQFKRSRLLDTQDKRSKADTGSSNQDKASKMSSPETDEEIEKMKGFGEYSRSPTF

SEQ ID NO: 15653 - DNA, 2248 bp, Homo sapiens
  CDS (6)..(1916)
tccacatgcccatcacagtaatctggggcgtgtccccagaagacaatggcaacccactaaatcccaagagtaaagggaagttgacattagatagcagttttaacatcgccagcccagcttcccaggcctggattttgcacttctgtcaaaaactgagaaaccaaacattcttttaccagactgatgaacaggacttcaccagctgcttcattgagacattcaaacagtggatggaaaaccaggactgtgatgagcctgccctgtacccatgctgcagccactggagcttcccctacaagcaagagatttttgaactgtgcatcaagagagctatcatggagctggaaaggagtacagggtaccatttggatagcaaaaccccagggccgaggtttgatatcaatgatactatcagggcagtggtgttagagttccagagtacctacctcttcacactggcttatgaaaagatgcatcagttttataaagaggtggactcgtggatatccagtgagctgagttcggcccctgaaggcctcagcaatggttggtttgtcagcaatctggagttctatgacctccaggatagcctctccgatggcaccctcattgccatggggctgtcagttgctgttgcatttagcgtgatgctgctgacaacttggaacatcatcataagcctttatgccatcatttcaattgctggaacgatatttgtcactgttggttctcttgtcctgctgggctgggagctcaatgtgttggaatctgtcaccatttcggttgccgtcggcttgtctgtagactttgccgtccattatggggttgcctaccgcttggctccagatcccgaccgagaaggcaaagtgatcttctctctgagtcgcgtgggctctgcgatggccatggctgccctgaccaccttcgtggcaggggccatgatgatgccctccacagttctagcttacacccagctgggcaccttcatgatgctcatcatgtgtatcagttgggctttcgccaccttctttttccagtgcatgtgccggtgccttggaccacagggtacctgtggtcagattcctttacctaaaaaactacagtgcagtgccttttcccatgccttgtctacaagtcccagtgacaagggacaaagcaaaacacataccataaatgcttatcatttagatcccaggggcccaaaatctgaactggagcatgagttttatgaattagaacctctggcttcccacagctgcactgcccctgagaagaccacttatgaagagacccacatctgctctgaatttttcaacagccaagcaaagaatttagggatgcctgtgcatgcagcttacaacagtgaactcagcaaaagcactgaaagtgacgctggctctgccttgttacagccccctcttgaacagcataccgtgtgtcacttcttctctctgaatcagagatgtagctgccccgatgcctacaaacacttgaactatggcccacactcttgccagcagatgggggactgcttgtgccaccagtgctctcctaccactagcagctttgtccagatccaaaacggcgtggcacctctgaaggccacacaccaagctgtcgagggctttgtgcaccccatcacgcacatccaccactgtccctgcctgcagggcagagtaaagccagccggaatgcagaattctctgcctaggaattttttcctccacccagtgcagcacattcaggcccaagaaaaaattggcaagaccaatgtacacagtcttcaggggagcatagaagagcatcttccaaagatggcagagccatcgtcatttgtctgcagaagcactggatcgttactcaaaacgtgttgcgaccccgagaataaaaaagggaactctgtaaaaatagagacgtgagcaatctggagagcagtggagggactgaaaacaaggcaggagggaaagtggagctgagcttgtcacagacggatgcaagtgtgaactcagaacatttcaatcagaatgaaccaaaagtcctatttaatcatttaatgggggaggctggttgtaggtcttgcccaaataattcacaaagttgtggcagaattgtgagagtgaagtgcaattctgtggactgtcaaatgccaaacatggaagccaatgtgcctgctgtattaacacactcggaactttctggtgaaagtttgttaataaaaacactataataaatgcagcattcaattcag

SEQ ID NO: 15654 - protein, 637 aa, Homo sapiens [sequence omitted]

SEQ ID NO: 15655 - DNA, 2148 bp, Homo sapiens
gtaaaaatgacttggattgaaaatatgtggtagcctttttatttctacattaagttctacctaggatatttccaaggactgccacaaaacccatatgtgcagtactttactactttgggaaagctgcatctttctaccacattttaacatctaatatatttaatttctttgaagagggttctgtgtacgttattgtagttcccagtttaatatagttctttgtatctcttaacaggttgaagttattgcaaaacactctggaaagtaataattacatcataatcatttattttttaaacttaaaagcctagaaatttcctagaaagaaaataggagacatctcagagcaatttggttttggtgtatatgttctcaacagaaaaccagtgttaatgaatatcatgcctcagcactgtcacttttaaaacctgtcaggatcccaccgtaaaattggaaatgggcagttctgaattttcacgtttgaaatgtaaaatataaacttcagtcaatatccaggtttattgtgtcctactatttaataatgagagaagtaatggcaaggcctttactttcaggaaaggatagaagtatagattaatgactggaaagttttaatatatttagcccaaaggttactttgaattgaagtctttgcattgactgtttgtgtttggtttatttgtttagctttacaaggtacacataagttaggttgaggggttgttaacccttccgtggtctgctttcattccgtgtgcttcctgtcacaggtaatggaaaacataagtagaataggtgacctcttagttttgaacttatttaagtgtggggatgaatttttcatcagaagtgcttacagggttactacctcagtttacaatctacctggtcattattttatttctatccagttctaagaactgcctccactgtttatatattcataattaaacacattgagaatgcaacactataaaagctggtcaaatttttgcagagcccttattctgtgtgttttttgtttttttcttttttttttgagacagagtctcgttcggtcccccagcttggagtgcagtggcgcgatctcggctcactgcaacctccgcctcctgggttcacgcgattctcctgcctcagcctcccgagtagctgggattacaggcacacaccaccacgcccggctaattttttgtgtctttttagtagagacggggtttcgctatgttggccagactggtcttgaactgctgacctcgtgatccgcccgcctcggcctctcaaagtgctgggattctgtgtgttttgtgcacctccactttaggtaatcatagggagcacatttacaggatggtctaataacatgaaaacaggctagtttcaagcaacagcaatgtcggttggaaagcaggcgtcatttgccttgaaaaaagccttttgacaacatacaggcattcttttaaaaccaggctgaaacattttatttccgagacttaacgttgtgtttcctgtttcttaaacctagcacctctgtgtatttgaaaataatgagacatctttcattggattttggaaaattgttccccatgggattctaacctcactaccaaatgagtgaaagcttgattaagagttcttccatatactagcctccttggaagaagtgatcagaaggtgataagaaggacagaaaggactattttaaagttggactgaaggagaaaaaagcaaaattcttgtttcatcccaattctagttagaacaaagttaaacccccgtaatcttaaagagaaaatctttggaggttttaattaaacattttatacatttaaagtcttgttaatggtgctttaagtgtcaatgtagcatgtaaaaggctttgtacagacaggtaaaagttccatttctgagtgatgaaatgtaacacttcttcatctttaacttgaaatcaaaactatcagattttatttttgtataatttaaggaaggtaaagttaggggactagaagactctaaattggcttctacagatcaataatttaaatgtaactagttgggattttatagttaaaattatatttgtgtatataacataattaatctgtaaattgtaataaatatatttgcaattattaaatgttaagtgat

SEQ ID NO: 15656 - DNA, 1977 bp, Homo sapiens
  CDS (193)..(1968)
attttgctgtggagcggcggggaggaggagccgccgaggagaccccgggcgaggagctgcgagccggaggaggccgcgcggactccgggctttccgccgtcgcggggatctcggggggcaaagggatcgccggggagggggaccagagagccgcgcccgccgcgcggagcgccccttcgcgtcccctgcaccatgagctggggcaccgagctctgggatcagtttgacaacttagaaaaacacacacagtggggaattgatattcttgagaaatatatcaagtttgtgaaagaaaggacagagattgaactcagctatgcaaagcaactcaggaatctttcaaagaagtaccaacctaaaaagaactcgaaggaggaagaagaatacaagtatacgtcatgtaaagctttcatttccaacctgaacgaaatgaatgattacgcagggcagcatgaagttatctccgagaacatggcatcacagatcattgtggacttggcacgctatgttcaggaactgaaacaggagaggaaatcaaactttcacgatggccgtaaagcacagcagcacatcgagacttgctggaagcagcttgaatctagtaaaaggcgatttgaacgcgattgcaaagaggcggacagggcgcagcagtactttgagaaaatggacgctgacatcaatgtcacaaaagcggatgttgaaaaggcccgacaacaagctcaaatacgtcaccaaatggcagaggacagcaaagcagattactcatccattctccagaaattcaaccatgagcagcatgaatattaccatactcacatccccaacatcttccagaaaatacaagagatggaggaaaggaggattgtgagaatgggagagtccatgaagacatatgcagaggttgatcggcaggtgatcccaatcattgggaagtgcctggatggaatagtaaaagcagccgaatcaattgatcagaaaaatgattcacagctggtaatagaagcttataaatcagggtttgagcctcctggagacattgaatttgaggattacactcagccaatgaagcgcactgtgtcagataacagcctttcaaattccagaggagaaggcaaaccagacctcaaatttggtggcaaatccaaaggaaagttatggccgttcatcaaaaaaaataagtctcccaagcagcaaaaggaacccctctcccaccgcttcaacgagttcatgacctccaaacccaaaatccactgcttcaggagcctaaagcgtgggctttctctcaagctgggtgcaacaccggaggatttcagcaacctcccacctgaacaaagaaggaaaaagctgcagcagaaagtcgatgagttaaataaagaaattcagaaggagatggatcaaagagatgccataacaaaaatgaaagatgtctacctaaagaatcctcagatgggagacccagccagtttggatcacaaattagcagaagtcagccaaaatatagagaaactgcgagtagagacccagaaatttgaggcctggctggctgaggttgaaggccggctcccagcacgcaacgagcaggcgcgccggcagagcggactgtacgacagccagaacccacccacagtcaacaactgcgcccaggaccgtgagagcccagatggcagttacacagaggagcagagtcaggagagtgagatgaaggtgctggccacggattttgacgacgagtttgatgatgaggagcccctccctgccatagggacgtgcaaagctctctacacatttgaaggtcagaatgaaggaacgatttccgtagttgaaggagaaacattgtatgtcatagaggaagacaaaggcgatggctggacccgcattcggagaaatgaagatgaagagggttatgtccccacttcatatgtcgaagtctgtttggacaaaaatgccaaaggtgctaagacttatatttaataccat

SEQ ID NO: 15657 - protein, 592 aa, Homo sapiens [sequence omitted]

SEQ ID NO: 15658 - DNA, 2131 bp, Homo sapiens
  CDS (347)..(2131)
acttatgggcggagatggatggtggatggggggcgggggaggcagcggagggagatgaggagataggcgggagcgagggagcgagggagggagcgaaggaggtagagaagagtggaggcgccaggggagggagcgtagcttggttgctccgtagtacggcggctcgcgaggaagaatcccgagcgggctccgggacggacagagaggcgggcggggatggtgtgcggggctgcggctcctgcgtccctcccagcggcgcgtgagcggcactgatttgtccctggggcggcagcgcggacccgcccggagatgaggcgtcgattagcaaggtaaaagtaacagaaccatggctcagtttccaacaccttttggtggcagcctggatatctgggccataactgtagaggaaagagcgaagcatgatcagcagttccatagtttaaagccaatatctggattcattactggtgatcaagctagaaactttttttttcaatctgggttacctcaacctgttttagcacagatatgggcactagctgacatgaataatgatggaagaatggatcaagtggagttttccatagctatgaaacttatcaaactgaagctacaaggatatcagctaccctctgcacttccccctgtcatgaaacagcaaccagttgctatttctagcgcaccagcatttgcagctgtgccccccctggctaacggggctccccctgttatacaacctctgcctgcatttgctcatcctgcagccacattgccaaagagttcttcctttagtagatctggtccagggtcacaactaaacactaaattacaaaaggcacagtcatttgatgtggccagtgtcccaccagtggcagagtgggctgttcctcagtcatcaagactgaaatacaggcaattattcaatagtcatgacaaaactatgagtggacacttaacaggtccccaagcaagaactattcttatgcagtcaagtttaccacaggctcagctggcttcaatatggaatctttctgacattgatcaagatggaaaacttacagcagaggaatttatcctggcaatgcacctcattgatgtagctatgtctggccaaccactgccacctgtcctgcctccagaatacattccaccttcttttagaagagttcgatctggcagtggtatatctgtcataagctcaacatctgtagatcagaggctaccagaggaaccagttttagaagatgaacaacaacaattagaaaagaaattacctgtaacgtttgaagataagaagcgggagaactttgaacgtggcaacctggaactggagaaacgaaggcaagctctcctggaacagcagcgcaaggagcaggagcgcctggcccagctggagcgggcggagcaggagaggaaggagcgtgagcgccaggagcaagagcgcaaaagacaactggaactggagaagcaactggaaaagcagcgggagctagaacagcagagagaggaggagaggaggaaagaaattgagaggcgagaggctgcaaaacgggaacttgaaaggcaacgacaacttgagtgggaacggaatcgaaggcaagaactactaaatcaaagaaacaaagaacaagaggacatagttgtactgaaagcaaagaaaaagactttggaatttgaattagaagctctaaatgataaaaagcatcaactagaagggaaacttcaagatatcagatgtcgattgaccacccaaaggcaagaaattgagagcacaaacaaatctagagagttgagaattgccgaaatcacccatctacagcaacaattacaggaatctcagcaaatgcttggaagacttattccagaaaaacagatactcaatgaccaattaaaacaagttcagcagaacagtttgcacagagattcacttgttacacttaaaagagccttagaagcaaaagaactagctcggcagcacctacgagaccaactggatgaagtggagaaagaaactagatcaaaactacaggagattgatattttcaataatcagctgaaggaactaagagaaatacacaataagcaacaactccagaagcaaaagtccatggaggctgaacgactgaaacag

SEQ ID NO: 15659 - protein, 595 aa, Homo sapiens
MAQFPTPFGGSLDIWAITVEERAKHDQQFHSLKPISGFITGDQARNFFFQSGLPQPVLAQIWALADMNNDGRMDQVEFSIAMKLIKLKLQGYQLPSALPPVMKQQPVAISSAPAFAAVPPLANGAPPVIQPLPAFAHPAATLPKSSSFSRSGPGSQLNTKLQKAQSFDVASVPPVAEWAVPQSSRLKYRQLFNSHDKTMSGHLTGPQARTILMQSSLPQAQLASIWNLSDIDQDGKLTAEEFILAMHLIDVAMSGQPLPPVLPPEYIPPSFRRVRSGSGISVISSTSVDQRLPEEPVLEDEQQQLEKKLPVTFEDKKRENFERGNLELEKRRQALLEQQRKEQERLAQLERAEQERKERERQEQERKRQLELEKQLEKQRELEQQREEERRKEIERREAAKRELERQRQLEWERNRRQELLNQRNKEQEDIVVLKAKKKTLEFELEALNDKKHQLEGKLQDIRCRLTTQRQEIESTNKSRELRIAEITHLQQQLQESQQMLGRLIPEKQILNDQLKQVQQNSLHRDSLVTLKRALEAKELARQHLRDQLDEVEKETRSKLQEIDIFNNQLKELREIHNKQQLQKQKSMEAERLKQ

SEQ ID NO: 15660 - DNA, 1519 bp, Homo sapiens
attccagagccagcagcgcgtcctggccgctcctgcgctctcccgcctcccggggctcggaggagccggggcacgttccaggagctgcctagggctgaggttccaggcctgggggtcgcttccagctgccagatcccgtgcagtcctggggaccctgagaagcaccgagccatccctgacccaggaactttccgcagactcgccgccatctgggagtgaagcaacatggatgcagtcagccaagtccccatggaagtcgtgcttcccaagcacatcctggatatctgggttattgtcctcatcatcctggccaccattgtcatcatgacctcgttgttgctgtgcccagccactgcagtaatcatctatcgcatgcggactcatccgatccttagtggggctgtttgagagcctcccaagagggccgggtgagggatgaggacaggcatcctatccccagcctcttcctgtcttcagaaaagcagcaggagggactttggggcatggacctgagttctggttttgattctgccacgagccagctgtgtgaatttggtcaagggacctaactctctgagttccaggttccttatctttcaaatggggatggtgatccctgccctttctacctcatagggatgtgagaaccacctgacttagtggatgtgaaagctgtttgtgatcagtaaagctaccacagatataagggtgttatgctgaatcctgagaagctttcaagaaccagagaacctgattgctgatgatggccttaaaggtggtgagggagatactgggggcagagcagactttgccagtgcccctcaggtcaaaccaagccaagagcaccctgtccccattccaaggggccagcagcactttggcccaaagtattttctttaaggtgccattccttcatgttttctcagtttggagggtgatgggtagagctttccagaaccttctccattccagaatctctgcccctgtgtaatctgaaggaaggctgtgccatctttgggcactgccaagggagttggggtgatgggcttctttctgcactggagtctcacatctgttagctttgacactcaagcaatgttggaaaatgcagggtgactgagttccctgcccagctttcgggatctctggcccccatccccttgtgtgtgtccctctgcccagctcctgctgtaattagctccacgtgtacccccttcactccctcccaccagctctgcagccagcctatggcaattatattttaagaggtgttcccaggacttttgggacctactaaaacaatgatggttattttagatgtgatgatttatatttatgtagagatatttctggaccactcaagctcttcgataccaaaatcaggagcatcttgggatttattaaattatgtaagaagatagcacagatatcgggatattattgtgtgaaaatgctgcttttactttgatgtgatctcattgatgtacacaaccaagttccaataaagtgctagaatgtg

SEQ ID NO: 15661 - DNA, 2092 bp, Homo sapiens
  CDS (235)..(981)
aatcgtccgccgctcccgttaccggggcaaccgcggcgcctcctccgtgtcggccccgatcgtccctccgcgccattttcaaactgctctagcgccggagcccgtgcctggacggaaggagctagtgggggactcgaggcctgagggcaatgcggctggaggcggaggcaacggcggctggagctgccggactttaatttttggaagtgaataaaacttgttttagaagacgagatgactacagctgtagagagaaagtatattaatattaggaaaaggctggatcagctgggataccgccagactctgacagtggagtgtttacctttggtagaaaaacttttcagcgacttagttcatacaactgagagccttcggcaatcaaaattatctgctgtgaaagctgaaaaagaaagtgccaattttgattttgttttggaaccctataaacttgaaaatgcaagattgagtagagaaaataatgaattatacctagagttaatgaaactgagagaacattcagaccaacacgttaaagagttgaaaacttcattgaagaaatgtgcacgtgaaacagctgatctgaaatttctgaataaccaatatgctcataaactcaaactgttggagaaagagagcaaagctaagaatgaaagaattcaacaacttcaagaaaagaatttgcatgctgtagtacaaactccaggtggcaagaaaagaagtattgctttcaggcgccagcgtatgcaaattgatgaaccggttcctccctctgaagtcagttcatatccagttcctcaaccagatgacccttacattgcagacctccttcaagtggctgataacaggattcaagaacttcaacaggaagtccaccagctacaagaaaagttagcaatgatggaaagtggggtgagagactatagcaagcaggtaggatttttatttacttgcatagtagggattgagataggtatgctgtgattgtaaatagaattgggttatatttgaaattgctgatactgagtttttatacagctttcctctttttcatcaggtttgttaatagagttaatagctggaatggcttaggtggctttacttacttagcctgtctcttcaaaaaatttaaaaattagccaagtgtggtggcatgtgcctatggtcccaggtacttgggaggctgaggtgggaggattaatggattgaagagcacttatttactcgattctcttcactattcattgaggtgaatagtagttttttgtttggtttttcttttagctgaatcatctatctccccaaatataattttataaccatattaccgttttcatctcaggagacattttattaagtgtgctatgttttataattgtatttttgtgatttttctactcttattatatattttgtcatattgaacaccagtctcttagaaagttactcttttgtgttgctaatttttttgtttgttttctctataagcacaagtcctcatacaacagttttctgaagaatcaggagaattagtagatgcagagttatattataaccatagcaagctttgtcttttcataatttctattgatgtcttggctaaattttgatttgggtaattataggcttgttttcttaatatgcttcttgaaggttaaattgggtaacatgtttttcattttctgcattgactgcattttttttgagtgatctgcacacacaaatatagatgtaacttaggtgttggtataactaaatctttaaagtgttttgaagattagttggataaaaatggagttaaagaaaattgaccaggcgtggtggctcatgcctgtaatcgcagcactttgggaggccgaggcgggtggatcacttgagatcagaagtttgagaccatcctggccaacatggtgaaacctcatctctactaaaaatacaaaaaattagccgggcgtagtggcgggcgcctgtagtcccagctacttgggaggctgaggcaggagaatggcgtgaacccgggaggcggagcttgcagtgagccgagatcccgccactgcactccagcctgggcgacagagcgagactccgtctc

SEQ ID NO: 15662 - protein, 249 aa, Homo sapiens
MTTAVERKYINIRKRLDQLGYRQTLTVECLPLVEKLFSDLVHTTESLRQSKLSAVKAEKESANFDFVLEPYKLENARLSRENNELYLELMKLREHSDQHVKELKTSLKKCARETADLKFLNNQYAHKLKLLEKESKAKNERIQQLQEKNLHAVVQTPGGKKRSIAFRRQRMQIDEPVPPSEVSSYPVPQPDDPYIADLLQVADNRIQELQQEVHQLQEKLAMMESGVRDYSKQVGFLFTCIVGIEIGML

SEQ ID NO: 15663 - DNA, 1748 bp, Homo sapiens
  CDS (374)..(1237)
aaaaacaactacggctgcggtgtggttggtggtgagatgacggccttagtgctggataatggagcttacaacgccaaaatcggttacagccatgaaaatgtgtcggttattcctaattgtcagttccggtcaaaaacagcacgtcttaaaacttttactgccaaccagatagatgaaataaaagacccttctggactcttttacatcctcccttttcaaaagggctacttggtgaattgggatgttcagagacaagtttgggattacctttttggaaaagaaatgtatcaggtaacaaattagagttgattttttagatactaatattattatcactgaaccatactttaacttcacttcaattcaagaatcaatgaatgaaattctatttgaagaataccagtttcaagcagtattaagagtaaatgctggggctctcagtgcacataggtatttccgagataatccttccgaattatgctgtatcattgttgatagtggatattcctttacacatatagttccttattgtagaagtaaaaagaaaaaagaagcaattattcggataaatgtgggaggaaaactcttaaccaatcatctaaaggagatcatatcttacaggcagctacatgttatggatgaaacacatgtgattaatcaagtgaaagaagatgtatgctatgtgtctcaggatttttatagagacatggatattgcaaagttgaaaggagaagaaaatacagtaatgatagactatgtcttgcctgacttcagtacaattaaaaagggcttttgtaagccaagggaagagatggtgttgagtggaaaatacaaatctggggaacaaattcttcgtttggccaatgagagatttgctgttccggaaatactctttaatccttctgatataggcattcaagaaatgggaattccagaagctattgtctattcaattcaaaatctacctgaagaaatgcagccgcatttttttaagaacattgtcttgacaggaggaaattcccttttcccaggatttagggatcgggtttactcagaagttcgatgtcttactccaacagattatgatgtttctgttgtgctgcctgaaaaccctattacttatgcctgggaaggtggaaaattgatatcagagaatgatgattttgaagatatggtggtaacaagagaagattacgaagaaaatggacatagcgtctgtgaagagaaatttgatatttaagcaacatttttgaatgaaagttgtgaccataaggtttaatttcaaagttccttttaaaagaggttaaggaactgtgttaccttttgtcctaagaaaaaggcttgaatttatgtaaatactttgatcgattgctaattttcaaaggcttcttaggtaggttactacagtaaactgtaactcagtccacattttcatttaggagctagactaccataacaatgcttatgctgtttccaagggtaggttatttttcattaaaagaagaatgaatgcattttaagtttaattcttcatagctgaaagcacaaatttaacggcttcactggacagttttccttagaaggtagttttgtgtgactgtgactaaactattttattttaaaatgtcattcttatttatacattctaaagttggaaagactgatcttatatgtgtataatgtttattttgtacctagagtacatttaaaagggtggagactaagctaataaagtttttttggccact

SEQ ID NO: 15664 - protein, 288 aa, Homo sapiens
MNEILFEEYQFQAVLRVNAGALSAHRYFRDNPSELCCIIVDSGYSFTHIVPYCRSKKKKEAIIRINVGGKLLTNHLKEIISYRQLHVMDETHVINQVKEDVCYVSQDFYRDMDIAKLKGEENTVMIDYVLPDFSTIKKGFCKPREEMVLSGKYKSGEQILRLANERFAVPEILFNPSDIGIQEMGIPEAIVYSIQNLPEEMQPHFFKNIVLTGGNSLFPGFRDRVYSEVRCLTPTDYDVSVVLPENPITYAWEGGKLISENDDFEDMVVTREDYEENGHSVCEEKFDI

SEQ ID NO: 15665 - DNA, 1730 bp, Homo sapiens
  CDS (251)..(553)
tttcagcactaaagaagaatttaaatacaaaatagaatgttatatatcttgtagacagtcaaatatttgatgttttatgggacataatcatttgggaagtttttgttgtaaatgaagagttagtttgttgctattaatttgtttgacacataagttcattcctaaaagttagggatgttacataaagaagggttgaggactttatttcagaagtcatttaattttttctttattttctttcagattttgtatggtttattcagaagtgccaaatttcagtgaacccaacccagattatcgaggacagcagaacaaaggggcacagagtgaacagaagaataattccatgaatagtaatatgggtacaggtacatttggaccagtgggaaatggtgttcacactggccctgaatcaagggaacaccagttttcacatgctggcagaagcaatggccggggacttataaatccacaactacaaggaacagctagtaatcaaacagtgatgaccacaataagtaatggcagggaccctcggagagcctttaaaagatgacctatgctaaatactcatgtgtagtttttatactacatgccctacttgaacacttattgcacttttatttattgttaactgtgaaaagtacgtcctttattgggtttccttttatattcttggtttgttaagaagaatggtttgtttttatagcaaaactgttaagctgctcgagtctcctgttgaagaatgggaacactgaaaagtaggggcatttatttttagagtaaaaagattattggatagcctttaaaaaacctgcacccatttcatgggtgagttacttaagacatcagctttatagcctctatgagtctatcttctgtataagttttgtaatatttaacataaggcttaatgggagatgttcttttgtcttgtattcagatattgccaactaaagcaataaccatcaaaaaacacaagaacttgtcaatgctagcagtaatttttgagtgtttgtggctctcggaatgattgacttcgttcagtgactactattaagattttccaaggactgactcatcccaaatttttgttgtattaccaaaaaaacagattccttatcagaatttggaatagaatgtgatctctattgcaacaagtaattttaaaagaaagctacatttattttagagtagtgctcctaacatgtattatcaactttgtggattacattggaggaaaatttaaaactggggccttgaatatttattttttgaaactaccatgttaaatactgaagtataatttgggggagttataaagttatgataaacattcatctgattattttaaacaatagttgtggtagataaacatactggaggtgagtcaaattgaattcatatagtaacatgcagtctgaagtcctagttacttaataggtactcagcctggagtgaaaatcctgggtactgactttgagaggagtgagtgtgcatgttgtcaaagtttctgaacacagttcacatagccttattagcaaaagttttaagaaatggctctatcaaagaagcaattgcagctttattcagaaatataaaagtggaatttatgtacatgtcataagtggtacccacttcccctttttactgtagggtggataactcttaggatttaactctttgaatattatctcttgaataaagcatgtgttaatgttaacaaacct

SEQ ID NO: 15666 - protein, 101 aa, Homo sapiens [sequence omitted]

SEQ ID NO: 15667 - DNA, 2338 bp, Homo sapiens
  CDS (422)..(2338)
ttacaaatttcacttgataatttacatggaaatatgaaagggttctttctccaagtgtcttgcaattgacttggaatcagcgagttaaacaaaagggactgagcctctaactctgggaatttcaaggctccagttacagcaaatgacatgctgtcccctccacctatgtctatgcaggtctgccttgggaaccacctcacacatcagtgccttcgctgtccatctgtgtatgttattcaaattcacataagttaagataaagatccaggatgataaaaaccaatcctgataggtgggattagagaattacttctttctgtagttaataacacaaagcaatcctgttcaggttctttggataagcctccctactttccttcttctgttcttgttctcccttagcccaaagcagcaagccaagatggcggagtactgccgactgatctttggggatgcccttctcatggagcccctggaaaaatatccactggaatctggagttcctcttccaagccctatggatttaatgtataaaattttggtgaaaaataagaagaaatcacacaagtcatcagaaggaagcggcaaaaagaagctctcagaacaagcctccaacacctacagtgactcctccagcatgttcgagccctcatccccaggagccggagaagctgatacggaaagtgacgacgacgatgatgatgatgactgtaaaaaatcttcaatggatgaggggactgctggaagtgaggctatggccacagaagaaatgtctaatctggtgaactatattcagccagtcaagtttgagtcatttgaaatttcaaaaaaaagaaataaaagttttgaaatgtcttccttcgtggaaaccaaaggacttgaacaactcaccaagtctccagtggaatttgtagaatataacaaaatgcagcttagcaggatatatccaaaaggaacacgtgtggattcatccaactatatgcctcagctcttctggaatgcaggttgtcagatggtggcacttaatttccagacaatggacctggctatgcaaataaatatggggatgtatgaatacaacgggaagagtggctacagattgaagccagagttcatgaggaggcctgacaagcattttgatccatttactgaaggcatcgtagatgggatagtggcaaacactttgtctgttaagattatttcaggtcagtttctttctgataagaaagttgggacttacgtggaagtagatatgtttggtttgcctgtggatacaaggaggaaggcatttaagaccaaaacatcccaaggaaatgctgtgaatcctgtctgggaagaagaacctattgtgttcaaaaaggtggttcttcctactctggcctgtttgagaatagcagtttatgaagaaggaggtaaattcattggccaccgtatcttgccagtgcaagccattcggccaggctatcactatatctgtctaaggaatgaaaggaaccagcctctgacgctgcctgctgtctttgtctacatagaagtgaaagactatgtgccagacacatatgcagatgtcatcgaagctttatcaaacccaatccgatatgtgaacctgatggaacagagagctaagcaattggctgctttgacactggaagatgaagaagaagtaaagaaagaggctgatcctggagaaacaccatcagaggctccaagtgaagcgagaacgactccagcagaaaatggggtgaatcacactacaaccctgacacccaagccaccctcccaggctctccacagccagccagctccaggttctgtaaaggcacctgccaaaacagaagatcttattcagagtgtcttaacagaagtggaagcacagaccatcgaagaactaaagcaacagaaatcgtttgtgaaacttcaaaagaaacactacaaagaaatgaaagacctggttaagagacaccacaagaaaaccactgaccttatcaaagaacacactaccaagtataatgaaattcagaatgactacttgagaaggagagccgctttggaaaagtccgccaaaaaggacagtaagaaaaaatcggaacccagcagccctgatcatggttcatcaacgattgagcaagacctcgctgctctggatgctgaaatgacccaaaagttaatagacttgaaggacaaacaacagcagcagctgcttaatcttcggcaagaacagtattatagtgaaaaataccagaagcgagaacatattaaactgcttattcaaaagttgacggatgtcgcagaagagtgtcagaacaatcagttaaagaagctcaaagaaatctgtgag

SEQ ID NO: 15668 - protein, 639 aa, Homo sapiens
MAEYCRLIFGDALLMEPLEKYPLESGVPLPSPMDLMYKILVKNKKKSHKSSEGSGKKKLSEQASNTYSDSSSMFEPSSPGAGEADTESDDDDDDDDCKKSSMDEGTAGSEAMATEEMSNLVNYIQPVKFESFEISKKRNKSFEMSSFVETKGLEQLTKSPVEFVEYNKMQLSRIYPKGTRVDSSNYMPQLFWNAGCQMVALNFQTMDLAMQINMGMYEYNGKSGYRLKPEFMRRPDKHFDPFTEGIVDGIVANTLSVKIISGQFLSDKKVGTYVEVDMFGLPVDTRRKAFKTKTSQGNAVNPVWEEEPIVFKKVVLPTLACLRIAVYEEGGKFIGHRILPVQAIRPGYHYICLRNERNQPLTLPAVFVYIEVKDYVPDTYADVIEALSNPIRYVNLMEQRAKQLAALTLEDEEEVKKEADPGETPSEAPSEARTTPAENGVNHTTTLTPKPPSQALHSQPAPGSVKAPAKTEDLIQSVLTEVEAQTIEELKQQKSFVKLQKKHYKEMKDLVKRHHKKTTDLIKEHTTKYNEIQNDYLRRRAALEKSAKKDSKKKSEPSSPDHGSSTIEQDLAALDAEMTQKLIDLKDKQQQQLLNLRQEQYYSEKYQKREHIKLLIQKLTDVAEECQNNQLKKLKEICE

SEQ ID NO: 15669 - DNA, 1171 bp, Homo sapiens
ttggctatgaagaagacttgaggtggatagctctctatcttttaaggtgaaaatcatgcaattttgtttatatctcgagagaaagaggctgtgagtgttgctggagggctcgggaaggtctctggatgccagtgagaccccagccccagccggttttccaggttcttgacagcatcacaagaacgaattcaggggggagtcgagtcagaatgaagcgcaaggcgagaagcttccattgcaaagcgaaagtgtgctcttgagaggagcgtagccatgcccgtgagaacaagtcaggcacaacggaggctgggtttcttattttagggatgtttctttctctttctttctttctttctatttctttctttctttctttctttctttctttctttctttcttcctttctttctttctttctttcctttctttctttctttcttctttctttctttctttctgtcttttttttttgagacggagtctctctttcgcccaggctggagttcagtggcgcgatctcggctcactgcaagctccgcctcccgggttcacgccattctcctgcctcagcctcccgagtagcggggactacaggcgccggccaccacacccggctgatattttgtattttttagtagagacagggtttcaccgtgttagccaggatggtctcgatctcctgacctcctgatctgcctgcctcatcctcccaaagtgctgggattacaggtgtgagccaccgcgcccagcccggatgtttctttaataagggggtggaatgctcattaggtattctggaaaaggaggggatttcagggactcctccccgctcctgttattgcctcctttctcccttatttgggtttacctggaagagtcatggccttggtgggtgcaggaagcatagctgtgatgcaagaagcatggccttggtgagtgctggagtatgttctctaaagatactgtgaacactattagcccatactgaaccactgctcctggagaaatacagggttagcttccacgcctctgatcactacatttttgtcatccaaccaatacatatttttgttttatgtgtttttatctacagacaccttgtttaatatacgtttcttaccaatagttaactgtatgtattattctttataataaaactcaagctgggaag

SEQ ID NO: 15670 - DNA, 2234 bp, Homo sapiens
acacgtgaagatttgtttaaaagtaccattctaatacttcttcaaaagtggctcctcattgtacttcagcgtaaatatgagcactggaaacagtttcatggagtttaagttgagtgaacatcggccatgaaaatccatcacgaatacttttggatcaatagtctatttttaaaaagaaagaaaaaaaccacttttttatagtccctagctttgccatatgcccgccttaagtggaaggaaagttaatcacttaactatgttttataaaaagaaaaaagggcttggaatgctattactgttcacacaaagtatgattctgtttgaataaggcaaatgctcctttttttaaaaaaaaagacattactgtaatatcaaaaaccgtggcagtttgtatacaactcggggcttgattttttttaaaaaaacagaatgaattgatgtcttattttataaatgttctatatttattaggaggaaactttatattgccttttttatcaatcatgtaacaggcttatagctttccaacagagctgcttgccaaacaattttttttgtttattaaacagtgctgaaacaaacaggatcagcatttacttaagatgttaagaatgaggacttttaatcagccgaaccaagatattgttacctgtatgcattcccaaagtctagatgctcagtatgttcagtcatatctttcagaatcagtgaaccgattaccctttttttggtattcactctacatctgccaacctagttcaccttggttttgtgtctgctgtagaagggaaccataacttggttaaaccgtagggattatcattgtatacatgctgtgaacatgtatatgtgcaagttttaatgtattctatgttgtaggcttattatttaattttaccacttcatcacttttgtacagtggccaagcagacacctcaaactccagcatttacattaagtgcatttgtacattttaggccactggatccagattttatattggcagttattgagggcaaaagcaatatattgtaacagaatgtataaatatttttgataaaacagtctatattttattaaaaaatgaattataacactaaagctgtacctcaaaagtctcaaaaataatttgatgaaatattttatacaactcttcaaaggatccgtctgtggctttttatactcttttagggttgtctttttacaaaccatgactttccacttgcctgtagttttttgtttgttttggtttggtttgattttatatttttttctcctaatctatgactttattgttttttcttagtttagtaatagcatctttgatcctgtgcttagcatgttagggtcattatacctcaggaatagcaagctgttaagtaaccatactgaattaactatttaattacagtgagctcatctcttaaaaattgttcaggtgtaaatcttatgagaaacatgaaaaagcacactgatttatggagagttgagctaaaaacatttataaatatttgctgggatgttttagcatcttttcattgtactctgagaacaattaaaattgtccagagatcatttatattaccttccaaattgtttattacccaagatcctttgggagaaaatcttatagaatgggggaacaatatgtggtttaaagttattttaaaatgccagttaatttcctcggcaaaggacaatagaggaacttagcttaattgtctggctttaatttaaactgtgttaatacaacattaaaataaaacactaaatacttttgaggtacagtctgctcacttttttggttctcaaatagcaaagaaagtaatgtctaaaataggctcttagcattaaaaactgacagcattttgtaactacacagtgtacagaattttttttttaattgaagtcaatcactaaaaaaattagaaggcagggtctatttacacaattaagctgaagaaagcactaattttttgtagtttaaaatatatatatattttagtcagatttaaaattttaagctttatagagtgtaaatatattttgctattactgtatgtgtatgtgactgctcaagcactttgtaaagaaattaggatattttagaatggtacactatgcattcaaatgaaatgtgcctttcactatgtcattctaagaaaacaagtgttttttgcagtcataaattatcacaaatgcacaaattaaagtctatatagattgaaatttgt

SEQ ID NO: 15671 - DNA, 2040 bp, Homo sapiens
ttttattaacaaattggaccgaatgggctccaacccagccagggccctgcagcaaatgaggtctaaactaaatcataatgcagcgtttatgcagatacccatgggtttggagggtaattttaaaggtattatagatcttattgaggaacgagccatctattttgatggagactttgggtaagtgctaaaaatacattattaaaattttaaattttaaaaagcattaaaaagaaggaaaggataagttcatcaaacgcagagtaactatctttttgaaatgcgactgcaagaatactctgagatggttttgttttaatacctttaatcctaatcgctccccattttatttagtatttattctgtgagagactatgttactttttgggtaatatacccatatcacattatggcatgcatggtgtggtagaaggaggccttcagtttgggttagtaaatttgggttagtgaatgtattgtatctttttgcacttgttcatttattcattcattctgtggacttttatagagcagctgccaggtctggggtattgtgataaaaattaggaagaaaatagagatcataaatatttgctcttcctgctttataattacatggacagaaaagattaataaattaaaacagttaaaattgtacaaatgtggtttgggaaatgcaagaaataagttggtaactttttgatgtggtatttggtccatcagctcttgagtgacctttacctacaaagtactgtaattgcctggtagttatcaaaccttagcgttgttcgtaacaatcccctggagactttgttaaaagacatagtcctggctctacctccagagattctgatcagtagattggggtggggcccgtagtttgcatttctggaaggtttccagttgatgctgctcttacaggtctgcagaccacactttgagtgacactgatctagacaatgtgaggagtcataaatgatcctttgttctgaggagtgacctctgtagcctggtcgtttctccacaggcacttcctgagggatttccttcctctgctatggaattgggatcgcaggtctggcaggtgggcgaatggcattgtgatcagtgaactatagaatttatcttcatcagccatcttgtaagcaggaaaaggatggagtctgtccagtggataaggtgtttctctcactttttatgtaacaactgagtaatgacaacaaagtttacctaccactccttaggatataaggcccagtaaggcagagtttttgtttttcttttttcctactttattcactgctatgtcccagcccctagaacaactagttacaactaggcagttgtaactgcctagtacataatagggactcaaaaatatttgtaaatgaatgaataaatccactttcccagaattaccaaggcacatatttctgttgtcagaagtagatactcttaaactttgttgtacatcagaaccacagatgcagcatcttaatgtacatgtccccttccccagccctagtttactgtatgtgtatttggaaaggaatccacagatgattctgacatgtgaaaggctaagaagcagggagcttgccaggaaggttgaaattaaaatctgaaagttgtggggagtcttagaatattaagtgttactttttgttggaaatggcttcttttgtctttattaaagttaggaatgtgttttctgaaaagcttactttttgatattaatttccatttttaaagaaataccttgaggccaggcgcagtggctcacgcctgtaatcccagcactttggaaggccgaggtgggcagatcacgaggtcaggagatagagaccatcctggctaacacggtgaaacccgtctccattaaaaatacaaaaaattagccgggcgtggtggcgggtgcctgtagttccagctactcgggaggctgaggcaggagaatctcttgaacctgggaggcagagcttgcagtgagccgagatggcaccactgcactccagcctgggtgacagagcgagagtccgtctc

SEQ ID NO: 15672 - DNA, 2356 bp, Homo sapiens
  CDS (111)..(1778)
agcaaagtattcctgtgttgctggaaggcagagatgctctcgtgagatcccagacgggctcaggtaaaactcttgcctattgcatccctgtggtccagtcccttcaagcaatggagtcaaaaatacagcgcagtgatggcccctatgccctggtgctcgtgccaacgagagagctagctctacaaagctttgacactgtccagaaactgcttaagcctttcacctggattgtgcctggagtgttaatgggaggagagaagagaaaatcagaaaaggccagactccgcaaaggaataaatatccttatctcaactcctggacgcctggtggatcatataaaatccacaaagaacattcattttagtcggctgcggtggttggtgtttgatgaagcagacagaatcttggatttgggttttgaaaaggacatcacagtgatacttaatgctgtaaatgctgaatgccaaaaacgacagaatgtcttgctatcagcgacactcacagaaggtgtaacgcggctagctgatatcagtttgcatgatccagtcagtatttctgtcctggacaagagccatgaccagttgaacccaaaggacaaagcggtccaggaggtctgtcctccaccagctggcgacaagctggacagctttgcaataccagagagtctcaagcagcatgtgactgtggttcccagcaaactgaggctcgtctgcctagcggccttcatccttcagaaatgcaagtttgaggaagaccagaagatggttgtctttttctcaagttgcgagctggtggagttccactacagcctcttcctacagaccctgctgagcagctcaggggcgccggcatcagggcagttgccatctgcctccatgcgattaaaattcctacggctgcatggcggcatggagcaggaggaaagaacagcagtgtttcaggaattttcacattccagaagaggcgtccttctttgcacggatgttgcagctcggggcttagatctccctcaagtcacgtggattgttcagtacaacgctccatcttcacctgcagaatacatccaccggattggaagaaccgcccggattggctgccatgggagcagcctgctcattttggctccttcggaggcagaatatgtcaactcgttggcttctcacaaaatcaacgtttctgagattaagatggaagatattttgtgtgttctgacaagagatgattgttttaaagggaaacgatggggagcccagaaatcccatgctgttggcccccaggaaatccgagagcgagccacagtcttgcagacggtatttgaagattacgtgcactccagtgagaggagggtctcctgggcaaagaaagctctgcagtccttcatccaagcctacgccacctaccccagggagctgaagcacatcttccacgtccgatccctccaccttgggcatgtggcgaagagcttcggactaagagatgcccccaggaatcttagtgccttgactagaaagaagaggaaagcacacgtgaaaaggcctgaccttcataagaagacccagagtaaacacagcctcgctgaaatcctacgttcggaatactcaagcggcatggaggccgacatcgccaaggtcaaaaagcaaaacgcacctggagagcctggtggccggcccctgcagcacagtctgcagccgacaccctgctttggccgtgggaaaacattaaaatggagaaaaacccaaaaaggtgtacagcgggacagcaagacttcccagaaagtttaaaatctctctgggtcttcgagtggaacctggaagccccgggtggcagtggattgatgtccagttcttgtcagaggaggcttgtgaaaaataactgcgcctttgcctgaataccacgtccccaagaatcagaggggccacagcccttctcctccatgggaggccctggagcctgatagaaatcagtggtgtggggcactgtagagactagccagctcccgacggaaggggtctgtgtcttgtattgatcccatcagtgcccggcactcccttcacccaggtgctgacgtgccggggttgagctggcaccccgggatgtgatgtaagaacgccctgcgcgtcagcctggaacgggcttgattgctgcccttaactgtgttctgaagtttcacagcttggcttcagcctatcagcgcatacattggcatgaattttgtgaattagggtgttaaaaactggaattgaatttgtacaaaaagagaatatatttatcactaattattttcttaatgtaggaatgtaccgttaaaaaggaccaaaagtttttggtctgggtcaaaaaatacgaatgtgttctc

SEQ ID NO: 15673 - protein, 556 aa, Homo sapiens
MESKIQRSDGPYALVLVPTRELALQSFDTVQKLLKPFTWIVPGVLMGGEKRKSEKARLRKGINILISTPGRLVDHIKSTKNIHFSRLRWLVFDEADRILDLGFEKDITVILNAVNAECQKRQNVLLSATLTEGVTRLADISLHDPVSISVLDKSHDQLNPKDKAVQEVCPPPAGDKLDSFAIPESLKQHVTVVPSKLRLVCLAAFILQKCKFEEDQKMVVFFSSCELVEFHYSLFLQTLLSSSGAPASGQLPSASMRLKFLRLHGGMEQEERTAVFQEFSHSRRGVLLCTDVAARGLDLPQVTWIVQYNAPSSPAEYIHRIGRTARIGCHGSSLLILAPSEAEYVNSLASHKINVSEIKMEDILCVLTRDDCFKGKRWGAQKSHAVGPQEIRERATVLQTVFEDYVHSSERRVSWAKKALQSFIQAYATYPRELKHIFHVRSLHLGHVAKSFGLRDAPRNLSALTRKKRKAHVKRPDLHKKTQSKHSLAEILRSEYSSGMEADIAKVKKQNAPGEPGGRPLQHSLQPTPCFGRGKTLKWRKTQKGVQRDSKTSQKV

SEQ ID NO: 15674 - DNA, 2843 bp, Homo sapiens
cttacttacaaaaacaggtggctggctcagactgtagtttgctaaccctgagaacttgacagcaaaaagaagagataaatagtagttaaaacataaagcagaatcaaataaattttttttccatataggtgagatctgataatgtttttaggtagaaaggaagaaacttgtgaagcaggagagactaaacctgtttgatgtttttggttgggggccaggttagagataggatcgggtgtatgtgttgttgaattattcctaaaagggaagagagacaccagtaattgcaaaatcatcaagtatttatagaggtagaggagaaagaataaattcagatgtgttgagatagatgagagtacctatgaggatttgtttgatttgggaaaatgaaagcagaagtaggagaagcagaagtaggagaaattcagatgtgttgagatagatgagagtacctatgaggatttgtttgatttgggaaaatgaaagcagaagtaggagagggcagaggataattggaagcttagaatggggaaaggatgtctgtgctgtggggaatactttcaggcagttgttaccagtattttgaagatgacaacttgtttaacctcgaaacaatttgtggaccaccccatgattgtagttacatttttagtattcatcaatggagaatatgcatattagaaaaaagctactactcagttctctcttagatgactttgtattttattaaccacaacatggactgcacatttgaaaaatgttaatacatgtatgtgagaaattgtctttatgtaatgcaatgccctgggtacccactgagataactaatttaacagcttcccaggaggctgaaagctcataagttagaaatcattgcgttctaatgaatcaacaataagagaataaaggattgcttagaagtagtattctgtcaaaattaaaatgaacttataatgaactcactttgaaggattccataactttttattcagtagtacttggcagttttgagcaagatgacagaaacaaaatgatctagggttaggcataacattgtatagaaggccagaataaacatttagcttattctttctctaaattaccttttcctgagatcacacccagtttcattaatcacttctgtatttatggtgatcaaattggcatctcattttcttaaccgttttgttgatttcatgttccccatttacaccttactgaatatttccatttgggtatcttactgtttcacatttaacctactgaaaagaaagcttcttatctttcctttgaaacgagctctctgctgatttctacttggagtagagaatatacagagatgctgaagttgatgggaaaatgtggataggttgggaaaaacatgaattaggtgtgggattcattgaagaaattgaacagcatcatgactggtaaatgatggtgatgagaaagtagagaaaacctactgtttgctcttaccatttgttttttaaattttagccaaatcaagttcttgactcatacactcttacaaatattcaaatatatgttctctattttgtttccttaatccaataatgttgtaatccttttccaattaataagcaatatgttcaataccgatgcccatttaagtgtgctgttactctctaatcattattattcctttcataaatagatctgggcataggaaccaatcagaaacaatcgcttcagcaatcaagaccattgttcatcatggaggaacccatggatacctctgagcctctatctgcattaccattcactgggcagcagtcttttgagccaagtggcaaatctggacagtatccatcgatgcagatgaaccacatccaggcactggggaagtggaggacatagaacagctcaatcagtgtttgatccaacacttccatctcattaagacaagtttgatttttctttgctttttatttcatggaatacatgagaatctcttaactgttggagtttccaaggaggcatacctcatgacttcagttaatggaaagaacaaaactaaaatgctgtatggccaaagccacaaagggaaggatccacaatttacattcttggagctatcatctgtactgtactgttgtgatctactgattggcattggcatagtagtaggggtcaagtgacagaatccgtgccagcagtctccaggttcagaagcaattcaagaccctgatgatagctctccagcaaccaacacatggtgacatggtgattgtgccaacttgttgctcagttataatgcagggccagtgattggtttaagtgaagaccatggttgagatcatttgtctttggtctaatagaatttgagtctagtagaatttgagtctccagggaaagagctacttgaccaaattaaactagtagcaggtagagcatgaatgacagcatattataccatcaagatgttcttagagcagtgtatggatggatcgattgtactgccatcagttgtgactgacgttgtattcaaggagaaagagaaacttgtttagaaagcactttgaaagttttttgagtacgggggtgccctgtatcaccccgttatggttgaactttctccttcaaaattaccagacttggcatcagtggcaaattattgggctaaaagacttaatcagacatattctgggttcaaggctcctaatataatacctggtgcaaacattatacttccactcattcagatggttgcatcctgccaggcatccagtgggactgggaatatggacacttgaacattaaacatcctgaagaattttggaatgacaggttacaagtgaacataatcagttctctatatt

SEQ ID NO: 15675 - DNA, 1947 bp, Homo sapiens
acatgcgaagaaaatgcccatgcatttctttaagcagaaatataagttagtgaatttgtttcttcttgataaaatggttagaatttgcttagaaattccttttatcataaaagtaaaaattatcagctttaaccttctcatttgtctcctactgcttcttttcttgttctttattctcatccatccccttctctgtctttgcctctactcttcctctattccttcataagaatctaaacaactcctttaaacatcaattcaaatgttcttcccttggatagagatcacttccatccccttcataactagctgggcctagtacctttgggttagcaattttgccagagatgttggagaaaaagggggtagcatttcctcttgaaaatccagcctgcaaggcatttacaatctcatgctggtttcgtaaggccctgctgtccctccagaatagaggcccacagcactcactaggtaccaggcatggtgaacttgcttgcccaagctctctagtaggtggcagatttacccaggtctgcctgactttagagcctattcttttaatcattgtaccttactgtctttatagacaaggtcaggctctctatgcttctgtgagataattttccctaggagtgtaaatagttactatagagacactagatgccacctgctatagccctcagaagtggcatcagactatgcctgggctttctgttttaaggacaaggaagaatgagtgtgacagtgaaaggttgtatttgtaaaggctggaagagcagaaatccccaagtgctagagaaaagaatgtggacaagtgtatggtatccaatcatagtatgttagagctgagttgggctttaaagatgatctcctctaacccctttatttgcagttgaagacgttgaggatctgagacattaagtgaattgtctgaggacacacagccagtttcttagatgcagagccaaggatgaatttttttcattcagactaagctgttttttgcagtccacctttactctacttggggttcatttctttttaagaagtctcaaagattagaaaattgagtcattttgagcaatataatgtcatattgtacaattctgctgaaagtaattttaatagcaatgccggcagatctcccaaatccatgggtttcaaaatatttccgccttttgctaagctaatatatagaatttcaaaaccatatttataccacatacaatttccaaagagctgggcaatttcctataaaaactcagctgtgcactgattgccaagttggaaaactcagggtttcctggcaacacccacttgggctctagggaatgcaagcttctcagcaaacaacctctcctgacttacgagctccatcggcagccacgacccgagtcacagcggccctttctgatgttcttgtctctgtcgcttatgtttctcaagaacctgtaatcttgccttaatccctcaccagctgaatacctcctacatgctaaactcctggaatgaaaggtccacatttctctcatgctaggagtttgggaccagaattcagatgaactcattgctagtactggttcaaaagctaatgagccctctagattcccaggtccttagtttcctcatgggtaaaatatagacaataactcctacctgttcatctttcagggcttttccaaagattttcaacatctgaaattcacaggatcatggagacgaactaaaccatcatggagactaactaaaccagatgcatctagcccctcatgttagagttgagaaaacagaaacccagggtttggggactcccttgaagtcatcaagttcctgttgatggcaaaatcaggaccaagcttctgatcctcccaaatattccttcacttctcagtgctgcctgtgatgagaaagatcaaagcatgcatacaattataaatcatgacacag

SEQ ID NO: 15676 - DNA, 1868 bp, Homo sapiens
attataaagattctgaacaacccaagagcatatacgttgcccatatccaaggaagaatcaagattatcaagactagcaacaaagactccaagcaaaggctaccaagaaacctcatgaagtgaaacaggactttgagaagttcctacataaactgcgttccgaagctgaaattgagagagaatgtgtggcatcactatcgtcatcatcatcatcatcaccatcatcaacagacaactacaactttgaggaagaagaatactaagagaaaccagaaatgaactctattcaagaataatgcatacaattcagtggtatcagtttaattgtaacaatatatttaattcaagtccaatccatgtaatcagtattaagagtgtgttttaccattcatctttaaaatcttcaaatcaataaatctcagtaagttattcttaaaagatctgtccaagcatgatcttggctcttaatagtaaaaccatattttaagatggaaaaagaatcattatgaagcatagagagctttcaaccatttctttgaaaatatatcttgatataatagcaaccgttcatcataatacaaaacagaaggaagattaatttactgtggcacagaaagtcctgccaattcctaagtgccccaagtagtttctctcagactttttacattttttcaggcctcaagcaaaaccaaagccccacctccaggtttggtagcaaacaaactttgcttctccggtgctaagcttccatcactcctctggtaataagctttgtgcacatttgctagaaagctgggcagcttgtccgcaggtaccattgatactgtgcagcctccccatcctgctccagtaagtcgtgacccttgagccccaaacttcctaaaacagtgaggaaaaaaatattagaacctataaatgaaaatacaagggatttgcttggtgtttgtagaacacatagcctatctaagttctaagaagaaaatacatgcggggtttttaggtgtcatcaaacattttaggacattaagacatttatactgtttcagagagtgatttggaattttttcattgtatctaaatctagtccctggttttgactccaagtggtaagtcaacagtactcctcccatttcatgactggcaataacccactgtaatattgattccataaagtagccacttgaagagttgtatagcaagcttacacgtaaatcaggaaggaggcgttaagataaaacaggcaatggtaaaagaaatgtaggcaaccctgaatcagaaggtcactccaaatgaggacaaatcaaaatttaaaatgtacagtcttatacaagttttccccaatggctatttcagctgcattcttaaggccgggctgtttcaaagaagaatcagtcccctagaacagatagcctagttcactgaataaacttatcaacaaaaagcttgttattaaactccaggttgggtcggtggttggttgaatctctaatggaaaattaaccaagcctttccacaaagcagagggcagtccctagaggtccacaccaccttccctgtgccttctggagctagtctgattattggactcagaagttgacatcagatgagatatatctgattgggatgataacaactatataaaggaccacacagctagagttaattttagttactgtaaaccaggcacagtttcaaacctaagatttcaaccaaagtgaaaggccctatcacaatgtacacagatcacttagctttaaaagatgcaatttatcctgacacgaaagttaacatgtacttacaattaattcttcttaataaaattcactccaaattactagtggattaaaggctctatgattaatttagcac

SEQ ID NO: 15677 - DNA, 2823 bp, Homo sapiens
  CDS (748)..(1248)
ctctcaattttttttgtttttgtttctttttacagggtttcaccatgtcacccaggctgagtgcagtggcgtaatcgctcactgcggcctcaacctcttgggctcaagcaatcctcctaccacagcctcccaagtcccaagtgcttgggactccaggaacatgccaccatgcctgactaattttttatttttttaattttatagagacagagtctcattatgttgtccagactggtcttgaactcctggacctaggcagtcctcctgccttggccccccaaagtgctgagattacaggtgagagccactgtgctcagcctactcagctgttaatcttagactttattctcttttcgttttgtgtatttgtggtagaaatttcattcactccgatgacttcacttattatctatacataatgctgatgactccagatccagaagccaggagtttgagaccagcctggtcaacatagtgacacgtctctacaaaaaaagaggtgatgctgccaacttactgatttagtgtatgatggtgtttttgaggtgctccagtggcttctgtttctatcagctgtccctcctgttcagctactgacggggtggtgcgtaacggcaaaagcaccgccggacatcagcgctatctctgctctcactgccgtaaaacatggcaactgcagttcacttacaccgcttctcaacccggtacgcaccagaaaatcattgatatggccatgaatggcgttggatgccgggcaacagcccgcattatgggcgttggcctcaacacgattttacgtcacttaaaaaactcaggccgcagtcggtaacctcgcgcatacagccgggcagtgacgtcatcgtctgcgcggaaatggacgaacagtggggctatgtcggggctaaatcgcgccagcgctggctgttttacgcgtatgacagtctccggaagacggttgttgcgcacgtattcggtgaacgcactatggcgacgctggggcgtcttatgagcctgctgtcaccctttgacgtggtgatatggatgacggatggctggccgctgtatgaatcccgcctgaagggaaagctgcacgtaatcagcaagcgatatacgcagcgaattgagcggcataacctgaatctgaggcagcacctggcacggctgggacggaagtcgctgtcgttctcaaaatcggtggagctgcatgacaaagtcatcgggcattatctgaacataaaacactatcaataagttggagtcattaccaaaaaaagaaaggaaaaaattagccaggtatggtggcatatgcctgtagctccatacctgtataatcaacagctattaaatatctgctaagcaaactaaactaagcattttcaaaagtaaacttgtgaaacctgatggatttcagtagttgacatcagcatctacttttgctgaagtcagtagcctggacattatttatgacacttatttttttttcccatcttgcccttatccattcattcaccaagccttgttgagtttatcttctgagtatctcattgccatcacaccaatctaggacaccatcatctcttacataggtgattacaatagcctccacactggcctccctgtctccgtttagctcatctcccaatatattttataaaaatgatactgttactttctctgctttaatggcttaccattacctttaaatggagtctgaatcagtggtctccaaaggggggtgatatataagataatctgctagggtgcaggaggaaaacattggaacttttattcatatttacctttttatttgaaaaacactaaggcattaatatttaaaagctactactgtgtaatagttatttagtcattccttctttgctctatgtgtcagatggtcatttggtactaaaggtgtcctgagggaagcatgctttgttcactttctgcatgttgcacaatactataatttgaatgtccatctatgcggatttatgagttatctagtttaactattacaaaatatgtaagtctgggattagggaatttgtggagaaaatcaagtgtttaactgcaaataagatcacattgttgttcagctggtaagatatacaaaatcaaatctgttctcatgaattaagaaaaattacgctgattttgaggttttaagtgaaactttttaaaaaaaattctcatttttttgtaaggcatccctttctgctttgatagccattaaaaatcaaatattcaaactgatgttagaactagatctttgaatctctgtatcacacggtgttaagatcttcagaaataatgaagcatattcaatattttatttaaaatatttgtgagaacaaacttttgtaccataaataaaacaaattttagtctttttcttatgctctatttttgggatacagacgattattttatattgtcatattgtaaatcctataaaaatggtagataagtaaacatagataccaacatgggtatgtaattatgaataatatttggagatctttagtttaaattcttccataaaatagctttcagggccaggcgtggtagctcagacttctactccaagcactttgggtggctgacgcaggaggatcgcttgaggccaggacttcaggaccggcctgggcaacatagcaagacctaacttctaaaaaattaagataaattagcgggcatggtcgcacatgtagctactccagaggctgaggggaggattgcttgggcccaggaatttgaatttacagtgggctatgattgtccactgcactccagcctgggccacagagtgagaacctgtctctt

SEQ ID NO: 15678 - protein, 167 aa, Homo sapiens
MPGNSPHYGRWPQHDFTSLKKLRPQSVTSRIQPGSDVIVCAEMDEQWGYVGAKSRQRWLFYAYDSLRKTVVAHVFGERTMATLGRLMSLLSPFDVVIWMTDGWPLYESRLKGKLHVISKRYTQRIERHNLNLRQHLARLGRKSLSFSKSVELHDKVIGHYLNIKHYQ

SEQ ID NO: 15679 - DNA, 1970 bp, Homo sapiens
  CDS (113)..(838)
gaggccgcgccgggagcgcggtggggctaggcgtggggcgctcccggcatgtccctgtaccgcagcgtcgtgtggttcgccaaggggctgcgcgagtacaccaagagtggctatgaatctgcatgtaaagactttgtccctcatgacttggaggtccagattcctggaagagtctttttggtcactggaggaaacagcggcattggcaaagcaactgcccttgaaatcgccaagcgagaacatttttctgcacattgtggacttgtctgatcccaagcaaatctggaaatttgttgaaaatttcaagcaggaacataaactccatgttctgatcaataatgcaggttgcatggtcaataaaagagagctcacagaagatggacttgaaaaaaactttgctgccaatactctgggtgtgtacattctcacgaccggcctgatccctgtgctggagaaagaacacgacccccgagtgataaccgtctcctcaggaggaatgttggttcagaaactgaacaccaatgatctccagtccgaaagaacaccatttgatggaactatggtctatgcacaaaacaagaggcagcaagtggttctgacggagcggtgggcccaagggcacccggccatccatttttcttccatgcatcctggctgggccgacaccccaggtgtgaggcaggcgatgccggggttccacgccaggttcggggaccgcctgcgctccgaggcccagggcgcggacaccatgctgtggctggccctctcctctgccgcagccgcacagcccagcggccgcttctttcaaggtgacttcctccctggctgtgaaggcagctgacacagggctaggggcagcagctgggccttcgaggcgcaccttcccctccgtgaaacctggggtgggactgtcccctggggggtgcctgggcttctttggcgagatgattgctttgcctgctgaggttagttttgggaagcgcttcactccaggttggtagcttctttggagacttgtgataaccctgtcatcaaggtcctgtgagaacgggagaggcagttcctaccttgggaatggaagattttctctgcagtttgctgaggcccaggaggggcgctattcaaagctgcactgcaaagggagtaacggactctgcttctctgcagtgcaaagggtgtaagggactctgcttctctatttttggaagcagtgatctgttcacgtctctccccagtgggctcctaagggggcaggcgtgtgagtggacgccatccgaagacagcacttgacctcgggtggaagccaggctctttgcttggcttctctttcctctgttcttgatgagaaccacccttgcttgaggaattctgaagcgctggtgacccctggggtatccgggaggatggccgcaccccttcctgctgatcacccaaacgtggtctcccgtccagccctggctgcagcctcccagttcccaaactgcactttacatatcaatccatgctgcctgatccctgtgggacctttgacagcagggatgggggtctaacagctgtagggtgctgccactccagcaggcgtcggttcaaggcctgagcagcacagggacatggacccagccacgctgcagcagctcacacctctctgcggttccctctcacttttagatcggaagccagtttctacacacttgcctctcgctacagcgtcctcctcaccggccgaagaggagaaactcattgaaatcctggaacagctggctcagacatttaaataggccaacccagacacagtgcggtaccagaattgccttagaagataccagaaggtgcggtctagggaccagtgaataagaagaccccacttcaacttcccctcgaagacgttgtgcctcacagcgaggcctacaagggatgggaacttttatttcaaaataaatactaccgaggctgtgatcaggctcaccttg

SEQ ID NO: 15680 - protein, 242 aa, Homo sapiens
MNLHVKTLSLMTWRSRFLEESFWSLEETAALAKQLPLKSPSENIFLHIVDLSDPKQIWKFVENFKQEHKLHVLINNAGCMVNKRELTEDGLEKNFAANTLGVYILTTGLIPVLEKEHDPRVITVSSGGMLVQKLNTNDLQSERTPFDGTMVYAQNKRQQVVLTERWAQGHPAIHFSSMHPGWADTPGVRQAMPGFHARFGDRLRSEAQGADTMLWLALSSAAAAQPSGRFFQGDFLPGCEGS

SEQ ID NO: 15681 - DNA, 2456 bp, Homo sapiens
  CDS (6)..(2162)
aaaaaatggcagcgctggaggaagaattcacgttgtcttcggtagtcctgagcgccgggcctgaaggactcctaggcgtggagcagagcgacaaaacagaccagtttctagtgacagacagcggcaggacagtcatcctctataaggtttctgatcagaaacccttggggagctggtcagtgaaacaaggtcaaattataacatgtccagctgtgtgcaactttcaaactggagagtatgttgttgtacacgataataaggttttaagaatatggaataatgaagatgtaaacctggataaagtatttaaagctacattgtcagcagaagtatataggatactttcagtgcaagggacagaacccttggtgctcttcaaggaaggtgctgttcgtggtttagaggccttgcttgcagacccccagcagaaaattgaaactgttatctctgatgaagaagtgattaaatggacaaagtttttcgtagtattcagacatcctgttttaatttttattactgaaaaacatggaaattactttgcttacgtgcaaatgtttaactcacgtatcttaaccaaatatacactcttacttggacaagacgaaaactctgttataaagagttttactgcatctgtagatcggaaattcatctctttgatgtcattaagctctgatggttgtatatatgaaaccttgataccaatacgtccagctgacccagaaaaaaatcagagcttagttaaatcactgctgctcaaggctgttgtatctggtaacgctcgaaatggagttgcactcactgccctggatcaggatcacgtcgcagtcctaggaagtccactagcagcttctaaggaatgcctctctgtatggaacataaaatttcaaacactacagacttcaaaagagttaccacaagggaccagtggtcaactctggtattatggagaacatttgtttatgctacatggaaaatctctaactgtgattccatacaagtgtgaagtgtcatcattagcaggtgctcttggaaaactcaagcatagtcaagatccaggaactcatgtcgtgtcccattttgtaaactgggagacacctcaaggatgtggacttgggttccagaactcagagcagtcaagaagaattttaaggagacgaaaaattgaagtgagtttacagccagaggttccaccatccaaacaacttttgtcaaccataatgaaagattcagaaaaacacattgaagtagaagtacggaaatttttggctctgaagcagacacctgactttcatactgtcattggggacacagtaacaggacttctggaaaggtgtaaagcagaaccatcattttatccccggaactgtctgatgcagcttatccaaacgcatgtgctttcttacagtttgtgccccgacttaatggagattgccttaaaaaagaaagatgtacagttgttacaactctgtctacagcagttccctgacattcctgaatcagtcacctgtgcttgcttaaaaattttcttgagcattggtgatgacagtcttcaagaaacagatgttaatatggagtcagtttttgactatagtataaattctgtacatgatgagaaaatggaagagcaaactgaaattcttcaaaatggcttcaatcctgaagaagataaatgcaataactgtgatcaagagttaaataaaaagccccaggacgaaacaaaggagagcacttcatgccctgtggtacaaaaaagagcagctctacttaatgcaattcttcattcagcatatagcgagacatttcttctgcctcatttgaaagacatcccagcacagcatatcacgctgtttcttaagtatttgtatttcctgtacctgaagtgtagcgaaaatgctactatgactcttcctggaatacacccacctaccttgaaccagattatggattggatatgtctacttctggatgcgaattttactgttgttgtaatgatgccagaagcaaagaggctactgataaatctttacaagcttgtaaaatctcagatatctgtttattctgagctcaacaagattgaagtaagttttcgggagctacagaaattaaatcaagaaaagaataatagaggattatattcaattgaagtgctggagctcttctgatattatcaattctccttcatagacattttataaagctcttttatgtgaactcttgcttcatccaggcaagaacggtgttttgtttgcgaccatctcagtgtcaagagaaacgtgtcagtgagtacctggaccatcacttaactgatgctccggggtaggactgcaggtttcacatgaacctgttctaggctgtggacattggtgtggagaggttctgcaattttttaaaaatatgtaactgggttgattttaagtaaaattatttgtgtattgataaaagtctaatttctt

SEQ ID NO: 15682 - protein, 719 aa, Homo sapiens
MAALEEEFTLSSVVLSAGPEGLLGVEQSDKTDQFLVTDSGRTVILYKVSDQKPLGSWSVKQGQIITCPAVCNFQTGEYVVVHDNKVLRIWNNEDVNLDKVFKATLSAEVYRILSVQGTEPLVLFKEGAVRGLEALLADPQQKIETVISDEEVIKWTKFFVVFRHPVLIFITEKHGNYFAYVQMFNSRILTKYTLLLGQDENSVIKSFTASVDRKFISLMSLSSDGCIYETLIPIRPADPEKNQSLVKSLLLKAVVSGNARNGVALTALDQDHVAVLGSPLAASKECLSVWNIKFQTLQTSKELPQGTSGQLWYYGEHLFMLHGKSLTVIPYKCEVSSLAGALGKLKHSQDPGTHVVSHFVNWETPQGCGLGFQNSEQSRRILRRRKIEVSLQPEVPPSKQLLSTIMKDSEKHIEVEVRKFLALKQTPDFHTVIGDTVTGLLERCKAEPSFYPRNCLMQLIQTHVLSYSLCPDLMEIALKKKDVQLLQLCLQQFPDIPESVTCACLKIFLSIGDDSLQETDVNMESVFDYSINSVHDEKMEEQTEILQNGFNPEEDKCNNCDQELNKKPQDETKESTSCPVVQKRAALLNAILHSAYSETFLLPHLKDIPAQHITLFLKYLYFLYLKCSENATMTLPGIHPPTLNQIMDWICLLLDANFTVVVMMPEAKRLLINLYKLVKSQISVYSELNKIEVSFRELQKLNQEKNNRGLYSIEVLELF

SEQ ID NO: 15683 - DNA, 2486 bp, Homo sapiens
  CDS (182)..(1504)
gagctcgcccgctgtccgccagcccgcgggagggaggagagaagcgaagcgtttccgcggttggctactcagtgtcttggtctcaagttgcctcattgcggctggcgttcccaatacagacgcatcgtttcttttttaatactccctaagaaagggaataaccttcaagctggcgggagcaatggttcacataaagaaaggcgagctgacccaggaggagaaggagctactggaagtcatcgggaaaggtactgtccaagaagctggaacattattatccagcaagaatgttcgtgtcaactgtttggacgagaatggaatgactcctctaatgcatgcagcatataaaggaaaactcgatatgtgcaaattactactgcgacatggagccgatgtaaattgtcatcagcatgaacatggatacacagccctcatgtttgctgcactttctggtaataaagacatcacatgggtaatgttagaagctggtgctgagacagatgttgtcaactctgtgggaagaacagcagctcagatggcagcctttgtgggtcaacatgattgtgtgaccataatcaacaatttctttcctcgagagagactggattattacactaagccccagggactggataaagagccaaaactgcccccaaagttggcaggcccgctgcacaaaattatcaccacaacgaatcttcatcctgtcaagatcgtgatgcttgtaaatgagaatcctctgctgacagaagaagcagccctgaataaatgctacagagtgatggatttgatttgtgagaaatgtatgaagcaaagagacatgaatgaagtattggctatgaagatgcattacataagctgtatctttcagaaatgcattaacttcttaaaagatggagagaataaactggacaccttgatcaaaagcttgttaaaaggccgagcttctgatggctttccagtgtatcaagaaaagatcattagagaaagtatcagaaaatttccttactgtgaagctacactcctccagcagctggttcgaagcattgctcctgttgaaattggttctgatcccactgcattctccgtccttacccaagccatcactggccaggtgggttttgtggatgtggaattttgcactacctgtggagaaaagggagcaagtaaaagatgttcagtttgcaaaatggtaatatattgtgatcaaacccgccagaaaacacactggtttactcataagaaaatctgtaagaatctgaaggacatttacgaaaagcaacagttggaggctgccaaagaaaagagacaagaggaaaaccacggcaaacttgatgtcaattctaactgtgttaatgaagagcaaccagaggctgaagtaggtatctctcaaaaggattccaatcctgaagattccggggaaggaaagaaagaatctcttgaaagcgaagctgagttggaaggcttacaggatgctcctgcagggccacaggtgtctgaggagtaaaagccagagcaagtgccagtgtggatggtcctcaccctgcaagaagctggaaaactcctaggaatgcattgtcctcaccttgttatacctgcgtggcaccatggcaggattccacatttcatagaatacaggttttcaagcaaacccctgttgaccatgccctaatttcctattgatttctgttgtataattgaatggatattcctatggaaaattttttgtttcaaaatacaggaaaaacattcctattacctttctgaggctggctttccagcaattgtttcaaaggaaaatagatccccttaaagaaaaaatacaggctttaggcaacaaagggacaagcagaacaggtgtggaagagagattttcaggaagggaaaaatttatagctacagagggtagttagaaaaatcataacttatatgtgaataaaatacagataagcagcatttacggtagtggcattctacttattaagatgcaatgaaatgaagaaaggctttatgttcaaggacctttgccatagttcagctaattgtagttttatatagaaatgatcctgaacactctgaacttgacgtagtcctgcggtgatattctatctgcagtatttgtacctccagaatggcagatccctcagcaggaacaaaggcatattgacggttctctcagcgtatgcattaaaaaaggtacttcctgaaacttttgattcaataatgactaaacatactatgtacacaattactgtaaggctaattcacgtgccatacgccacctgaaagcctgagttatcttgctataagcttttcatggagcacttcctttccagaaactgatttgtaactcatttagagaatgtcctggcgtcggtttttagcatatgtggtatttaaacagagctagaatgtgatgtctgaagataatgctgcatttctgggtttcttgtgtggattttaaaataaattgtgcctacaaatat

SEQ ID NO: 15684 - protein, 441 aa, Homo sapiens [sequence omitted]

SEQ ID NO: 15685 - DNA, 1834 bp, Homo sapiens
  CDS (15)..(530)
ggaagttgcaggcaatgagggacattgctatattaaaggaaaagcaggagaaagaaatacagacattacaggaggagacaaagaaagtccaagctgagacagcttcaaagacacgggaagtacaggcccagctcctccaggagaaaagattactggagaaacaactgagcgagccagacaggaggctactgggaaagagaaaaagaagagagcttaatatgaaggcccaggccttgaagttggcagcaaagcggtttatttttgaatactcctgtggcatcaacagagagaaccagcagttcaagaaggaattactgcagctaattgagcaagcccagaaactaacggctactcaaagccacttagaaaacaggaagcagcagctgcagcaggaacagtggtatctggagtccttaatccaggcgaggcagagactgcaaggaagtcataatcagtgcctaaatagacaggatgttccaaagaccacacccagtcttccccaaggcaccaaatcaaggattaatccaaagtaacttctaaaataacactgattaaataagaactggagcaagtactcttaagtgctacattaacctggttagaaaggctgttggattccagattgctattgtaaaatctccatcatgatgtgttggagtgaaggattagatggttttatccaacagtcctactagatatttggtaaccagcttcccttaactagctttttctttaaatactcgttaataagctattccacaaacctccagttaacctaacacatgaccctaacctagccatttaccatacatcaaactagctaaaggaaaccaacctaaggaagtgaaaacagttgtgatttatttcatctagctaaattgtatttctttatagagaaagtacctttaaggatagcattccaaatagactttgaatagcgttctgccagtttatcctcattccttttgaccaacttagcagacaaaagcagtttttacaagctctttgtgagtttgtgccagtgaccaggtagctccttctagttttctcatgagtgaaaaagcattctgataacagcaagtccagtaagtgctaggcagagtgacctttcacctgatgctaagcccctacaagtttgagaaggtaagaaaagatgaaggagacatatattaggtcagctcttacttttgaaaatgttttatttgaagaaacacctgtagcattgaggtgactgaatgcctccacttatttcaggaaaacgtatccaaaaaaagttgaaatatttggacaactttttttttaagtgccatcgatttccctagcagcattctaaaagatagcaagtaaaatgatgtttgttatcctaaatgctttagttttaggtcatttattaattttcttacaggtgcactttctagtacatgaagtatcctttgtaattaatgtgtgccatatgtttattcccatttagtataactataaattatattttaaattatatatttttaggatagttatattttttttgggttctacgacattgaagttggactagtgatttatttgaatgctgaatcctagtataggggaatataatcttatattttaacaggggtcctctatgggaaaataggatgaactttgtttcccagaaattgttaagtgatgaaaaacttcaaaataattttcctgcattttctgctttatttacatgtaaagtgaattccctgaaaattggatttaaaaagcattctccttcaatgtgcctttaccttgtagctttaacaacttttctgttaaatatgtagttttttattaaacaatgttattaaat

SEQ ID NO: 15686 - protein, 172 aa, Homo sapiens
MRDIAILKEKQEKEIQTLQEETKKVQAETASKTREVQAQLLQEKRLLEKQLSEPDRRLLGKRKRRELNMKAQALKLAAKRFIFEYSCGINRENQQFKKELLQLIEQAQKLTATQSHLENRKQQLQQEQWYLESLIQARQRLQGSHNQCLNRQDVPKTTPSLPQGTKSRINPK

SEQ ID NO: 15687 - DNA, 1349 bp, Homo sapiens
  CDS (10)..(369)
atttctgacatgctggtgattgaagcaatcttggctctgaagggcttgactgtacaacagtgggatgctctctatacagatcttccaaacagacaacttaaagttcaggttgcagacaggagagttattagcactaccgatgctgaaagacaagcagttacacccccaggattacaggaggcaatcaatgacctggtgaagaagtacaagctttctcgagcttttgtccggccctctggtacagaagatgtcgtccgagtatatgcagaagcagactcacaagaaagtgcagatcaccttgcacatgaagtgagcttggcagtatttcagctggctggaggaattggagaaaggccccaaccaggtttctgaagataattttcatattcctgagaaactggactttttacaagtctttacaaaactgtcaataataatggcagtactaagagatttataatcataatgtttacaatgcagcctactggattgtctctagatctgtttttcttaaacactaacagaataattctttataaataggtaagccttacacttgttgaagaaatttacctctaatttcagtctcactaatgcaaaatactgggacttaagtatacaattcagtcactaactgtacagttttatgtggggaacaattcatgcaggctactggaaaattaaatcttattaccaactccttgtgatatctttgccatcaccatcacatgagcaagatgatgttttgcagcattccccattgctgatacaaatggagagggcagagaagactttatacaaccagtttttccattgcagagtcttaagaaagattattagatgacttacctatatgactaatgccatcaggaactcagaggtatgaatagggggttgtccatccctcttccatactgaggtggagatgctcatgcaatacttttaaggatgcatggtccagccttcagttattcttcactgctcttggtgaaggtatgtgggagaaaaactaattataatacgtttcccagcctctgatggagaaggaacaccattctgataccagaacatggttaataaggaaaagagaaaaatccccaaccaatcttaattgaaccaagtctgaaaccaatggaaaaaaaaaatgggtagtgtatattttgcaggtttaagacaactcaggacaataaaaacaatggactttacatgtgtatatatatagctctcttaggcaccataatcagtatgagccaacaatatttaaacttgattcaggccacattcagacatttgctcttatatacaaatatttaaattaaatacaatctgaaatgtgttctgttacatac

SEQ ID NO: 15688 - protein, 120 aa, Homo sapiens
MLVIEAILALKGLTVQQWDALYTDLPNRQLKVQVADRRVISTTDAERQAVTPPGLQEAINDLVKKYKLSRAFVRPSGTEDVVRVYAEADSQESADHLAHEVSLAVFQLAGGIGERPQPGF

SEQ ID NO: 15689 - DNA, 2682 bp, Homo sapiens
taaaaagcatagtatttgcatataacctacatacatcctcccatatgctttaagtcatttctagattacttataatacctaatacaatgtaaatgctatatacatagttgttatactgcattttttttaagttgtattttttattgtaatgctgtttgttttgttttgagacggagtttcactcttgttgcccaggctggtctcaaactcctgacctcaggtgatccgccggcctcccaaagtgctgggattacaggcatgagccaccatacctggccagtgctgttattttttattgtggcattttccaaatagtttttgatccactgtgggttgaatccgcaggtgcggaatccggggatacagagggctatgtttttaattcagaaaaatacatggcttatatgtcataaaaggtaaaactgcaagcagtcattctcttaccgtgtttggctattctgttcctttcttttctgataaccaatattattactttttcgtatgttcttatatgagtaatgccaatatatatatatgtagattttctcacttatcaagtatgcaaatgtatgtatataaaatgtgctttaaaaatagagacagataatagactagaggttaccaaggaccggggaaggaaagaacggggagttattgtttaatgaggacagctgtggtttccagtgattaaaaaaaaaaagaaacagctctggaaatggacagtggtgatagttgtacaatatgccaatgaattatacatttaaaatggttaaactggtaggctggacatgctggcttatacctgtaatcttagcaccttgggaggcctatgtaggaggtttgcttgagtccaggaagtccaggccagcctgagcaacagggtgagaccctgtctctacaaaaaatacaaacattagccagacatggcggtgtgcacctgtagtcccaactgctggggaggctgaggtgggaggaccacctaagcctgggaggtggaggctacagtgagccatgatcgtgccactgcacttcagcctgagtgacagagtgagaccctgtctcaatttaaaaagaaaaaaaaaaagggttaagctggcaaattttatgatatttctattttatcacaatataaaagtttttaaaaatgtttttgaaattagaggactatcctaaaaaataaaaataaagttttatattttaatctacttaatttcaggtgtagtggctcacaagcactttgggaggctgaggtgggcagatcactcgaggccagaggtttgacaccagtttggccaacattgcaaaaccccatttctatttttcttaaaaaaatttttaaaaatctactttaaagcaagtagctgaacataaaataaggttttttgaactaagaatataatctacacagtggcttttcatattattcattgactgcaaaccttactctaaaatttaaaaatattttagttcttatttaaaatttttcaacattctttgctttctcttgtatcgtcttagcagagagcaaagaggggagataactagaaaatgtctatcagtaatatcacctgattgcttgatgacttggaccaagggtctgaaaactctggctgtttttgtatctaacccattgcctgtttttgcaaacaaagttttattgaaaacattcatgcccactcatttatttgtctgtagctgctttcatactacagtggcagagttgggtagttgtgacagactatttgaccttcaaaatgaaaaatatttaccacctggctgtttacagaaaatgtttactagcccctaatttagatgatggctaacgtctgtttcacccacaccaaactactgccatagaaaacatttaggaatttgacaatcttgcttgaaatatttacttaaaattctgaaataatatctgttttttgtagttcaaacttctcatggaacatctggaccctgatgaagaagaagaagaaggggaggtttcagctagcacaaatgctcggaacaaagcaattacctcactgcttggaggaggcagccctaaaaataatacagcagcagagacagaagatgatgaaagtgatggggaggatagaggaggaggcacttcaggggtgaggcggaggaggagtcaacgtatttcgcagcgtattacgtaaaatgatttttatgtgcttatatatgtcagtctattaaatgtacaccaagtaatgtaatacttaaaagagaaaacattttgtagatagagattctctacttacccgtttatacatccttttgtagaaagtttaacataaaagacaataaaaaaacagaaatgagatttatccagcataaagggttaatttttctttgaattgtattaatgtgtgttatttttattgttgctaagttttatgtagctatatggttcatatgtatatataattttatatatcaataagagtaaagacacgggtacaaattaagagttatatggttttacaagtatatgttaaccccttggcgctggcggtcacggtgcgtctcattgccggcaatggaagtgtgccgggaaatcccaactcccggcgtcaagggattaaaagcaataaaaacaataatttcactaaaattcttttgtgtaacacttggtcttttttcccccctcccaatgttttagtcattgagaaggtc

SEQ ID NO: 15690 - DNA, 2759 bp, Homo sapiens
  CDS (254)..(703)
gctattttagattttattcctgtgaaaatatatccatggaatactgttattgaatatgcttcctattttatgagaggttatgcaatctaactcatttgattattaaatttgataacctaccatgttcagctatcatgtaaatattgttatctctatatttatgtttatgtagttacctgtgaaagtagctttgaaaatgtgacacatatttttattagtgtaattacattttaattaatttttaatacttcacatgttttgcgtttttcctttggaggattggatagctttagtcaaagcagctgctgcagctgcagccaagaacaaaacagggagtaaacctcgaaccagcgctaacagcaataaagataaggataaagatgagagaaagtggtttaaagtaccttcaaagaaggaggaaacttcaacttgtatagccacaccagacgtagagaagaaggaagatctgcctacatctagtgaaacatttggacttcatgtagagaacgttccaaagatggtctttccacagccagagagcacattatcaaacaagaggaaaaataatcaaggcagctcgtttcaggcaaagagagctcgacttaacaagattactggtttgttggcatccaaagctgttggggttgatggtgctgaaaaaaaggaagactacaatgaaacagctccaatgctggagcaggtatgaaatggtagcatttgatttttttcaaggttcccactggaatgatcacggagctctagtatctacgtaattgaaattccccttttgatcagatatgggaataggaagctaattaattgatgatatatttttaactctgccttctccaaggtatacagataactacagacttcattagtgtttgatttcatagactggcattaaagcctttgtctccaaaatttgaaggcctggagacaggcatcccagggtataagcttccagctggatcacctttaactagcttacaaaaagacccttacacaaatactttccatttgtgagttaaaacagggttttttgacatcgaataaagcttcttttgtaagaagtttcttttatattgtaacaattggtgttgttagactgactatgtgttttatgaattgatcaatgagccatacatttttgctaggatgtatattttaataactacaaaaaaagagagtttaaaaaactattaagggtctgtctttaaaccacctaatagaggaatttaaaagtgaaggttgcagttgctagattttgccttggctaccttcagattcccacaatacttgtacataatgaactgtgcatgctttacattctctaagggcttaacttcttaggcactgtaagactataagaacgcagtaatagccataactggatttccttggttctcctgttttaaaatctgagccttaatgtagttttaatatatcctttttgtattacttttctttattagtagcctaataaagaagactttgagtatcttttgctctcctctagatgcgttttaaaaactattccaaatttaattgatattgtattgagtttttcagggttattttaggcctgatttgataacaatgcgttgttttggtgcctccattaatgttgtattaaatcaatgggtcttttaaattgattaatatgtcattgaatcataccttctgattttctgtgatcatcaaacggttaagtctttgccgttattgtcaatatatcaaccaaattttaaataactttttttactgtgtattactatattcaacgtcccagatataacaatattttgtattttcaccactgtttatggtattctcagaatgcgataaatcagggacttgggtaataaaatgtttctggaaaattcattacaatgtcaatctttgattatgcacaatcctgctgaggtgaatgtgattgtgaaaagtacttattaaatgtggaagttagtgtagagggcagtacccgtcttagagagaagtacagaaaaccacgttttgaaattgaatttaaaaaagaaaggaaaattgtgtaactcggctgtttctattttcataattaaaaacttttgagagtccttgccagttttgtaacaaagagaccaacaatcattaatgaaaaccttgtaaattattttagattttcaggaacaccatgccattccctcattttttacttgtcattcaggttgatttcaatgtgaaaatgttttgtgaacaaacacttatttttatcctatgtgttagcctcgcttcatagttaaaaagccgagttataaagctcttaattacatctcaattggtatcagcaatagacctaaaggagaggtattgattgttactaacctctgtttcctaatgagttaaagtaatgtcactcatgacatagattgataacaggcctgtagtcaaaacttactgtgctaatggacttatttatattttttaaaaattcaaactgtggtcttgaaccccaattctcagcttattaattatagattatttaattgtattagggatatgtcatgttatatttacttttggataaaacttgcattagatgcataataactcagtaagttttaaaaacaatgttaatttttccttgtttagaagttaagcaccttatcaagatattaagttttaaaatcttgttttataactttgtaacttgagagtaatggatgctgtagtgatgtctttcacatatgtgaagatgaacaataaaattgtttatttac

SEQ ID NO: 15691 - protein, 150 aa, Homo sapiens [sequence omitted]

SEQ ID NO: 15692 - DNA, 1946 bp, Homo sapiens
  CDS (65)..(1945)
tcaatttaatgacaaagttaataaaccctttgtgtgtcaaaaccaaggctgtaactacagtgctatgacaaaggatgcactatttaagcactatggtaaaattcatcaatacactccagaaatgattcttgaaattaagaagaatcaattgaaatttgctccctttaaatgtgtagtacctacatgtacaaaaacatttacaagaaattctaacctccgggcacactgtcagttggtgcatcattttacaactgaagaaatggtaaagttaaaaattaaaaggccttatggaagaaaatctcagagtgaaaatgtgccggcctcacgaagtacacaagtgaaaaaacagctagctatgacagaggaaaataaaaaggaatctcagcctgctttagaattgagagcagagacccaaaatacccacagtaatgtagcagtgatcccagaaaaacaacttgtagaaaaaaaaagtcctgacaaaacagaaagttctttacaagtgattacagttacttcagaacaatgtaatacaaatgcactcacaaacacacaaaccaaaggacggaagattaggaggcataaaaaagaaaaggaggagaaaaaacgaaagaagccagtttcccaatcccttgagtttccaacaagatacagtccttacagaccttatcgatgtgttcaccagggatgctttgctgcctttacgatacagcaaaacttgattctccattaccaggctgtacacaaatcagatctacctgcattttcagcagaggtcgaagaggaaagtgaagctggtaaagaaagtgaaaaaactgaaactaaacaaactttgaaagaatttcgatgtcaggtaagtgactgttctcgaattttccaagcaattactggcctaatacaacactacatgaaacttcatgaaatgactcctgaagaaattgaaagtatgactgcttcagtggatgttgggaagtttccatgtgaccagttagagtgtaaatcttcatttactacatatttgaactatgttgttcatctagaggcagaccacgggattggactaagggcaagtaaaacagaagaagatggtgtatacaaatgtgattgtgaaggctgtgaccgtatatatgcaacccggtcgaatctcctccgacacatttttaataagcataatgacaaacataaggctcatttgattcgtccaagaagattaacaccaggccaggaaaatatgtcaagcaaggcaaaccaagaaaaatcaaagtctaaacatcgggggaccaagcacagcagatgtggaaaggaaggaataaaaatgcccaagaccaaacgaaagaaaaaaaataatttagaaaacaagaatgcaaagattgtgcagattgaagaaaataagccatattctctgaaacgtgggaagcatgtatattctataaaggctagaaatgatgccctgtctgagtgtacaagcagatttgtaacccagtatccatgtatgataaagggatgtacttcagttgttacaagtgaaagcaatataattagacattataagtgccataaattatctaaggcatttacatcacaacaccgaaatcttcttattgtattcaaacggtgttgcaactcacaagtaaaggaaacgtctgagcaagaaggtgctaagaatgatgtgaaagattctgacacgtgtgtatcagagagcaatgataattcaagaacaacagctacagtttcacaaaaggaagttgaaaaaaatgaaaaagatgaaatggatgaactaacagaattgtttattacaaaattaataaatgaagatagcacaagtgtagagacccaagctaatacttcttcaaatgtaagtaatgattttcaggaagataacctctgccagtcagaaagacaaaaagcaagtaatttgaagagagttaataaggaaaaaaatgtctcac

SEQ ID NO: 15693 - protein, 627 aa, Homo sapiens
MTKDALFKHYGKIHQYTPEMILEIKKNQLKFAPFKCVVPTCTKTFTRNSNLRAHCQLVHHFTTEEMVKLKIKRPYGRKSQSENVPASRSTQVKKQLAMTEENKKESQPALELRAETQNTHSNVAVIPEKQLVEKKSPDKTESSLQVITVTSEQCNTNALTNTQTKGRKIRRHKKEKEEKKRKKPVSQSLEFPTRYSPYRPYRCVHQGCFAAFTIQQNLILHYQAVHKSDLPAFSAEVEEESEAGKESEKTETKQTLKEFRCQVSDCSRIFQAITGLIQHYMKLHEMTPEEIESMTASVDVGKFPCDQLECKSSFTTYLNYVVHLEADHGIGLRASKTEEDGVYKCDCEGCDRIYATRSNLLRHIFNKHNDKHKAHLIRPRRLTPGQENMSSKANQEKSKSKHRGTKHSRCGKEGIKMPKTKRKKKNNLENKNAKIVQIEENKPYSLKRGKHVYSIKARNDALSECTSRFVTQYPCMIKGCTSVVTSESNIIRHYKCHKLSKAFTSQHRNLLIVFKRCCNSQVKETSEQEGAKNDVKDSDTCVSESNDNSRTTATVSQKEVEKNEKDEMDELTELFITKLINEDSTSVETQANTSSNVSNDFQEDNLCQSERQKASNLKRVNKEKNVS

SEQ ID NO: 15694 - DNA, 1793 bp, Homo sapiens
taaaaccatagtgagataccatctcacatcagtcagaatggccattattaaaaaactgaaaaacagcaaatgtttgtgaggatgaagagaaaagggaacacttatacactgtttgtgggaatgtaaattagtacaacctctgtggaagacaggatgggtatttctcaaagaactgaaagtaggatctaccatttgacccagcaatcccactgttgagtatctacccaaaggaaaataaatcattttatcaaaaagacacctgcacttgtatgtttattgtgacactattcacaatagcaaagtcgtgaaatcagcctaagtgtccatcaatgaatgattggataaagaaaacgtggtatatatactccgtgaaatgctactcactcataagaaagaataaaatcatgtctttgcagcagcatggatggatttggaggccattattctaagtgaaaaactgcaatggaaaatcaaatactgaaggggtgcgttgcccctccacacctgtgggtgtttctcattaggtggaatgagagacttggaaaagaaaaagacacagagacaaagtatggagaaagaaataagggggcccaggggaccagcgttcagcatacggaggatcccgctggcctcttgagttcccttagtatttattgatcattcttgggtgtttctcggagagggggatgtggcagggtcataggataatagtggagagaaggtcagcagataaacacgtgagggaaggtctctgcatcatagacaaggtaaagaattaagtgctgtgctttagatatgcatacacataaacatctcaatgccttaaagagcagtattgctgcccgcctgtcccacctccagccctaaggtggttttcccctatctcagtagatggaacatacaatcgggttttacactgagacattccattgcccagggacgggcaggagacagatgccttcctcttgtttcaactgcaaagaggtgttccttcctcttatactaatcctcctcagcacagaccatttatgggtgtcgggctgggggacggtcaggtctttcccttcccacaaggccatatttcagactatcatatggggagaaaccttggacaatacctggctttcctaggcagaggtccctgcggccttccgcagtgtttgagtccctgggtacttgagattagggagtggtgatgactcttaaagagcatgctgacttcaagcatctgtttaacaaagcacatcttgcatagcccttaatccatttaaccctgagttgacacagcacatgtttcagagagcacggggttggggtaaggtcatagattaacagcatctcaaggcagaagaatttttcttagtacagaacaaaatggagactcctatgtctacttctttctacacagacacagtaacaatccgatctctcttttccccacaaatactacatgttctcacttataagtgggagctaaacaacaggcccacaagaacatacagaaagaaatagtaggccgggcgtggtggctcacacctgtaaccccagcactttgggaggccgaggtgggtgcatcatgaggtcaagagattgagaccatcctggccaacatggtgaaatcccatctctactaaaaatacaaaaattagctgggcatggtggcatgcacctgtagtcccagctactcgggaggctgagacgagaatcacttgaactggggaggcagaggttgcagtgagccgagatcgagtcactgcactccagtctaagtaacaagagtgaaactttgtctc

SEQ ID NO: 15695 - DNA, 1948 bp, Homo sapiens
  CDS (664)..(1017)
ttgtgttacaggtgaggagtaggaagttcaaaaagtttataaggtcaaagtcacacaactagtcagatgtagaactaacctttggatttgggactgttcaccatcaaatcctatatgcttttgatacagacaggagacccagaaatgctgggtagaagagggtggttccctggcaaaggccctaccctcaaacctggaaacctgcagccctaaatgggaagaggcattcctgttttcatgcccaaaagttgccttttggcccgtcatgtcccctatcctatacctgtataaaccccagaccccaggctccagaagcagatgaggagacaaacagaagagcagaagaatggcagaatggcacagcagagagaagaaaaggaacatctgaatgttgagaggaatttggctgggggcggttggagaggagattagccactggacagccaaactccaggggaaggtcatcttcccactccatcccccttccagctccccatccatcctgctgagagccacctccaccactcagtgaaaccgctgcattcatccttcaagtttatgtgtgacctgattcttcctggacattggacaaagacctaggtccagtgaactgtctaacacttaagtcatccacggacagcaaggctaacagaatgctgtaacatgtgcccacttggactctgggagttgcagacacccacccgtaggtgctgccatgggtccggagcccaaaaagtgcttgccctggctcctgcacctgcccgtctgcatgctccccctccggtaaggggtttgaggatgtggcggctggacataagagctatgcccctgtcacacatcatgggacaggggtcagggaactctcccatttcactttcaaatattccaggtcccctttttgttcgggagccagagtctagtggagacagagatagaaaccctgaaataggatccaggcaatataaacctacacgctgtaagccaagtcagagtgaggctgatgtgataacaaaagtctgaatacaaggtgggagacaattattctgactgaaagggaggcaagagttctgccataggcttgatgctgtgtgcccctggcttcctaactcatttgcaaatggaaaatactattccattgtaggaaccttctttttccatttgtctggggaaggagaaagaatggctgggctgaatgaatttatcccttggtcctcttccaacaaagctcagctatgaaagataaatccagctctccccaccccctctcagtggagctggggagaaatcaaaagcccctctgccaataatgagaccaaagtttgcaagggcaggacgagcccgtgctaacagagaaagtgttgtttcctcaatttggttttagactgtcttgtcctatgggggagaaaagatctgcccttgggagaggtgccaactttatagatctattaataaaagaactggcaggcttacagttcttgccaatgaggaaacttgaatgagagaagccaggctcaaccttggccaacagactggagcccatcaccctaacttcaacccgcttctccttacccaaccgtcaaaggctaggcagcacccacccagcagcttccacctggctgaagcctgcacctgcttcagaccaagggttagatggaaatttggcatgggaagagagggctcacctgcgggcaggatagactctatccaagaaggagaactgaaaaatgaaaacctatgagacaaggggtgatcctgaaggcaggcaggagaaagggctggagggagaggcactggggaatttttcctggtgaatactgaagttactagatgttttgtcttgcaaaactcaagggaaaactctcaaactctaatgtttgtctattctgtgtccaaactgtccttttgaaacggacccacctttcagtaaagaaacttgcattggcctgcc

SEQ ID NO: 15696 - protein, 118 aa, Homo sapiens [sequence omitted]

SEQ ID NO: 15697 - DNA, 2021 bp, Homo sapiens
  CDS (37)..(1059)
gtgaagcacacctacacctcatgggatcttgaggacatggaaaaataccgcatgcagtccatccggagagagagccgtgctcggcagaaggtgaaagggcctgtcgtgtcccaatatgataacatgaccccggcggtgcaggacgacttgggtgggatctatgtcatccatctgcgtagtaaatcagatcctgggaaaactggacttctctcagtggcagaaggaaaggagagccgccatgcagccaaggccatcagtcccgagggagaggaccgcttctataggaggcatcccgaggcagagatggacagagcccaccatcacggaggccatggtagcacgcagccggagaagccatccctgcctcagaagcagagcagcctgaggagcaggaagcttcctgacatgggctgcagtcttcctgagcacagggcacaccaagaagcaagccataggcagttctgtgagtcaaagaatgggcccccttatccccagggagctggccagttagattatgggtccaaagggattccagacacttctgagccagtcagctaccacaactctggagtaaaatatgctgcatccgggcaagaatctttaagactgaaccacaaagaggtaaggctctccaaagagatggagcgaccctgggttaggcagccttctgccccagagaaacactccagagactgctacaaggaggaagaacacctcactcagtcaatcgtcccaccccctaaaccagagaggagtcatagcctcaaactccatcatacccagaacgtggagagggaccccagtgtgctgtaccagtaccaaccacacggcaagcgccagagcagtgtgactgttgtgtcccagtatgataacctggaagattaccactccctgcctcagcaccagcgaggagtctttggagggggcggcatggggacgtatgtgccccctggctttccccatccacagagcaggacctatgctacagcgttgggtcaaggggccttcctgcccgcagagttgtccttgcagcatcctgaaacacagatccatgcagaatgagccctgcgagcaatagagttgaagcagcctctgctggacagtggactgttctatttttttcaataaccaaaaagattaaacaaaaatactataaaacccctgaccacatttaaaaaatgataataaaagtaaacaaatcagcatctttttccccttccctgcttcattaccccctcttccatctatagactttgtcatttttgtctttagaaaagatctgaaggatggtaaagccccgtgctgaaacccagtagagaaacctgtctcaggacacacttgccatctagggctagcttgaaagagcctgaggactgcctttaactgaatttgaattcagcattgtcctttcttcttagtatttgctgcataattgagagcagttcacatcgatttcctggtaggcgtctgcattccctgttgtgttcctgcttctccttcagtagctgcacaacttgcgcagatcgacacactgttgtcacttcattctccccgtctgagaaggatcttgtgttcagttagagtcgtggaaaaatccctgatccttcaaggtcagtcagacagttggcaacattataattaaaaataagaaattaagactttaaattaaacatttggtagagtcatcataaaacaccagaccacttagactcaggctgaaccatactctttctattcttatttttcatccttgttcctcacggttcagtgaacaggctcatatcatgacagaatggacttttaaaagttagtacttaaggaaacttctttaggtggaagaaagtaaagttcttattgtcagtgaactttattagcaccagaaatctctattgatgcttttaatgcattgcctgccttcaggttttcttcttaccccacccctcaataagatttggtgaattgtaattctagtaaaacatgtcataccattggttttcctaaattatcaactttctttcatt

SEQ ID NO: 15698 - protein, 341 aa, Homo sapiens
MEKYRMQSIRRESRARQKVKGPVVSQYDNMTPAVQDDLGGIYVIHLRSKSDPGKTGLLSVAEGKESRHAAKAISPEGEDRFYRRHPEAEMDRAHHHGGHGSTQPEKPSLPQKQSSLRSRKLPDMGCSLPEHRAHQEASHRQFCESKNGPPYPQGAGQLDYGSKGIPDTSEPVSYHNSGVKYAASGQESLRLNHKEVRLSKEMERPWVRQPSAPEKHSRDCYKEEEHLTQSIVPPPKPERSHSLKLHHTQNVERDPSVLYQYQPHGKRQSSVTVVSQYDNLEDYHSLPQHQRGVFGGGGMGTYVPPGFPHPQSRTYATALGQGAFLPAELSLQHPETQIHAE

SEQ ID NO: 15699 - DNA, 2060 bp, Homo sapiens
  CDS (50)..(1606)
gtgacgggtccgcgaggcccagctcgcgcagtcgttcgggtgagcgaagatggcggccgagagggaacctcctccgctgggggacgggaagcccaccgactttgaggatctggaggacggagaggacctgttcaccagcactgtctccaccctagagtcaagtccatcatctccagaaccagctagtcttcctgcagaagatattagtgcaaactccaatggcccaaaacccacagaagttgtattagatgatgacagagaagatctttttgcagaagccacagaagaagtttctttggacagccctgaaagggaacctatcctatcctcggaaccttctcctgcagtcacacctgtcactcctactacactcattgctcctagaattgaatcaaagagtatgtctgctcccgtgatctttgatagatccagggaagagattgaagaagaagcaaatggagacatttttgacatagaaattggtgtatcagatccagaaaaagttggtgatggcatgaatgcctatatggcatatagagtaacaacaaagacatctctttccatgttcagtaagagtgaattttcagtgaaaagaagattcagcgactttcttggtttgcacagcaaattagcaagcaaatatttacatgttggttatattgtgccaccagctccagaaaagagtatagtagggatgaccaaggtcaaagtgggtaaagaagactcatcatccactgagtttgtagaaaaacggagagcagctcttgaaaggtatcttcaaagaacagtaaaacatccaactttactacaggatcctgatttaaggcagttcttggaaagttcagagctgcctagagcagttaatacacaggctctgagtggagcaggaatattgaggatggcgaacaaggctgccgacgctgtcaacaagatgacaatcaagatgaatgaatcggatgcatggtttgaagaaaagcagcagcaatttgagaatctggatcagcaacttaggaaacttcatgtcagtgttgaagccttggtctgtcatagaaaagaactttcagccaacacagctgcctttgctaaaagtgctgccatgttaggtaattctgaggatcatactgctttatctagagctttgtctcagcttgcagaggttgaggagaagatagaccagttacatcaagaacatgcttttgctgacttttatatgttttcagaactacttagtgactacattcgtcttattgctgcagtgaaaggtgtgtttgaccatcgaatgaagtgctggcagaaatgggaagatgctcaaattactttgctcaaaaaacgtgaagctgaagcaaaaatgatggttgctaacaaaccagataaaatacagcaagctaaaaatgaaataagagagtgggaggcgaaagtgcaacaaggggaaagagattttgaacagatatctaaaacgattcgaaaagaagtgggaagatttgagaaagaacgagtgaaggattttaaaaccgttatcatcaagtacttagaatcactagttcaaacacaacaacagctgataaaatactgggaagcattcctacctgaagccaaagccattgcctagcaataagattgttgccgttaagaagaccttggatgttgttccagttatgctggattccacagtgaaatcatttaaaaccatctaaataaaccactatatattttatgaattacatgtggttttatatacacacacacacacacacacacacacacactctgacattttattacaagctgcatgtcctgaccctctttgaattaagtggactgtggcatgacattctgcaatactttgctgaattgaacactattgtgtcttaaatacttgcactaaatagtgcactgcaagaccagaaaattttacaatattttttctttacaatatgttctgtagtatgtttaccctctttatgaagtgaattaccaatgctttgaataatgttcacttatacattcctgtacagaaattacgattttgtgattacagtaataaaatgatattccttgtg

SEQ ID NO: 15700 - protein, 519 aa, Homo sapiens [sequence omitted]

SEQ ID NO: 15701 - DNA, 2568 bp, Homo sapiens
  CDS (129)..(659)
tcgtcagcgccctcgccgccacgctgtgcttctcgcttcagaacattttctccaaaaaggtcttgcgagattcacggatccaccatctccggctgctcaacatcctgggctgccacgccgtcttctttatgatccccacctgggttctggtggacctctcggctttcctggtcagcagcgacttgacctacgtctaccagtggccctggacgctcctgctcctggctgtcagcggcttctgtaactttgcccagaatgttatcgccttcagcatcctcaacctcgttagccccctgagctactcggtcgccaatgccaccaaaagaatcatggtcatcacggtgtccctgatcatgctgcgcaacccagtcaccagcaccaacgtcctgggcatgatgaccgccatcctgggggtcttcctctataacaagaccaagtacgatgcaaaccagcaagccaggaagcacctcctccccgtcaccacagcagacctgagcagcaaggagcgtcaccggagcccactggagaagccccacaacggcctcctcttcccccagcacggggactatcagtacggccgcaacaacatcttaacagaccacttccaatacagccggcagagctacccaaactcgtacagtttgaaccgctatgatgtgtagagtccaaaggacaggaccagactgttggtgactccttccccggcccccacagcagtatcagaaacttctgacaatcagtgaatgtacaacccagccgaggggacggtgcataactctccatcagaagccctggggttcctggccccccgtgagccgcaggaggatgcgttgcctgcagtgcagacggccgtgagctctgggcaaacctaaacagagaccagtgtctcatgctctttcttcctggagtctgtcatctgagggccgtgtccctgcggagatcttggccacgttgtacctttccatgtggaattattccccaagcagtgtagctcagagcacttgtgtctgcattccagataacattcaggacctgtgtgaaaagctggggtcactgtggctgtagaccatgaactggcagtgggggtgtccagggcggtgcttgagaacgtcagactggctagtttaattccctggcgcagatacgcataggaccaacagggtcaccaagcagacagggagcccgcgagaatcattcaaaacatccccagccacagagatggatccagtttcctggtcatccccttagcagttcacaagttcctggcaaatgttccaaagcaaaaagcgattgcaattagcatccagttcctgcagcctggtgctctgccctgcacgtcagggttggcatccacccagatccagatggaagggaaacttctctcttctcctttgcctcctcttccctcaccagagcagggcgcttctcttggggtggtgagaaggatcttcgagaaatcgtgttcagtatttcaagctctatttctgtggcacatgtcttttgagaggcatcttcacctcttctgtgatgacttggtatgttgtttggtagagagatcttgattttcggaggatcttgcatttttctagggaatattttgtagttgtgtgtgtgtgtttttgccttggtccccattatgggatgcattaggactggcctatgcatcgaaaatctttttgtttgtaaacgtttaaaaacaaagttccccggccaggcacagtggctcacacctgtaatcccagcactttgggaggccaagatgggcggatcacgaggtcaggagttcgagaccagcctggccaacatagtgaaaccccatctctactaaaaatacagaaattagccgggcatggtgtcgcgtgcctgtagtcccagctcctcaggctgctgaggcaggcgaattgcttgaacctgggaggcagaagttgtggtgagccgagattgtgcactccagcctgggtaacagagcgagactccatctcaaaaaaaaaaacaaaacaaaaccaagttcccactggtgatgcctgtctgacacgttttggtatttagtaggaaatgaagtgtttcgaagcttcgagagaagcttcaaaattgtcacaattgctgaaaacagaatgaatcgtgaacattatctcaatattttgtataatagacaagaccacagtgttttggttccctgacctgtttttgtgtttatgttaggatctgaatcatgttctgggtaaggggacgaggagcgaacactgcactaagatttggtttgccaaatcagattctttggtcaagagtcagtttggggccaggcgtggtggctcatgcctgtaatctcagcactttgggaggctgaggtgggtggatcactggagtttgagaccaccctggccaacatggtgaaaccccatctctactaaaacaaaaattagccaggcatggtggcacctgcctgtaatcccagctacttgggaggctgaggcaggagaatcacctgagcccaggaggtggaggtttcagcgagctgagatcacaccactgcactccagccttggtgacagagtgagactctgtctc

SEQ ID NO: 15702 - protein, 177 aa, Homo sapiens
MIPTWVLVDLSAFLVSSDLTYVYQWPWTLLLLAVSGFCNFAQNVIAFSILNLVSPLSYSVANATKRIMVITVSLIMLRNPVTSTNVLGMMTAILGVFLYNKTKYDANQQARKHLLPVTTADLSSKERHRSPLEKPHNGLLFPQHGDYQYGRNNILTDHFQYSRQSYPNSYSLNRYDV

SEQ ID NO: 15703 - DNA, 1841 bp, Homo sapiens
acttgaatatctgctatatgctgggttctagagctgcaaaagagaacaagagtagtctttacctttaggattttccagggaactgggggagacagacagatacatacacatacaccccatcctcagtgtgtaggtgccatgacaaatcaaggcttttgatgcagatgctatgctttcacttctcatggtcgatactttttgaatcttaaagtctgattgttcagatatctagaaaaggagatgtctggctttgctctgccctctgactcactgtgttggtttatctttaggcgtggtggagggggccagaactactggctaatgagagaaggcagaccttgttagtgacatgtacaaatgggcacatctgctatattcactttcattactgattattaatagtttattaaatggagtttactgaattactattattttggcttaaaatatatatatataatttatgtagttctatgtttatagatgtgttttcagaggtgtatttgttttagaatttcactctgtcctggaagtgatttttcaaatgtggatattaaaatggataggacataatttcccaactagtacagtatgctagtgccaaccttataccactgttgtagtacccatgaaaaataatttttaaaaagctgtaaaagttcccagtgctttgaggcttcttcaaaattgagaatgatgaaaatttccaaaattatcagttgatgccataattatctctaagagatgttgtaataggaaattcatggttttcctttattttcctgtttctgaacacaaaattcaaaagaaaactctttcttccttgtcactgagactcttggtcagtgtaggctgtgaacttgtactttgtgaagagaagagtactgtgaggaagcttgaaaatactgtaggtttttgttggcatcttcttctggatggtattcatgtactctgcacgccactgaaaatatgctctgtttttcataaaatatgctcattcttttatactgagcactcggaaattggttttcccaaaccatcttagtggagaatggcctgcttttatcagttatgtgaagaagtaaattccaggctcctcagctgcaggatggctccttgttcacagctgctgctcttgcctctgtggaagacgcctgctgctaagagaatctttgtgtgttgtgtataaaatgaactttgtttggaccattccacaagcagcttaaactgcttaggagtccagccagacattcctccccagttgatcatttaaatggaggtcagatttagaacccaacttatattcgtttaaaaatagacattgcctttagaaaactgacctttggtacatttggggcctagggatctgataggctatctcttatgatgcacatcgctctgttttagactctgaaaggcagtatgcctttgaagctagataacgtcagtgtgcttgtaacttgggacccagtctgtgtgctatatgtctgcttcttcagtccacactcattacttccaggaaattcgtgagaagatgagagattattcgttatagaattgagtatggtttctctacactaattttattggatattttccagtttgactaggaaaggttagagaacatggaaagaaaatttaacaggttaattttaaggtaataagaccattgtattgatatattcttcagtgtgatttaggtgagtcaggaatttttcctctggagactgcataaatcagggatgtccaatcttttggcttccctgggccatactggaagaataagaattgtctcaggccacgcataaagtacactaacactaatgatagctgattagctt

SEQ ID NO: 15704 - DNA, 2252 bp, Homo sapiens
  CDS (88)..(1170)
agtgcctgccgcccacggccgcaggagtcgggcttcggtcgcaccagagacagcggactttcctccgatggttgcagcagagggatcatgacggggaaaaagtcctcccgggagaaacggcgcaaacgtagcagtcaggaggcggctgcagcgctcgcggccccggacatcgtacccgcgttggccggcggcagcagtggaagcactagcggctgcgggagcgccgggggctgcgggagcgtcagctgctgtgggaacgccaattttagtggaagtgtcaccggcggtgggagcggcggcagctgttggggcgggagcagcgtggagcgcagcgagcgccggaagcggaggagtaccgactcttccagcgtctcgggctccttgcagcaggaaactaaatatattttgccaactttggaaaaagaattattcttggcagagcacagtgaccttgaagaaggtggactggacctgactgtgtcattgaaaccagttagtttctatatatcagacaaaaaagaaatgcttcagcagtgcttctgtattataggagagaaaaagttacagaagatgcttcctgatgtgttaaagaactgttcaatagaagaaattaaaaaactatgccaggaacagttagagctcctgtctgaaaaaaaaattttgaagattcttgagggtgacaatggaatggactctgatatggaagaggaagcagatgatggttctaagatgggatctgatttagtcagtcagcaagacatctgtatagattctgcttcatccgtgagagagaataagcaacctgaaggtttggaattaaaacaaggaaaaggggaagatagtgatgtactcagtataaatgcagatgcttatgacagcgacatagaaggcccatgcaacgaagaagcagctgctcccgaggcaccagaaaatacagtccaaagtgaagctggtcagatagatgacctggagaaagacattgagaaaagtgtgaatgagattctaggactggcagagtctagcccaaacgaacccaaagcagccaccctggctgttcctccaccagaagatgttcaaccttctgcacagcaactggagctgctagaacttgagatgagggcaagagcgattaaagccctaatgaaagctggtgatataaaaaagccagcctaggtatttaacttgattttgaattttaggtatgtttgaacaaagccacatcatttaattttgtatctaaaatttatttggggtcttatatgttatttctcatgtaacccttattaggactcattttagccctaaattacctgtggctgtttctttttatttttttgactacttttatattataaatgtgtgttactgtcttatgaattcatggcaatatagttggatagcctggatactttgttagatgagtatttagctgtgtctgcaaatcttaaaagccattagcaaagagtcgtggtatttttttctttatttttaaatgtttgggcaccaaacctaaaagcaaaagattgacgaagcatgtttctcttaaggctacttgtattttacaatacaatattaaattatttaatttgagaaatttagttttgcttatatgcactttttaaatatatactattttgaagattccttatgtaaatgcaaatttcctagttaaaaccgaataacagagatctgaaatgactgagaaaaacttttttattaaaggaaggaattaatttaaggcaatttttaactatgtagaactaattgcccatgtttaattatagcagacacgccattctaacaggtatttgataccattggatgcattattctaggttttttctttaataaaaatggaacaagttttcatttacattccaagctgtcaggaaatgaagaatattttattatctaggattttatctgatgtagttgcttaaagatctgatgtgctataattccatgaatcagaaataataaaatgctatcattctggatctgaagacttttgatactttttcaaaagcaaaattaatttcaggaacctttgataagttgttgttataattaatctaattttgtatagtttttgtaaataaattaccatccttccacaattagggatgcttttatccccccatcactaattgcagttgtttgataccaaaataaatttacgtagagatccttaacttaaaataaattaattttttcaaaaaaaaaaaaaaaaaaaaaaaaaaaaaaaaaaaaag

SEQ ID NO: 15705 - protein, 361 aa, Homo sapiens
MTGKKSSREKRRKRSSQEAAAALAAPDIVPALAGGSSGSTSGCGSAGGCGSVSCCGNANFSGSVTGGGSGGSCWGGSSVERSERRKRRSTDSSSVSGSLQQETKYILPTLEKELFLAEHSDLEEGGLDLTVSLKPVSFYISDKKEMLQQCFCIIGEKKLQKMLPDVLKNCSIEEIKKLCQEQLELLSEKKILKILEGDNGMDSDMEEEADDGSKMGSDLVSQQDICIDSASSVRENKQPEGLELKQGKGEDSDVLSINADAYDSDIEGPCNEEAAAPEAPENTVQSEAGQIDDLEKDIEKSVNEILGLAESSPNEPKAATLAVPPPEDVQPSAQQLELLELEMRARAIKALMKAGDIKKPA

SEQ ID NO: 15706 - DNA, 1839 bp, Homo sapiens
tcagctcttgaatcagaattttcaaagactcacctctcttacctgggcttgcacatatttgtcctaagtaattctctatcccttaaacctctgagtccctctgttttattacttgccccactcctcctacttgaatatgtttgttttcccagttgaatgtgatttttatctactgttcatattatcttttatacccatgagtataatttcatagtcctttcaggttccacatcatcaaagagatgaccataatttcactttttttgaaatgaagtcttgctctgttgcccaggctggagtgcagtggcacaatctcagctcactacaacctccgcctcccaggttcaagcgattctgccttagcctcccaagtagctggaattacaggtgcctgccaccatgtctggctaatttttgtgtttttagtagagatggggtttcaccatgttggccaggctggtcttgaactcgtgaccttaggtgatccacccacctcaacctcccaaagtgctaggattacaagagtgagccaccgcacctggccaattcacttttaaatactaaaaggcacacagcacacagacattttcggggcagttttctttgggagggtctttgataaattttgtaatcacctctcggaagaaagcccaaaatgacatgtgaaaataatattaaaccatttaccagatgtccagcaatataaaaatagacctcacatgctacccttcacatgctgattctcttgccttgctgtttaaggatccagtttcttatgttaaacattttccttaccttttgcaataatattattggccatatactaaattctcattcacttagctttctaagaattctttgaggttggaatcctgaaatcataaagctaccagatctgcacaacagcagtggtagtatctgagcccaaactctgagacgctctagagttttagtttacaaacatgagccagaccaaacctgacctggtgaaaatcaataggtaataaactgcttgtatatgatagcagttcaagggctttctgggttccatttcactgaggaaatgaaaatataactgattagccaagacagagtggcaataaggaataactgatcctcctccaagttgcagtgagcaagccctcaagcctacctcattcctgaagagttgaaggagaaaatgccgtgctaattttctgccctgctatttttaacctgaaatttagaattacatcaggtattcaaagaatgttccctatcaaaggaaaatctgtaaacgatgactgcaaaaagcaagtgaaatgatgcaaagagaaaatatttgcaaaacagaatctaaccagacatcatcatgaagataaaatggcatctcttctgtgtggcctgggtgtgcttggacaatcctgtcacacgtttctattaggacatgttgcccttttgaggattcactctatgttggccagatggtttaactgattaaacaattgaatcaatttattttgctttttgaattgaccagatatttaactaaatgtactgggtttggcattttagacacactgccttagattcttgtagtgcatgatgactttgaaaatgtttggccattttagttaaaatgcagggtaacatttgatgcagccatgataacaggaaaaatctgttctgttctaaaaatgtttctagcaatagaagtatttctggctaagagaatactcttgacttgtagggaggctccctcggaataaatgtatgcaacacaaataaggcattttattttttaaaagattgtctatataagatacacttattaaataaagaaattgttggtgaatgctc

SEQ ID NO: 15707 - DNA, 2298 bp, Homo sapiens
  CDS (162)..(1253)
tttttggcggggcctttgtccctcgctgtggcctgagctccaggtctcgtcttcagcgctctgtgtcctctgctcctagaggtccaggctctgtggccctgtgacctgcaggtattgggagatctacagctaagacgccaggaacccctggaagcctagaaatggagaacctgaagtctggagtgtatcctctcaaggaagcaagtggatgccctggggctgacaggaatcttctggtgtactctttttatgaaaaggggccattgacatttagggatgtggccatagaattttctctggaggagtggcaatgcctggacactgctcagcaggatttgtatagaaaagtgatgttagagaactacagaaacctggtcttcttggcaggtattgctgtttctaagccagacctgatcacctgtctagagcaaggaaaagagccctggaatatgaagagacatgcgatggtagatcaacccccagttacatattctcattttgcccaagacctttggccagagcagggcataaaagattctttccaagaagtcatattgagaagatatggaaaatgtggacatgaagatttacagttaagaacaggctgtagaagtgtggatgagtgtaatctgcacaaagaatgttatgatgaactaaaccagtgtttgacaactacccagagtgaaatatttcaatatgataaatatgtgaatgtcttttataaattttcaaatccaaatatacaaaagataagacatactggaaagaagcctttcaaatgtaaaaaatgtgacaaatcgttttgcatgcttttacacctaactcaacataaaagaattcatattagggaaaattcttaccaatgtgaagaatgtggtaaagtctttaactggttctcaacccttactagacacagaagaattcatactggagagaaaccctacaaatgtgaacaatgtggcaaagcttttaagcagtcctcaacccttactacacataagataattcatactggagagaaaccctacagatgtgaaaatgtggcaaaacctttaaccggtcctcacaccttactacacataaaagaattcatactggagagaaaccctacagatgtgaagaatgtggcagagcttttaaccggtcctcacaccttactacacataagattattcatactggagagaaaccctacaaatgtgaagaatgtggcaaagcttttaaccaatcctcaacccttactacacataagataattcatgctggagagaaaccttacaaatgtgaagaatgtggcaaagctttttaccgattctcataccttactaaacataagataattcatactggagagaaattctacaaatgtgaagaatgtggcaaaggctttaattggtcctcgacccttactaaacataaaagaattcatactggagagaaaccctacaaatgtgaacaatgtggcaaagcttttaatgagtcctcaaaccttactgcacataagataattcatactggagagaaaccctacaaatgtgaagaatgtggcaaagcctttaaccggtccccaaaacttactgcacataaggtaattcattctggagagaaaccctacaaatgtgaagaatgtggcaaagcttttaaccaattctcaaaccttactaaacataagataactcatattggagatacatcttacaaatacctagaatgtgataaagcctttagccagtcttcaactcttactaaacataaggtaattcatactggagagaaaccctacaactgtgaagaatacggcaaagctttcaaccagtcctcaaaccttattgaacaaagtaattcatactggagagaaaccctacaaatgtgaagattgtggcaaagcctctaacccgtcctgaattcttactaaacataagaacattcatactgaagaggaaccctatgagtgtgaagaatatggcaaagccttcaacaagtcctcaattcttaccagacataagataattctggctgggtgcggtggctcacacctgtaatcccagcactttgggaggctgagacgggtgaattacatgaggttgggagttcgagaccagcctgaccaacatggtgaaatcctgtctctactaaaaatacaaaattagccatgcgtagtggtgcatgcctgtaatcccagctactcgggaggctgaggcaggagaattgcttgaacccgggaggcagaggttgaagtgagctgagatcgcgccattgcactccagcctgggcaacaagagtggcactccatctcag

SEQ ID NO: 15708 - protein, 364 aa, Homo sapiens
MENLKSGVYPLKEASGCPGADRNLLVYSFYEKGPLTFRDVAIEFSLEEWQCLDTAQQDLYRKVMLENYRNLVFLAGIAVSKPDLITCLEQGKEPWNMKRHAMVDQPPVTYSHFAQDLWPEQGIKDSFQEVILRRYGKCGHEDLQLRTGCRSVDECNLHKECYDELNQCLTTTQSEIFQYDKYVNVFYKFSNPNIQKIRHTGKKPFKCKKCDKSFCMLLHLTQHKRIHIRENSYQCEECGKVFNWFSTLTRHRRIHTGEKPYKCEQCGKAFKQSSTLTTHKIIHTGEKPYRCENVAKPLTGPHTLLHIKEFILERNPTDVKNVAELLTGPHTLLHIRLFILERNPTNVKNVAKLLTNPQPLLHIR

SEQ ID NO: 15709 - DNA, 1848 bp, Homo sapiens
  CDS (58)..(1575)
cttgttggcctactgggcgggccacagtctccagcctgaagcggaagtggaggaaagatggaggaccatcagcacgtgcccatcgacatccagaccagcaagctgctcgattggctggtggacagaaggcactgcagcctgaaatggcagagtctggtgctgacgatccgcgagaagatcaatgctgccatccaggacatgccagagagcgaagagatcgcccagctgctgtctgggtcctacattcactactttcactgcctaagaatcctggaccttctcaaaggcacagaggcctccacgaagaatatttttggccgatactcttcacagcggatgaaggattggcaggagattatagctctgtatgagaaggacaacacctacttagtggaactctctagcctcctggttcggaatgtcaactatgagatcccctcactgaagaagcagattgccaagtgccagcagctgcagcaagaatacagccgcaaggaggaggagtgccaggcaggggctgccgagatgcgggagcagttctaccactcctgcaagcagtatggcatcacgggcgaaaatgtccgaggagaactgctggccctggtgaaggacctgccgagtcagctggctgagattggggcagcggctcagcagtccctgggggaagccattgacgtgtaccaggcgtctgtggggtttgtgtgtgagagccccacagagcaggtgttgccaatgctgcggttcgtgcagaagcggggaaactcaacggtgtacgagtggaggacagggacagagccctctgtggtggaacgaccccacctcgaggagcttcctgagcaggtggcagaagatgcgattgactggggcgactttggggtagaggcagtgtctgaggggactgactctggcatctctgccgaggctgctggaatcgactggggcatcttcccggaatcagattcaaaggatcctggaggtgatgggatagactggggagacgatgctgttgctttgcagatcacagtgctggaagcaggaacccaggctccagaaggtgttgccaggggcccagatgccctgacactgcttgaatacactgagacccggaatcagttccttgatgagctcatggagcttgagatcttcttagcccagagagcagtggagttgagtgaggaggcagatgtcctgtctgtgagccagttccagctggctccagccatcctgcagggccagaccaaagagaagatggttaccatggtgtcagtgctggaggatctgattggcaagcttaccagtcttcagctgcaacacctgtttatgatcctggcctcaccaaggtatgtggaccgagtgactgaattcctccagcaaaagctgaagcagtcccagctgctggctttgaagaaagagctgatggtgcagaagcagcaggaggcacttgaggagcaggcggctctggagcctaagctggacctgctactggagaagaccaaggagctgcagaagctgattgaagctgacatctccaagaggtacagcgggcgccctgtgaacctgatgggaacctctctgtgacaccctccgtgttcttgcctgcccatcttctccgcttttgggatgaagatgatagccagggctgttgttttggggcccttcaaggcaaaagaccaggctgactggaagatggaaagccacaggaaggaagcggcacctgatggtgatcttggcactctccatgttctctacaagaagctgtggtgattggccctgtggtctaccaggcgaaaaccacagattctccttctagttagtatagcggacttaataaaagaggaaaaaactctt

SEQ ID NO: 15710 - protein, 506 aa, Homo sapiens
MEDHQHVPIDIQTSKLLDWLVDRRHCSLKWQSLVLTIREKINAAIQDMPESEEIAQLLSGSYIHYFHCLRILDLLKGTEASTKNIFGRYSSQRMKDWQEIIALYEKDNTYLVELSSLLVRNVNYEIPSLKKQIAKCQQLQQEYSRKEEECQAGAAEMREQFYHSCKQYGITGENVRGELLALVKDLPSQLAEIGAAAQQSLGEAIDVYQASVGFVCESPTEQVLPMLRFVQKRGNSTVYEWRTGTEPSVVERPHLEELPEQVAEDAIDWGDFGVEAVSEGTDSGISAEAAGIDWGIFPESDSKDPGGDGIDWGDDAVALQITVLEAGTQAPEGVARGPDALTLLEYTETRNQFLDELMELEIFLAQRAVELSEEADVLSVSQFQLAPAILQGQTKEKMVTMVSVLEDLIGKLTSLQLQHLFMILASPRYVDRVTEFLQQKLKQSQLLALKKELMVQKQQEALEEQAALEPKLDLLLEKTKELQKLIEADISKRYSGRPVNLMGTSL

SEQ ID NO: 15711 - DNA, 1826 bp, Homo sapiens
  CDS (892)..(1770)
agaatcgaaactgagagctcctgggcaggctcggcagggcgggcagctccaggagggcttcgaaccgtggccaacagttccagtggactgcgtggacccgtgagctcaggagcctcagacgcctccctggagagccaagctggtgttcgaggtggcgcctccagggtccaccctgctgcccaacagccccgcggccaccagagggccgtccctggcccggctgtgtgccctggtggacctgtgtctgggctgctcccgctgcacccagcggctcaatgaaagcacctacgtcctccgtagggtggagcatgactgctcccgcgagatcctgctggcccgctttaagcaggccaccaagagcaaggtctggcgcgtggtgggctgccggcccaccttcccaaggcccctgtgctaccaagtctgccactactacagccctgggctcggctgccggcgccaccgaaaccggtgcacctttgcccgcagtcgcgaggaggccctggtctggaccttcgagcgtcagcacaacctccagcgcctatggctgaaggcggaggtgcagggcagcggggcccagggaggggcaggccgggcggccgacgccatccttacggagtttggcggccgcttcgagctgctttgctccctctgcttcaggcgctgtcccccacgcatctgtcacgtggacccccaggggcagtgccctgagcacggagcctgcccctccctcctggcccacgtgagcgccgagggccgccgcaagcaacagtttgtggtggtgaggccgcggccccgggccggcagcctcctgcctactgcaggtttgtggggcgtgggcagccgtgctggcgtggggagtcccgctgccagtttgcacacagtgccgtggagatggctgtgtgggaggccgagcagctgggtggcctccagcggggggacctgctcacaccccctgcccctgatggcgacgggcgcacggccccccttggccagccccctggggcccagctgtactgcccggcctgcttggtcacctgccactctcaggaggccttcgagaaccactgcgcatcctcggagcacgcacagatggtggccttcgaccaggccctgccctgggagcaccgttccccacccccgggactctccaagttcgagctctgcccaaagcctgacctctgtgagtatggggacgcctgcaccaaggcacactcagcacaggagctgcaggagtgggtccggcgcacgcaggctgtggagctgcgggggcaggcggcctggcaggacgggctggtgccctaccaggagcggctgctggccgagtaccagcgcagcagcagtgaggtccttgtgctggcagagacccttgatggagtgcgtgtcacctgcaaccagcccctgatgtaccaggcccaggagaggaagacccagtacagctggacgtttgccgtccactctgaggtgagcggagaacagctccgactgggcggagggagccctggggaagtggtgacttcagcccgggcagacgtcaacagcctgggtcatggagctaataccgaggcactgccgctcagcacctgcgtgacctgcagcaggtcccttagcctctctgcctcagtctcctcacctagagacagggggccaggacagtcccaccttggcagggttattctatggagtatatgggttaaaacaaggatttggccaggtgcggtggttcacgcctgtaatcccagcactttgggagaccgaggcaggtggatcacctgaggtcgggagttcgagatcagcctggccaatagggtgaaactccgtctctactg

SEQ ID NO: 15712 - protein, 293 aa, Homo sapiens
MAVWEAEQLGGLQRGDLLTPPAPDGDGRTAPLGQPPGAQLYCPACLVTCHSQEAFENHCASSEHAQMVAFDQALPWEHRSPPPGLSKFELCPKPDLCEYGDACTKAHSAQELQEWVRRTQAVELRGQAAWQDGLVPYQERLLAEYQRSSSEVLVLAETLDGVRVTCNQPLMYQAQERKTQYSWTFAVHSEVSGEQLRLGGGSPGEVVTSARADVNSLGHGANTEALPLSTCVTCSRSLSLSASVSSPRDRGPGQSHLGRVILWSIWVKTRIWPGAVVHACNPSTLGDRGRWIT

SEQ ID NO: 15713 - DNA, 2034 bp, Homo sapiens
  CDS (333)..(1955)
atcacgctgaggtccgcgcgcccccggagtctggggagcagggctccgccaatccgaggggagggcgaaggaagtaccatttatttagcgctgtgtgtgtgctcttatttccactggccttacaagaccgtgcactgtgtagatgaggaaactgagtcataataaatatgtgctgaaccgttcgggggtcacacggtgctgaaatggtttcgagtcaactcgctcggacggcactcggcctcagcctccggccctggaaccctctccagggacgggaccagcccttgttctgttccctaccggtaccacaggaatcttgacgaacggcccaaatgcctggccgctgtcagagtgacgccgcgatgagagtaaacgggccagcatcccgtgcaccagcggggtggaccagcgggagtctgcacacaggcccccgagcaggacgccctcgtgcgcaggcgcggggtgtacgtgggcggggcctcctcctccggccccgcccagcgaaggagcttcctcttccgaggaaaggcggggcctgggcgcccgcgggaaacccgggcccgttgcatccgctgggtgtagccgtggggatggcaggttcggggaggctggtcctacggccctggattcgggagctgattctggggtcagagacaccctccagtccacgagccgggcagctgcttgaggacgccgaggccgcggtcgcgggcccatcccacgcccctgatacgtccgacgtcggggccacgctgcttgtgtctgacgggacccacagtgtccgatgcctggtgacgcgggaggccctggacacctcggactgggaggagaaggagttcggcttccgcgggacagagggccggctgctgctgctgcaggactgcggggttcatgtccaggtcgctgagggcggcgcgcccgcagagttctatctccaggtggaccgcttcagcctgctgcccacggagcagccccggctacgggtgcctggtcgcaaccaagacttagatgttcagaaaaagctctatgactgccttgaggagcacctttcagagtccacctcgtccaatgcaggcctatcactgtcccagcttctggatgaaatgcgggaggaccaggagcatcagggggcactcgtgtgcctggctgaaagctgcctgacactggagggcccttgcacagcaccccctgtcacccactgggctgcctcacgatgcaaggccacgggagaagctgtgtacactgtccccagctcaatgctgtgcatctctgagaatgaccagctaattctgagctctctaggcccctgtcagaggacacagggccctgagctgcccccaccagacccggctctgcaggacctatctctgaccctcatagcctctcctccttcctcacccagttcctcaggaaccccggccttacccggccacatgtcatccgaggaaagtggtaccagcatcagccttctgcctgccctgtccttggctgctccagacccagggcagagaagcagctcccagccctcaccagccatctgctcagcccctgccaccctgacccccaggtccccacacgccagccgtacccccagctccccactccagagctgcactcccagtctctcaccccgtagccatgtccccagtccacaccaggctcttgtgaccaggccccagaaacctagcctggagttcaaggagtttgtagggttgccctgcaagaatcggccgccttttcccaggaccggagctaccaggggagcccaggagccctgctctgtctgggaacccccaaagaggcatcgtgatggttctgccttccagtatgagtatgagccaccctgcacgtccctctgtgctcgggtccaagctgtcaggcttcctccccagctcatggcctgggccttgcactttctgatggatgcacagccagggtctgagccaactccgatgtgagacgtcacgcaggacagataccgctccacactctgcttcctttgagttttttaataaaataatctcatgcggcagg

SEQ ID NO: 15714 - protein, 541 aa, Homo sapiens
MPGRCQSDAAMRVNGPASRAPAGWTSGSLHTGPRAGRPRAQARGVRGRGLLLRPRPAKELPLPRKGGAWAPAGNPGPLHPLGVAVGMAGSGRLVLRPWIRELILGSETPSSPRAGQLLEDAEAAVAGPSHAPDTSDVGATLLVSDGTHSVRCLVTREALDTSDWEEKEFGFRGTEGRLLLLQDCGVHVQVAEGGAPAEFYLQVDRFSLLPTEQPRLRVPGRNQDLDVQKKLYDCLEEHLSESTSSNAGLSLSQLLDEMREDQEHQGALVCLAESCLTLEGPCTAPPVTHWAASRCKATGEAVYTVPSSMLCISENDQLILSSLGPCQRTQGPELPPPDPALQDLSLTLIASPPSSPSSSGTPALPGHMSSEESGTSISLLPALSLAAPDPGQRSSSQPSPAICSAPATLTPRSPHASRTPSSPLQSCTPSLSPRSHVPSPHQALVTRPQKPSLEFKEFVGLPCKNRPPFPRTGATRGAQEPCSVWEPPKRHRDGSAFQYEYEPPCTSLCARVQAVRLPPQLMAWALHFLMDAQPGSEPTPM

SEQ ID NO: 15715 - DNA, 2082 bp, Homo sapiens
  CDS (2)..(1537)
gatggagtggcagcctgaggagcaagcctggcactcctacatcaactttgagctgagatacaaagaggtggatcgggcccgcaccatttatgagcgatttgtcctcgtgcaccctgatgttaagaactggatcaagtatgcccgctttgaagaaaaacatgcttattttgcccatgcacggaaagtgtatgagagagctgtggaattctttggagatgaacatatggatgagcacctttatgttgcctttgccaagtttgaagaaaatcagaaagagtttgaaagggtacgagtgatttacaagtatgccctggacagaatttcaaaacaagatgcccaagaactctttaaaaattataccatctttgagaagaagtttggtgataggcggggtattgaagatatcattgtgagcaaacggagattccagtacgaagaagaagtgaaggcgaatccacacaattatgatgcatggtttgattacttgcgcttggtagaaagtgacgcagaagctgaagccgtgagagaagcctatgaaagggccattgccaatgtcccacccattcaggagaagaggcactggaagcgctacatttatctttggatcaactatgcactctatgaagaattggaggcaaaggatcctgagaggacaagacaggtgtatcaagcctctttggaactaattcctcacaaaaagttcacatttgccaaaatgtggatactgtatgcacagtttgaaatacgacagaagaatctgtcattagccagaagagcattgggaacttccataggcaaatgtccaaagaacaaattatttaaagtttacatagaattggagctacagcttcgagaatttgacagatgccggaagctttatgaaaagttcctggaatttggacctgaaaattgtacctcatggattaaattcgctgaattagagacaatccttggtgatattgacagagcacgggcaatctatgaattagccatcagtcagccacgtttagacatgccagaggtgctttggaaatcatatattgattttgaaattgagcaggaagaaacagaaagaacacgaaacctttaccggcggttgcttcaacggacgcagcatgtcaaggtatggatcagctttgctcagtttgagttgtcttcaggaaaagaaggaagtttgactaaatgcagacaaatttatgaagaagctaacaaaaccatgcgaaactgtgaagaaaaggaagagagacttatgctgctggaatcttggcgaagttttgaagaagaatttggaacagcttcagataaggagagagtagacaaactcatgccagagaaagtcaagaagagaagaaaggtccagactgatgatgggtctgatgcaggctgggaagaatactttgattacatctttccagaagatgctgccaaccaacctaacctcaaactcctggccatggccaaactgtggaagaaacagcagcaggaaaaggaggatgctgagcaccatccagatgaggacgtcgatgagagtgaatcctgatctttttttcatagacaaatgttttgttatttttataaattaattgtttggaactcttgtgactcctggaagttcttatatatttcaccagtaagaaattgattggtatctttgatggctactttttaagttattttttaaatgctcttgggttagctaggggtagggattgcaagtaaaggacttttttaactgctggatttgtttttccaactgagtccaaacttttctaatgtctgtccacatcatgcattaggaaatgtaattaaggtaacattctacagttacttttcatgtcatacccataaagatagtttatgcattcatctgaaatgtgtaactttttcatgtcttcagagtcacagacttgagttcatttcccagctctgccactcatgattatataacttaattttcattttcctcattcacaaaatgggccaatagtttgacagctcattttgaagattacattataaaaggaatatacctgatgggtgcatagtaagtgctcagtaaattgtttgttctaagccactttt

SEQ ID NO: 15716 - protein, 512 aa, Homo sapiens [sequence omitted]

SEQ ID NO: 15717 - DNA, 2356 bp, Homo sapiens
caaattgatgctgaggggtgacaaaggtgctcttgcattggtggagaggggctcagtaggcctaaatgttgctccaagatctaagattttatcattcaacagacagactcatgtgagagggctcatcagtctctgtaaatattggttgcagaatttaggggcagaagcaatggcttgtgagtgagcaagttactcttaacataggttgccctacacagtggctcctgcagtgtgatcagcaggagtctctgtcctacaaatctacacttttaaggatgtatgaaattgtggaattcattccctcaggatctgaagatctcagttctcaaaaatcacaagttgcaagaatatgatacctaaaattgaaagtttttcacatgttttcactgtatactgaaaatactcccctggaagcagggctgcatcataatttttgtgggctttatgtacttttgcctttgcgaaccatttcctacattcaaaatagtagtaacaaatatatatatatatatacacacacacacacagaaatatatatttataactgcattgataaaaggtgaatatattagcattttcttcaacctaaaagtttatgtattttcttctgattttaaaagaaattaaaaacattttagtgggcccttacaagtattatggtccttaggcacagtgcttactaggccgtgggtatgtcttagtgcgtttgggctactataacaaaatatcatagataggtggcttatacaaaatagaaatttatttctcacagttctggaggctgggaagtccgaggtcaggctgccagcatgctcaggttctggtgagagcaattttccaggttgcaaactgcttgctgacttctcagtgtccttccatggtggaaagtgcaaataagctcccttgagcatttttataaggcactaatcccattcctggaggctccaccttcatgacccaattacttctcaaggctctgcttcttagtactatcagcttgggggttaagatttcaacatatgaaattgggggagacacaaacattcagactatagtagggtaaattgaccttggctaaaggtctggggacactgtccaaagcagtactggcataaaactgcattgcagtcttacatttatcagaaataatgcaaatcttgcattctacaatgtactatatccatgttagtatgtacatatatatgtgtatgtatatatgtacataaattctccttaaatctctgagaagaattgtgctttaaaaaagaactatgttttgtgctgtggctcataccttacagtggtagtctatgtctcttagtttgagaaagctgaatattaacttcttattaacatgaaacatgatggcaaactgaatcctacaagtataggacccagaacatatctatgttattgtcatttacaagaagaaatatgtatttggtctttcttcctattcctggtgcagagctcctaaaacctttgggacctcccaagtgatgtgtctggtagtacgcgaatgagatgactgatagttaggggcttctgaatggcctcagaatagggtctggttgccacgggaaccaaccatgtgtttagagggttggaactttcagccccactcccagaccttggggaaggaagaggggctgaaggttgagtcgatcacaaatggataatgatttaatcaatcatgcctaagaataaagcttcccataaaaatctaaaggacaaggttcagagagcttctgcattgctcaatacatgaggagtggtgagcccaaaggggccgtggaagctccgtgccccttcccccaaacctgttcctgtgcctccatctggctgtttctgagttatattattttataatagactgatgatagtaaataaagccctttcctgagttctgtgagctactctagcaaatggtgaaatctgagaaggaaatcatgggaacctctgctttgtagccacgtcagatagaagatgtgagtaactttggaacctactgcttgtgactggtgtctgaagttgggggagatcttatgggactgagctcttaacctgctggggatctgcacttaatgccgattaatgccagaattgaattgtatgatatccagttggtattggagaattggccagtgtgggagaaaacccacacagttggtggcaaggagtgttcagtgttgagtgtgaatgtcaataaaaaaaggtttgttttttctacgtacaatatctttgggaacttggaggtgcagggtcagacgtctgtgtgtgtatgtggcagggacagaacagggattagggatgtgagggggtagagttttcagaataaagggagagaaaattcagc

SEQ ID NO: 15718 - DNA, 1791 bp, Homo sapiens
ttttttttatcctatttgattatcttgagggcttgattttggtataaggtggattcaactgactagcttcatttctggaagattttagagggccaacattcagctcccaactcctgcactgtgtactctaactctgggggacttctattgggccccagctttgttctttggctccccaaggttaggaatccactgcggtgaaggggcctgaggtgtggcagctgtggcagagtgctagcaggtgtcggggtgcctgcctccatgtgggtgttcaccacagtggcagaaacaatgcagctgttgggggagctcctgctggcaactatatgtatggttgtgctggacatggtgttggcttgggggtggggtgctggcagatgcaggcctgggtgccttctctgtgccccataagcaggagtgattggtcagcatgggggaggactgttgttctctgcaaaaatgtttaaaaaagaaattgtttcaaaaatctatataaagctttggattctgtaaatccaaaattcattactggtttattactttactggccagggattatggcaccagaagagagatctgtggttctgacaataagccatgaatgtggtttgcccagtacatggtttagctttgtttctgtatcagacacgctagtttaatttacaaatggagttttgatatactcaggactgtgaataagtattggggggtggtgtctggtgaaaggcagacaaaccacagtagctcatttccttttgttgatccgagcacaaagcattgttgttgcatcttagaaattaaaatcctcatttacagaatagtgtggtgcaatctggaaagatgttgttgtggtctctcaggagtgaataatatgagtttttaaacattctccaagaaaaatttacatgatttcaaacattctaaagcataaggatgtacagtatttcttacagtagaggaaactgccaaatattttggaaaaatataagaaaggaactgtacattggtaagaatgcattttcaaagactatttattttgtttgtttttaactgaacagttattcattgagaggggtgtgtgtgtgtgtgtgtgtgctgaagatagtattatcccaaataatcatattatatagaggctacaactcagtcttgcaaactgctcttacttgcaactgacagctacctcccacaccctcttggcatttctctagtgaagctattgatgtaattattgcttttagggttctgtattaaatttaaaaaacaacttcttttaattttgtgcttaatacagaaatcctaaaaaatcatagaaaaacacaaaggaaaaaaatccagcattaaccactaactaagtggataactaagatcagagaagcaactaaaacaagtaactaataactaagatcagggaagaattgatggtgatagagacgtgaaaaatcctccaaaaaaatcaatgaatccaggagctgttttttttttgaaaaaattaacgaatagatagaccattagctagactaataaggaagaagagggagaagaatcaaatagacacaataaaaaatgataaaggggatatcaccactgaccccacagaaatacaaactgccatcagagaatactataaacaactcgatgcaaataaactagaaaatttagaagaaatggataaattcctggacacatacaccctaccaagactaaaccaggaaaaagccgaatccctgaatagaccaataacaagctctgaaattgaggcagtaattaatagcctaccaaaacaacaac

SEQ ID NO: 15719 - DNA, 2103 bp, Homo sapiens
gaggcaaatggcattgtataatatgtctgtacaaaaaacaaacaaaaaaccaaacaagggcaaatagaaccctttggattggtattgtactatctgtttctgaagacccagaaacagaaaacaaacttttccccagacttactgtttccttgagaatcctttttctttgttcttcatactttaacttccataaggagctggctcctctgcctataaataagagcttagagaaatacttcaaaaagctacctgcagttagctaaatattaccaagtctgcctggtacatgtttcattatatttccttgcctcagtttgttatctagatttaatttacactccatgtgatatagctgttaaattagaaatgagattctttcttctgctttagcaaaattcagtgacaatttttagctccatttccaatttttacatatgtgcgatcacttggttcatactgataactgaactgactcagtctcatatttatcaggtcagataactgtgcttaaccgtgcatagtgggccagtcatcatttatgtgtcatcttctttatttgctttgtgaacactcaccacagcacctatttttctctggtattttttatactaattttcttgttagaatagtttccttaatgtacagaaattgaactagataattacagttgttctaaatatatttttctggacatttaaagaaatcattctaacaccagagattaatgttacctgttttagtattttatacaaattgattcctacagtgtaagctgtattgtactgtatacttcaattcatatgataaagaaatacaatgggctgtaacaatacactaaaaacaggaatgagtgaggggttaagttcacttggagtattacacctatcctttgcatctactgttttctgtgaaattttacagcagtgatgcccttccatataggttcttccatataaaatgtgatcatattttgggaaaaaatacaagaacattttaaggtaatttttgatttatagatctatatgatgataagtagatgccaagaggggtaggaattagaaatggaaagaagtaaaccataatgttaaatattttcaaaggatacttgtttttcatacaggaaaaaaattaggatttttaaacacctctccttccctcttgtttcaacttaaaaatgctatacagataaattcctcttgttttgtggaaatacagaataaatgtgaaagaaatacaaatcactttatcgtatgcctatacttcatgtagaacagctatagctgagttctcccacacagtctactttgatggcagaaatggagacacacagggtacccttatagtcacggcaacttttgtgttgtctttttacacaaagttggaagtattagcaagtgaattgctgaaatgtcattactaccaggactgctttgatgataaggttgaattggaaaagttaattttaataagccatgtacaataatacctgtttacttctaatgatctgaaaagcaggaaggtttttacggagccatgaacaaaaatctgaacatgcttttcttaaacttttggagatttgaagaagggttgcaaaatgtccaaaatacagttttcacaagaaaacacatcaaacctgattgttgccaatcattgtgatataacttctattcatttttggaaacatactcctgctttgtctatcatcacttgtatgtttccttgcagtgtggcctcaggaaacaagtgtatttttctgtcagacagaacacaagttgcatagataaatattaaaactagtactcatgaaagcataacccattagtgaacttaggtacagacacaaatacttaagtcagcaggaagtttactctttccttaggttactactccatgagagtaagattgaccatatcataatgtttggagccctttctgatgcattttctacagtgggtaaaatgatgtaggtaaaaatatattggctgggcgtggtggctcacacctatagtcccagcactttgggaggccgaggtgggcagatcacgaggtcaggagttcgagaccatggccaacatggtgaaatcccgtctctactaaaaatac

SEQ ID NO: 15720 - DNA, 1754 bp, Homo sapiens
  CDS (373)..(1005)
agacgatccgctagccacattaggcgctcggtctctgcgtccgcccctcccgtgcctcagagacttgcgctccccaggcccgagcccctgtcggcccatcctcgagcccgtgtggctcgcgaacctctaactccagccgctgcagccccctcccaggcccggcgtccccgagccccgcgggcgccgcgcctgcccttctttggctacgctgcagccgcggtgtcggcgagtcctcccgggttgcccccgcgggcgtcagagggagggcgggcgcccgcgtggtgacggcgacgcctgcagcccaaggagcgctccactcgctgccgccggaggggccggtgacctcttggctaccccgcgtcggaggcttagatggctcaggcgaagatcaacgctaaagccaacgaggggcgcttctgccgctcctcctccatggctgaccgctccagccgcctgctggagagcctggaccagctggagctcagggttgaagctttgagagaagcagcaactgctgttgagcaagagaaagaaatccttctggaaatgatccacagtatccaaaatagccaggacatgaggcagatcagtgacggagaaagagaagaattaaatctgactgcaaaccgtttgatgggaagaactctcaccgttgaagtgtcagtagaaacaattagaaacccccagcagcaagaatccctaaagcttgccacaaggattattgatgaggtggtcaataagtttctggatgatttgggaaatgccaagagtcatttaatgtcgctctacagtgcatgttcatctgaggtgccacatgggccagttgatcagaagtttcaatccatagtaattggctgtgctcttgaagatcagaagaaaattaagagaagattagagactctgcttagaaatattgaaaactctgacaaggccatcaagctattagagcattctaaaggagctggttccaaaactctgcaacaaaatgctgaaagcagattcaattagtcttcaaacctaagagcatttacacaatacacaaggtgtaaaaatgataaaatactattttaattgataactagttctttgttaggtataaccacttagttgacactgatagttgtttcagatgaggaaaatattccatcaagtatcttcagttttgtgaataacaaaactagcaatattttaattatctatctagagattttttagattgaattcttgtcttgtactaggatctagcatatttcactattctgtggatgaatacatagtttgtggggaaaacaaacgttcagctaggggcaaaaagcatgactgctttttcctgtctggcatggaatcacgcagtcaccttgggcatttagtttactagaaattctttaccttaagcagcacacacatttactacacacacagtgttaacaaagcactgtgcttagagggtaaaaaggaatcacaaaacaagaatctttccaaagttgtctcattcagcaatgttaaggcatctgtatcaaattattttggatgtaaagattcctgtgtctcatagtatgaatgtattttttgatatacaagaaactgacataaaatgtgagaaaaccacctataatttaccactgtgaacaattatatatctatctgcttcatcttttctcaaatgcatcaattctctaaaattcctatattgtaacttgccttttttttaaaaaagttagatgctgatataaagtctgcttaattgtcaactt

SEQ ID NO: 15721 - protein, 211 aa, Homo sapiens [sequence omitted]

SEQ ID NO: 15722 - DNA, 2012 bp, Homo sapiens
tcaaattagtgtaattcttggatatttaatatataggtaatattttaaacaagtttctgtaaaatttagtgttcccattaactccgtacagaatcccttgtatttccaatatgtcaggttccatgaatgtacatgctatctggttgtttaaacattacttagttgattataatgactgtgagtataactacttttactgcttatggtagatatcatgtgagttacaatattatattacatactcttaaacaactgttgtagaaaagttgcttgaaattaaaatacacacttgtacaagttattcacatagaacaagtttgcagttactccccttttattcttgataaatatttcagtttagttcaaatcattccaaggaatgtaaaaattgaatcaacttattatattcctaaaatcagtgccctgcaggtagcaagatatacctagagtggaggtttccaaaatctacagtctcaatttaattttgaataaaatgacgaagcccagaaaagtgaatcagaagttgaagtgtcccataataagctgtcatggcttcatgatcatttgtgtatgtaattattataaaaatgcatttgcatttttattgcttgtgtcatgactagcctggcctttcctttccttttctgcacacactgaactaagggagaataccttgtttttcttccatttcagtgaacctttccttcataactgtaatgagtaaaggtcctaatcactcctttgtatatatgaagatgaaaattccttgaaataattatccagaatttctttaaaagcattcctcaatggttttatgagtgctgtatttgaagaagattaaaatagaaactttatttttaaagctgtgactccatctcttagaatgcagcgtctctgagaaaggaacttctaaactgacttctgctttgggctaaaatatttacccatataagccaatgatagtacagagatttaacagtatttaaatttgggccatagatgaaaatgaattctacttttgactagtaactattcttgatccatcctttgcttttgtttgagagaatattatctctatttgagaacaacatggaaggcattgaaactagttttccacaaaggccagaggacaaaaatatttatttccttacttgattccttcttatcagttgacctggtcgcatctttaatttaattgatattattattacgtttgccttgcaagttctcagatatctccaaccttttgtgttgtcattcatcgactacgggaatattctcaatgaaatgtccttgatggtctctctggttcttattctagtcatgaaaaggaaaagacaaaaagatagcaaatcttaaaactagtaaataaaaggaacttgtagtgaactttgtccattaaattataagtagcttacctgatgagctacagtgtactgtatactttctcccctgcaagcactcaaagaaatattatttgatcaaaatctatagtgcataaattaaacaaaaaatactgaaaatattctcattttattttaattatgcaagtttatttttaatgatatgatatttaagctattatatttctcacttttttattttcaatgatttaaatgtaaaaattataaaacaattttaatctcattcattaattcatctttcatgtataagtctgttttctctgttgaccaccctgtccacattatgaataaaaatatgtatatacttggccgggcgcggtggctcatgcctgtattcccagtactttgggaggccaaggcgggaggatcacaaggtcaggagatcgagaccatcctggctaacacagtgaaaccccgtctctactaaaaatacaaaaaattagctgggcgtggtggcgggcgcctgtagtcccagctactcgggaggctgaggcaggagaatggcatgaacccgggaggcggagcttgcagtgagccaagatggcgccactgcactccagcctgggcgacagagctagactccatctc

SEQ ID NO: 15723 - DNA, 1747 bp, Homo sapiens
  CDS (279)..(806)
atcatagcaaccaaacaatgaattgagacctggaggtcttgggttgtaatttaaattcacataaaccaggccttttgtgcctattgcctaattcatggcataattattattagccgccttaggataaaaggaatacagactttatcccatacatgaaattatcagactttcactcattttaatagctagaatcttattttctttccttaagatgtatattttcttttaatgaccaggctctatgtgctgctgtagtgaaaccggatgttctagaaacaatggctttgctgttcagtggagcagatgtcatgtgtgccaccggagaccccgtgcatagcaccccctatctgctagccaagaaagctgggcaaagtctgcaaatggaatttctctaccataacaaattctcagatttccctcaacatgatattcattccgagggtgtattaagtcaagagtcttcccagtccacattcctctgtgactttttatatcaagctccttctgctgcttctaaactctcttcagagaaaaaactgcttgaagagacaaataaaaaatggtgtgttttggaaggaggcttcttgagttactatgaaaatgataagtctaccacacctaatggcaccattaatatcaatgaagttatctgcctggctatacacaaagaggacttctatttaaatactgggcccatctttatctttgagatctacttaccctccgaacgtgtgtttttatttggagctgaaacatcttttttccccagtctcataaggaagagagaaaagtcagaaaataatatttaaattgtgtaactagcttattattttcatactaaaaagtaatcactgatagtttttctataggtatgagatcaagggaatcatttttagaaatcattttcattgtaaaaagtatattagatgtcttttgccaaattttatctagttagtaattataaacagtatcagtcttattttcctattgtttatgaacaatataaagacctcttaatagtgatctaaaagttttctattgtcactgggttaccttcagaatttctaggcctgttagatttatttttgtcgttagcatttaaagttttgctctgtattagaaaatagaaaacttagaaaaacaggtagtggcagttcatcacttcccccacttttatttccaagtcattatctagtttctcaatgtggcattgcaactctgattttttactgttcgtgcactaaagcatttgagataagcccttagtgttgaggaaatcctaaatcctactgctggggggttaaaagaaatatagtgacaggctatgaaatagtgttgtcataacttatcagtggctagtaaatagggtagttgccttctgacaccattttgagtgaaggcagtttaattgcgttgcctctgtttagataagcatttggaatccacagtcaaatgtgtgaatgctgtggttaaagtatttccattatatgagatttgatttcttaagtgatttttttgtctcaggttccattctacatcaaaaggtatttggaaaatgtctttcactgtatgtgtacacggagaaccttaacctataattgtatgtaaatctagtgattgtgaaaaacaagaaacttgcagacacatattaacagttggtgacttatcgccagttggtgacttacttacctacccctgcctctcaaatcttgttataacaattaaacagttcgtattaagactttgt

SEQ ID NO: 15724 - protein, 176 aa, Homo sapiens
MALLFSGADVMCATGDPVHSTPYLLAKKAGQSLQMEFLYHNKFSDFPQHDIHSEGVLSQESSQSTFLCDFLYQAPSAASKLSSEKKLLEETNKKWCVLEGGFLSYYENDKSTTPNGTININEVICLAIHKEDFYLNTGPIFIFEIYLPSERVFLFGAETSFFPSLIRKREKSENNI

SEQ ID NO: 15725 - DNA, 2778 bp, Homo sapiens
  CDS (773)..(2179)
acaagtggaccggggtgttgggtgctagtcggcaccagaggcaagggtgcgaggaccacggccggctcggacgtgtgaccgcgcctagggggtggcagcgggcagtgcggggcggcaaggcgaccatggagcttttgcggactatcacctaccagccagccgccagcaccaaaatgtgcgagcaggcgctgggcaagggttgcggagcggactcgaagaagaagcggccgccgcagccccccgaggaatcgcagccacctcagtcccaggcgcaagtgcccccggcggcccctcaccaccatcaccaccattcgcactcggggccggagatctcgcggattatcgtcgaccccacgactgggaagcgctactaccggggcaaagtgctgggaaagggtggctttgcaaaatgttacgagatgacagatttgacaaataacaaagtctacgccgcaaaaattattcctcacagcagagtagctaaacctcatcaaagggaaaagattgacaaagaaatagagcttcacagaattcttcatcataagcatgtagtgcagttttaccactacttcgaggacaaagaaaacatttacattctcttggaatactgcagtagaaggtcaatggctcatattttgaaagcaagaaaggtgttgacagagccagaagttcgatactacctcaggcagattgtgtctggactgaataccttcatgaacaagaaatcttgcacagagatctcaaactagggaacttttttattaatgaagccatggaactaaaagttggggacttcggtctggcagccaggctagaacccttggaacacagaaggagaacgatatgtggtaccccaaattatctctctcctgaagtcctcaacaaacaaggacatggctgtgaatcagacatttgggccctgggctgtgtaatgtatacaatgttactagggaggcccccatttgaaactacaaatctcaaagaaacttataggtgcataagggaagcaaggtatacaatgccgtcctcattgctggctcctgccaagcacttaattgctagtatgttgtccaaaaacccagaggatcgtcccagtttggatgacatcattcgacatgacttttttttgcagggcttcactccggacagactgtcttctagctgttgtcatacagttccagatttccacttatcaagcccagctaagaatttctttaagaaagcagctgctgctctttttggtggcaaaaaagacaaagcaagatatattgacacacataatagagtgtctaaagaagatgaagacatctacaagcttaggcatgatttgaaaaagacttcaataactcagcaacccagcaaacacaggacagatgaggagctccagccacctaccaccacagttgccaggtctggaacacccgcagtagaaaacaagcagcagattggggatgctattcggatgatagtcagagggactcttggcagctgtagcagcagcagtgaatgccttgaagacagtaccatgggaagtgttgcagacacagtggcaagggttcttcggggatgtctggaaaacatgccggaagctgattgcattcccaaagagcagctgagcacatcatttcagtgggtcaccaaatgggttgattactctaacaaatatggctttgggtaccagctctcagaccacaccgtcggtgtccttttcaacaatggtgctcacatgagcctccttccagacaaaaaaacagttcactattacgcagagcttggccaatgctcagttttcccagcaacagatgctcctgagcaatttattagtcaagtgacggtgctgaaatacttttctcattacatggaggagaacctcatggatggtggagatctgcctagtgttactgatattcgaagacctcggctctacctccttcagtggctaaaatctgataaggccctaatgatgctctttaatgatggcacctttcaggtgaatttctaccatgatcatacaaaaatcatcatctgtagccaaaatgaagaataccttctcacctacatcaatgaggataggatatctacaactttcaggctgacaactctgctgatgtctggctgttcatcagaattaaaaaatcgaatggaatatgccctgaacatgctcttacaaagatgtaactgaaagacttttcgaatggaccctatgggactcctcttttccactgtgagatctacagggaagccaaaagaatgatctagagtatgttgaagaagatggacatgtggtggtacgaaaacaattcccctgtggcctgctggactggttggaaccagaacaggctaaggcatacagttcttgactttggacaatccaagagtgaaccagaatgcagttttccttgagatacctgttttaaaaggtttttcagacaattttgcagaaaggtgcattgattcttaaattctctctgttgagagcatttcagccagaggactttggaactgtgaatatacttcctgaaggggagggagaagggaggaagctcccatgttgtttaaaggctgtaattggagcagcttttggctgcgtaactgtgaactatggccatatataattttttttcattaatttttgaagatacttgtggctggaaaagtgcattccttgttaataaactttttatttattacagcccaaagagcagtatttattatcaaaatgtctttttttttatgttgaccattttaaaccgttggcaataaagagtatgaaaacgc

SEQ ID NO: 15726 - protein, 469 aa, Homo sapiens [sequence omitted]

SEQ ID NO: 15727 - DNA, 1407 bp, Homo sapiens
acaaggatgataggatgagaaaaagaaaggacaaatgcaccagaggaggtatgccaaatgggaaacttttcatcactttccagataaaaactagcagtctgtgaaggcaactggtctgatttttcaggtaagaacatatgagaggcaggctgagaccaattttctaccaggccagctaattcttcacaatgacaagctatgggtcatatgctttcaggaaccagacactggaacatgtcgtctgatgtacatcacaccaagaaataaaaaaagaattggaaagccaatgtccaattatttactaaaacagaatctactggagagaaatgcaaaggcaggtaaaaaggcaatctcttaacatgaaaactcacaactgtaaaatgagaacctaaactatacagcgacaaactcaggaaaaagtctccagctactgctgtctctcagactctcacagtatgtgtaaccacttcctcctctgcacgggatcaccccagaagatcaactctactagatcatttgaggacaatgaacaaagtctcaagactgaattcccacagaaaacattctcatgaaaccacccaatattctggtgaagttaaagaagggcatgtgttcggagacaaccagaagcagcaatgctcaaaaccacaaaactctggattgccgactctgcacatcctggttcctctagatacagttcagtggcacattcacaaataaacgttttcaaaaactgccctcaggcagttctagagaaatgctttgacttgcctaatggtataatgtcaagaaaggaagaccagcactgatcattcatactcattattacagtcacagggcactgtctgactcgacagatatagccgagcagttaaaaggttatgggaatttaagtccattatggtcatacgattcttatggacccagagatatgaaattaatcagccacatgtgtagggacaaagtttgtcataaatagatataagttatctgcatgctaagaacttagttacttaactctgtttcctcatgttaatataaacataattatagaatgcaaatgaaatacttagcctggagcctattatataggaagcactcaataatttcaaactattgagtatattattagataggctccataattatttattcctttttcaacagacagtatgatctattgaaaataaagccaaactagatttctttgacccactcctttttctgtttgtattgttggcaagttgttctaaatcaacttgccaacatactattaacatgttattaacatagaagggatgcttattttgtttgctttgtaagaaatgcttctgattcagtaactgggcaatttatttaaatataagtaaaaagcagattttattaaaaactactttgtgctatcat

SEQ ID NO: 15728 - DNA, 3667 bp, Homo sapiens
tgtgctctgtggagagagatacaatgatttagagaagcatatatgttcagtaaaacatgatgatgtttattttgatcattttcatccctgtgctgcgctaacgacagatattattgaaaagtatggattcccacctgatcttaccctcacccctcaagaaagcatccagctttatgataccatggctcaagtctgggaaacttggcccagggctcaggaattgtgtccagaggaattcattctttttaagaataagatagtcattaagaagttggatgctagaaaatatgaagaaaacttaaaggcagaattgacaaattggattaaaaatggccaagtgaagaaggtcaaaagagtactgaagaaccttagtccggattcattgtctagttcaaaagatatggtgaaaatgtttcctcttcttgttgaaaagttaagacaaatggataagttgcctgcaatattttttttgtttaagaatgatgatgtgggaaaaagagctggaagtgtgtgcacttttctggagaagacagagacaaaaagccatccccacactgaaagtcatagttatgtctttgcaatagatgaagtacttgaaaaagtgaggaagacacagaaaaggatcactaaaaaaaaacccaaagaaggctgaaaaactggaaagaaaaaaagtgtatagagctgaatatattaatttcctggagaatctgaagattctggaaatttctgaggactgcacgtatgctgatgtcaaagccctacacactgaaattaccaggaataaagactcaactttggatagggtattaccgcgagtgcgatttacaagacacggcaaagaactgaaggctttagcacaaagggggattggatatcatcacagcagcatgtattttaaagaaaaagagtttgttgagatactctttgtaaaagggcttattagggtagtgacagctactgaaacacttgccttagggatccacatgccatgcaaatctattgtttttgcccaagactcagtctatctggatgctttaaattacagacagatgtctggtcgtgctggaagaagaggtcaagacctgcttggaaatgtgtatttctttgatatcccattgcccaaaataaaaaagactccttgcatccagtgttcctgagctgagaggacagttccctctcagcataaccctggtcctgcgactcatgctgctggcttccaagggagatgacccagaggatgccaaggcaaaggtgttgtcagtgctaaagcattcattgctgtcttttaagagacgaagagccatggagactttgaaactttactttttgttttccttgcagctccttatcaaagaggactatttaaataaaaagggtaatccaaagaaatttgcaggacttgcatcatatttgcatggtcatgaaccttcaaatcttgtttttgtaaattttctcaagagaggccttttccataatctctgtaagccagcctggaaaggctcacaacaattttcccaagatgtgatggaaaagctcgtgttagtattggcaaatttgtttggaagaaaatatattccagcaaaattccaaaatgctgatttaagtttttctcagtcaaaggtgatccttgccgaactcccggaggattttaaagctgctttatatgagtataacctggcagtaatgaaggattttgcctccttcctgctgattgcttccaagtcggtgaacatgaaaaaagagcatcaactccctttgtcaagaatcaaattcacaggtaaagaatgtgaagactcccaactcgtgtctcacttgatgagctgcaagaaaggaagagtagccatttcaccatttgtttgtctttcggggaacacagataatgatttgcttcgaccagagactatcaaccaggtcatcctgcgcacagtcggtgttagtggcactcaggctcctctgctgtggccatggaaattagataaccgaggaaggagaatgccactaaatgcatatgtgctcaatttctataaacacaactgcttgacaagattagaccaaaaaaatgggatgcgtgtgggacagcttttaaagtgtttgaaagattttgcattcaacattcaggctatcagtgactccttgagtgaactatgtgaaaataagcgtgacaatgtagtcctggcatttaaacaattgagtcaaaccttttatgagaaacttcaagaaatgcaaattcaaatgagtcaaaatcatttagaataacaccatggaaaactttcaagtctgattatgtggtatttatctctttgcaaggagagatataattaagcttacacaatgaaatggaaaaaatgtttgtcttggagtcaaacagaattaaactcagataccagctctgctattttctaactgaatgactttaagttatgtaatatatctgagctttaacttcatttttggcaaaaccagagtaaaaatgaatacctctagttgttttgaggattaaatgagataatgtaagaaaagtgattgggattgggtggtgacttaatgaacggtagtggttttttaagtagttaatgtatagcaaaattagtttcacattgtcaagttttcaatacatccccaagttaattgaattttaaattaatgatcaataaatcacaaaggacccaaatcaattctgaacaacaatttagttatgtaagaagacttctgagattacaagaaactcactgctgtggactggatgtttgtgccctcccctccaaaatttttatattgaaattctaaccctcaatgtgatggtattaggagatgataggtcatgagggtggagctccttggatgtaattagtgcctttaacagagagacaagagagcttgttctccaatctctgctcactaccactggatgatacaatgggaagatggccatctgcagaccaagaagcaagccctcaacagaactgaatctacttacaccatgatcttgaactttccagcctccaggattgtgagaaatacatgtttgttgtttagccatctagtctgtggttttctgttgaagcagtctgaattgactaaaacagtcacttggagtagttataaaccactttcctgttgaaagcagaacatgctgattcaactgttttgttcaatagcaatgatagattttgtttaagtcccctacactttcttatttctaaatgatcaagagtacacttcctggcagtgattaaggagtgtgtatctaacagaaaaaatatatataccctgtgaacccgaatatggaattcagattgtttctgccctcagtatcatacttaaaaaacaagcatacaaacaaacataagggaacaaacagcaaccataacaaaaacaaacctttaaaggtgggtttttgctgtgataaatgaatacggtactctgaaggagaaaaaagtttctcaaatgagcttaaactgcaagtgatttaaaaattagagaatataattcttaaagctattgaaagtttcaaccagaaaacctcaagtgaattttgtatgtaaatgaaatcttgaatgtaagttctgtgattctttaagcaaacaattagctgaaaacttggtattgttgtagtttatgtagtaagtgacttggcacccatcagaaaataaagggcattaaattg

SEQ ID NO: 15729 - DNA, 3915 bp, Homo sapiens
  CDS (918)..(1952)
cgtattaatttatttaccattagaaatggagggcttcctgtatgtggctgggcttggtggctcacacctgtaatcccagcactttgggaggccgaggcaggcggatcacttgaggccaggagttcaagaccaacccggccatcatgttgaaacaccatctctacaaaaaatacaaaaattagccgggcctggtggcgcatgcctgtgatcccagctactcgggaggtacgagtgctgaggcacgagaattgcttgaacctgggagtcggaagttgcagtgagctgagattgtgccactacactccagcctgggcgacagagcaagatttttgtctcaaaaaaagaaaaaaaaaaaaaaaagaggacttcctgtactttaagttgattttgataattatttgctcaagcactaacatctgctcacacttttgtctttctggtacaagtgggctccttggaggcaggtgagactgatctttgtctccctgcaaagacactgccccaccatgggagactcctgccacactcaggcagcagctaggatgaaggacaagacccggggccagggcctccctcccgaggaccttggctcccagatccgaggttgccataacgttatttccttcagggtatatgttcactttggaaaccaaggggccaagactgttctaagatcattttgtgcttttagccaagggtgatgatgggtccgtggccattttcacttggctttcggtcagagctcggtctggacattcacacaggtgtgctctcctacttactcgggctatttctttccaactaggtggaagaaaaggccaaatttgatgggatttttgaaagcctcttgcccatcaatggtttgctctctggagacaaagtcaagccagtcctcatgaactcaaagctgcctcttgatgtcctgggcagggtctgggacctcagtgacattgacaaggatgggcacttggatcgagatgagttcgctgtggccatacacttggtgtaccgagccctggagaaggagcccgtgccctccgccctgcccccgtccctcatcccaccctccaagagaaagaagactgtgttccctggcgccgtccccgtcctgcctgccagcccccccaccaaaagacagcctccgctccacgccgtcccacggcagcgtcagcagcctcaacagcacagggagcctgtcccccaagcacagcctcaagcaaacacagccaacagtgaactgggtggtgcccgtggcagacaagatgcgatttgatgagatattcctgaagaccgacctggacctggatggctacgtgagtggccaggaggtgaaggagatcttcatgcactcgggcctcacccagaaccttctagcacacatatgggccctggccgatacgaggcaaacggggaagttaagcaaagaccaattcgcgttagctatgtatttcattcagcagaaggtcagtaaaggcatcgaccctcctcaagtcctctcgccggacatggtcccgccttcggagagaggcacgcccggcccggacagttcaggctctctcggctccggggagtttactggcgtgaaggagcttgatgacatcagtcaagagattgcccagttacaaagagagaaatattcgctggaacaagacattcgagaaaaggaagaggcaatcagacagaaaaccagcgaggtgcaggaattacaaaatgacctagaccgggaaacaagcagtttgcaggagctcgaggctcagaaacaggatgctcaagaccgcctggacgagatggaccagcagaaggccaagctccgagacatgctgagcgacgtccggcagaagtgccaggatgagactcagatgatctcatcactgaaaacgcaaatccaatctcaggaatctgacttaaagtcccaggaagacgatctgaaccgagccaagtcggagctgaactgattgcagcaggaggaaacccagctggagcagagcattcaggctgggcgagtccagctggaaaccatcatcaagtccctgaagtcaacgcaagacgaaatcaaccaggcaaggagcaaactttcccagctgcatgaaagccgccaggaggcccacaggagcctggagcagtatgaccaggtgctcgatggagcccatggtgccagcctgaccgacctggccaacctgagcgaaggcgtctccctggcagagaggggcagttttggagccatggtaaaggttgaataaacgtattacagtatggggctctggtcccctggtgtgacagcagaacatcccacccgccagatctgttcatggccaacgttggttccagccaagtgcaggcggctgtctgttgtttttgctgccactttgcgcgttcacaccaggccttgcagcctggcacaggtggccatgctgaatcctggcttccagaacaaagtccaagataggcctggatcctttcagaacctgttttgaatgccctccatctctgcggaagtatttacattgggccaaccacccaaattcagtgggcttctcaaacttaaccaaaattggatcagtttctgctcatggtggaaaccccacattctactaatcagggggcaggggacatctgaggggcatgtgtctatgtgtatgtgtgtttccacaaggaacaccttgaaaagcaaatgtgttgctaaagatgaggaagtaatggcaagcagcgccccagggtgttgctctttcaagtaagaattggcctctcctgaaattttggttatgtttaaaaacctctgcactttactctgacctcatgaccctggagttgtgatcaggcctggggcaggggactgtcggccccttacatttttgagagctcttgagcccctgataccaagacaggtgtgaccttttccttaggtggtcacatcccccctgttcacaccagagtctgcccctgcagcctcgaacctggggacatgtagtttcccatttcgtcttggtgctgttccgggagcggatgggccgggccgcgcatgtctggatgtttccttggtgctctgctgcctccagcagctctctccgtgccgccaccctctctcccagggctcctccctggagcccttctgctcctgggcctctgtacgtcatggattcctcttcctccctggaataagagtgagcgctcgtgctctctaaacaccacacttgcctctttatgttcaatgcttgatgtgtttcttttctcagcagccaagtcctcagtcccaaggatttatggggaagcacacgcgtcccctgggctgctgggaaggcactgctggcgagctcatctgtctcttgtgtctggcccccgctgggtgcaccgcctccctctttcctcccatactctcttttctcgtggactcgtaatgaggtggtttccatagccgcccccgggcccgtcatcatcagctttatcgtctaaatttaaacgatgagcattcatccttcatgagttacgagaagccagaactcctcgctttgctccctggctgttcttggcgtgtgtgtttccgtctcacaacccggctcctactttccccatctggcattgtcccctggcaccgcttttggcttgtcctgctcagtcttcgttcagggaacagcttcctcttaaatgtcccttttgcaggtttttagaaaccggttttcttggataaaagttggcagtgaagtggcagtttgcaagtggccagtgattcccccaactccaaagacagatttttacctttctggttatttttgttcatcttttgggcagggcaaaggttacctgagacacaattactttgggaatgtagattaagatacgttacatggaaacttgcaactggcatccgaaagaaaaactgtttttatcctgttgtacaaatacagtttttaaagcatt

SEQ ID NO: 15730 - protein, 345 aa, Homo sapiens [sequence omitted]

SEQ ID NO: 15731 - DNA, 2937 bp, Homo sapiens
tcagcataggagttaagagggacacaatttagccaatcacagcttcataacagatgctctgcagacacctctccatcaatcatagcccggtgtgtttaacttagagtagatggtggcaccacccgataacaatggtggtggcattcagcagcagctcagagggttccagaagcattcctccagccttgaggggaaatggtgcctctggctaacggagggaaccatcaaagccgggtatggtttctttgatcgtgtttagccgctttgtggctgagtagagattcttccttcttcctgtccaggtaattaatgagggacttcaaaggcatgaggcttttctgctccaatcaattattcagattggcatatccaaaggtctctgaacaggaaatagagaggaaatggattgctaagtggttatgatggagactaaatgaattacttgttaatcacccttgtctgctctggtagtatctgtgcaagccaggatagctgctcggggcacactcaccatcaaacacgggaggggaagggcagggtggggtaaatttcactcttagaaacaccagaatttcttccttttcaggatcaatgtcacccatatcttgtcaattgtgactgcaaacttcagaaggactcagagtggaaagtcttggcaaccatgttggggttcagacagtgggagccatgcttctgcgaatgagcctggggactggggactgtggtcccagccctggatttgatgaggggagtatccctgtcctgcgagggtgcagtgtcacttttccactcccatttggggtcaactcttaacagcatccctgagaagtgaggtggtgtaaagtcagggaagtgtggtctttgtcttattaaaaataatgcgatgagatggacgatggcagaagcttcagggtagatcatggagctcatcatggtatttgatatggcttggctttgtccccacccaaatctcatcttgaattgtagctcccatgattcccatgtgttgtgggagggacccagtgggagataactgaatcatggggtcattctccccatactgttctcatagtagtgaacaagtctcatgagatctgatgattttataaggggaaacccctttctcttggctcccattctctcttgcctgctgccatgtagaacatgccctttcccttctgccatgattgtgaggcctccccagccatgtggaactatgagtccattaaacctttttttctacataaattacccagtcttaggtatatctttatcggcagcgtgaaaacagactaatacagtattactctttacattgctttatgtttgcgattttccattagaaaaggaacttgaaaattaaaaaaaataataataataatgcctacttctgctccaacttctacttgtggccaagatggagaaacagaaactggatttacctttcctcatgaaacaactgaaagaaaagataaaatatataaagtaataggttttacaaccagacaccaggtaataaatgatagtgatcactaaagcatgagaaacagatgggatgagccctatacttgccccagcttcttgcactgagcgtttccaggctgtggggcagggagagggaactcaggcagagactggaagaacatccacattgaagacattgaggccaggcgtggtggctcacgcctgtaatcccagtgctttcggaggccgaggtgggtggatcacaaggtcagtagttcaagaccaacctggctaacatggtgaaatcccatctctactacaaaaatacaaaaattagccgggcatggtggcacgcgcctgtaatcccagctattcgggaggctgaggcaggaagaattgcttgaacctgggaggcggaggttgcggtgagccgagattgcaccactgcactccagccttggcagcagagcaagacttcatctcaaaaataaataaatggatggatggatggatggatggatggatggatggatgaaactgcttccaggtgacttaactacacccagaacaaagctcaagaccaggatacagaactacccagcgcccccaacaagtacaattcatgatgtctggcatccattcagaaattcccagtcttgcaaagaagcaggaaaatacagcccgtaaggaagagaaaaatccattatcaaaattgactggggattaacaccgatgttagagttagcagacaaggatattaaaagaatcattaaaactgtattccatatgtccaaaaagttaaatgtagacacagaagatattttgaaagcccactggaatgtccatttttaaatggttaatatgataaattttgttgtatgtattttagcataaagcagttctttacattttaacccaaatcaaacttccagtgatgaaaaccacagtgtctgagatgacggatacacaggatgagatcgagggtagattaaatgttataaagtaatagtgaactcagagaagtctcaatagaaactatcctgagtgaaacacagagaaaaaaaaagaattctttttaaaagaacatcagtcagtgagctgcaagatagcttccaacagcccaatatacatgtaagtagagtccctgaagagggggcgattgtagggggaggggagaaaaaatacttgaaggctgggtgcggtggctcatgcctgtaatcccagcactttgggaggctgaggcgggcagatcagttgaggtcaggagttcgagaccagcctggccaacacggtgaaaccccatctctactaaaaatatgaaaagttggctgggcatggtggtgggtgcctgtaatcccagctatttgggagactgagtcaggagaatctcttgaacccaggaggcggaggttgcaatgagctgagatcgcaccactgcactccagcctgggcaacagggtgagactccatctc

SEQ ID NO: 15732 - DNA, 3006 bp, Homo sapiens
  CDS (162)..(944)
cagccagcagtcttgacaacttatctgggagtttttcagaactgtcttcagtagttagttcaagtggaacagagggtgcttccagtttggagaaaaaggaggttccaggagtagattttagcataactcaattcgtaaggaatcttggacttgagcacctaatggatatatttgagagagaacagatcactttggatgtattagttgagatggggcacaaggagctgaaggagattggaatcaatgcttatggacataggcacaaactaattaaaggagtcgagagacttatctccggacaacaaggtcttaacccatatttaactttgaacacctctggtagtggaacaattcttatagatctgtctcctgatgataaagagtttccgtctgtggaggaagagatgcaaagtacagttcgagagcacagagatggaggtcatgcaggtggaatcttcaacagatacaatattctcaagattcagaaggtttgtaacaagaaactatgggaaagatacactcaccggagaaaagaagtttctgaagaaaaccacaaccatgccaatgaacgaatgctatttcatgggtctccttttgtgaatgcaattatccacaaaggctttgatgaaaggcatgcgtacataggtggtatgtttggagctggcatttattttgctgaaaactcttccaaaagcaatcaatatgtatatggaattggaggaggtactgggtgtccagttcacaaagacagatcttgttacatttgccacaggcagctgctcttttgccgggtaaccttgggaaagtctttcctgcagttcagtgcaatgaaaatggcacattctcctccaggtcatcactcagtcactggtaggcccagtgtaaatggcctagcattagctgaatatgttatttacagaggagaacaggcttatcctgagtattaaattacttaccagattatgaggcctgaaggtatggtcgatggataaatagttattttaagaaactaattccactgaacctaaaatcatcaaagcagcagtggcctctacgttttactcctttgctgaaaaaaaatcatcttgcccacaggcctgtggcaaaaggataaaaatgtgaacgaagtttaacattctgacttgataaagctttaataatgtacagtgttttctaaatatttcctgttttttcagcactttaacagatgccattccaggttaaactgggttgtctgtactaaattataaacagagttaacttgaaccttttatatgttatgcattgattctaacaaactgtaatgccctcaacagaactaattttactaatacaatactgtgttctttaaaacacagcatttacactgaatacaatttcatttgtaaaactgtaaataagagcttttgtactagcccagtatttatttacattgctttgtaatataaatctgttttagaactgcagcggtttacaaaattttttcatatgtattgttcatctatacttcatcttacatcgtcatgattgagtgatctttacatttgattccagaggctatgttcagttgttagttgggaaagattgagttatcagatttaatttgccgatgggagcctttatctgtcattagaaatctttctcatttaagaacttatgaatatgctgaagatttaatttgtgatacctttgtatgtatgagacacattccaaagagctctatctatgataggtcctgattactaaagaagcttctttactggcctcaatttctagctttcatgttggaaaattttctgcagtccttctgtgaaaattagagcaaagtgctcctgttttttagagaaactaaatcttgctgttgaacaattattgtgttcttttcatggaacataagtaggatgttacatttccagggtgggaagggtaatcctaaatcatttcccaattggaaatatgctgtcagtttgtgcaccatatggtgaccaggcctgtgttcagtttggcagctatagaaggaaatgctgtcccataaaatgccattcctattttctaatataaaactctcttccaggaagcatgcttaagcatcttgttacagagacatacatccattatggcttggcaatctcttttatttgttgactctagctcccttcaaagtcgaggaaagatctttactcacttaatgaggacattccccatcactgtctgtaccagttcacctttattttacgttttattcagtctgtaaattaactggccctttgcagtaacttgtacataaagtgctagaaaatcatgttccttgtcctgagtaagagttaatcagagtaaatgcatttctggagttgtttctgtgatgtaaattatgatcattatttaagaagtcaaatcctgatcttgaagtgctttttatacagctctctaataattacaaatatccgaaagtcatttcttggaacacaagtggagtatgccaaattttatatgaatttttcagattatctaagcttccaggttttataattagaagataatgagagaattaatggggtttatatttacattatctctcaactatgtagcccatattactcaccctatgagtgaatctggaattgcttttcatgtgaaatcattgtggtctatgagtttacaatactgcaaactgtgttattttatctaatccattgcttaatgagtgtgtttttccatgaatgaatataccgtggttcatatgttagcatggcagcattttcagatagctttttgtttgttgggaagttggggttttggggggagggggagtattagtacgttgcatgaaatagcttactttataatgatggaattgctttttcttttgtcttgtgatttttttttttgaagtgaaatttaactttttgtgcaagtagtactattatacccatcttcagtgtcttacttgtactgtatcacattccataccctcatttaattcttaataaaactgttcacttgttt

SEQ ID NO: 15733 - protein, 261 aa, Homo sapiens [sequence omitted]

SEQ ID NO: 15734 - DNA, 3227 bp, Homo sapiens
aatgaatgcatctaaggcacttagacaggacctggcacacagtaattattcaacaaatatgttgtcactattgttataataacagaggtgaggtttctgtaggtgattcagcaataggaatcaactctatgttgtttgggggcactgaggatgatatcaaaaggctagagtgttattttctccaattttacattttggctagtccttgttgaacacagagcagttttttccaaagttatgtcctaaatcaagtcatgtcaaatgccattgtttaggttctgttcaacagccatccaatgagcacatattaagtgccagactctcctaatgaacactggggagatttaaatgtatgagaaatgacacatcccccatagaagtgcatataatttactggagaagacaggcttatgaacaaattatttcaaaacaatttcagccaggcatggtgcctcatgcctataatcccagcactttgggaggccaaggcatgaggactgtgctgagctcaggagtttgagaccagcctgggtaacatagcgagatcccatctctactaaaaataaagaaaatcagctgggcgtcggggtgcttacgtgtagtcccgcctactcaggaggctgaggtgagaagatcgcttgagccctgcagttgaggctgcagtgagccatgattgggccattgcattccagcctgggtgacagagcaagaccctgtctccaaaaaacaaaacaaagaatttccatttggtcattactctcataggccatgacaatctcaaaaaagtgactcaccaattcataaaatatttgttcctccttgttatcaccttcctcactactcatcttctgtcctatttatgcctcctcattaatagatgagaggagaggaggaactggggaatggtggtgaggaaggagcagagaaataattattttagtgaaaatgctaacaactaagtataaaccaatgcacagtgtacaagtgcataatgagaaaacatgcttaagatatcacatccctccctgccatgccattcttgagaagtgccatgtagggatacatgttatgataaagcaaatatacagcattggattttttttttaaggggtctaatttcaaccattgtgctttaccgttccagaaagataagagattgtaacccagaagaagtgaagtttataagctcttcttactggtttgccatccaggggatactttacggaaagcctagctcatagctatttaatagtaatatcaggctgggcatggtggctcacgcctgtaatcccagcagtttgggaggctgaggtgggtggataacttgaggctaggaatttgagaccagcctggtcaacatggcaaaacactgtctctactaaaaaaaaaaaaaaaaaattagccaggcatggtagcacacgtctgtaatcccagctactagggaggctgaggcaggagaattgcttgaacctgggaggtggaagttttggtgagctgagatcacgcctctgcactccaacctgggcaatagtgtgagactccatctcaaaaaaaaaaaaagaatcttccaagcaagcactttacagttgagagacatgttccctataataacatcataagaactttaccataaagctgtgaactaggcaaaggtagacattattatattccttctttacataaatgaaatggaggctcagcaaagtgacatttcaaataattagtacagaagacttctcattatttgaacttttttctacattaattccaatttcattttgttcttaattttgccatgtttctaaaacagagtggttcctaaggcaagaggaaagccaacctagaagggaggacctgggaaatagcaagctggtttagcaactacacagagcacctacaaaggcacacatcaggcagggcgcggtggctcacgcctgtaatcccagcactttgggaggccgaggctggcggatcatgaggtcaggagttcatcaccagcctggccaacatagtgaaacctcgtttctactcaaaatacaaaaaattagtcgggcgtggtggcaggtgcctgtaatcctaactaatcaggagtctgaggaaggagaattgcttgaatctgggaggcggaggttgcagcaaactgagattgtgccactgcacaccagcctgtgggacagtgcgagactctgtctaaaaaccaaaaaaggcacacatcatatatgcagaactgaaaaatttcaaaaggcagcacttcgtatttttaagagatggactaattactgagatatataccatcaaaaaccaaacctgatgacaccttgactcgacaaaacttgcaggaataagaggtacctaggtgggtgtggtcactggtgaccagtgggaatggcatgaattcaagtatagctgtcatctcagtcttcctgcctcatcaagtcaagtgcagcgtgttctaggagaacagcatgcttgcttgtcctgatagcaagtggttctgcttgtacctgtaattgttacatggggtcaaaagttaagagctcagactttacagaacaaaggaacaacctgcccaaatcatctgcatttcaatttactcttgtgaaaaatggaatcagaacaaaacttgaaaggagagatcccattatctttattgcctaatgtcaagtaggtgttagggctttttaaagagatgcatggaagtctgaaagaatgtcaccccagtagccaagtaatgaagcaggaaaaggttgaaaatggcctatatcccacagtgggaaagaaaagacaggctgccttcagccccaactcttaactaaagggacagaggatgatcaagttagagcttaaatattcaaataggtgatttggtgatatcttagaacctctgacatcaatagagcataagaaagatatatttgggggccaggcacagtggctcatgcctgtaatcccagcactttgggaggcggaggcgggcagatcacttgaggttaggagttccagaccagcctggccaacatggcaaaactccatctctactaaaaatacaaaaattagcaaggtgtggtggtgtgcacttgtaatctcagctggggaggctgaagtaggagaatcgcttgaacccggggggcggaggttgcagtgagccaagatcacaccactgcactccagccggagcaacagaatgagactccgtctaaaaaaaaaaaaaaaaagaagaaagaaag

SEQ ID NO: 15735 - DNA, 2991 bp, Homo sapiens
  CDS (8)..(655)
aaaaaacatgagtgactccaaggaaccaagggttcagcagctgggcctcctggtgtccaaggtccccagctccctaagtcaggaacaatccgagcaagacgcaatctaccagaacctgacccagcttaaagctacagtgggtgagctctcagagaaatccaagctgcaggagatctaccaggagctgacccagctgaaggctgcagtgggtgagttgccagagaaatccaagctgcaggagatctaccaggagctgacccggctgaaggctgcagtgggtgagttgccagagaaatccaagctacaggagatctaccaggagctgacccggctgaaggctgcagtgggtgagttgccagagaaatccaagctgcaggagatctaccaggagctgacccggctgaaggctgcagtgggtgagttgccagagaaatccaagctgcaggagatctaccaggagctgacggagctgaaggctgcagtgggtgagttgccagagaaatccaagctgcaggagatctaccaggagctgacccagctgaaggctgcagtgggtgagttgccagaccagtccaagcagcagcaaatctatcaagaactgaccgatttgaagactgcatttggtgagttcctgcacatcaagggtccttgggcctgagatggtctctgtgtgatgtgactttacttgagttaccaaccctgcctgagcctcagtttcctcccctgtgaaatgagaacacggggtaactgcgatcattgcacttggtgttcacagtgggccaggcacacagtagacactcagttcaaccaatccgctgccttctgttctgagctctaaagctgctaattctcccagtctggaagagatggagccaggactcctgggttctcctggggatcagggagagtcttgggaagtagggagaggaatggtctctccccattccaagcggtccacccaacatggacagtcaaggaagggccctgattttcaagggcttgaaggctgggcagatatgggaatatggacaacctaatctgagcccagccctgaccagcctcccccaacagaacgcctgtgccgccactgtcccaaggactggacattcttccaaggaaactgttacttcatgtctaactcccagcggaactggcacgactccgtcaccgcctgccaggaagtgagggcccagctcgtcgtaatcaaaactgctgaggagcaggtacacctggtgggggtcctcgtcctggcctggggcatggcttctggccaactggggaggaggtgctcagagaggattttgcagaagaggggctttgctctatttggaaaaatgggaagagaaggatatgaatgaaggggccccaggtacccttcaagcaaatacaaaccagatctgaacacatgtgaatatttgggggaaacgtcaaatgtaagcaaaccaccacagcatgctgcaggtgtttaacggccagctctccggagagaaaattcctgatgtgttgtgtttgccaatttccccagtgtaaatatttccactgcggctgatttcaagctgtgatgtgctgtcactcagtgcagagctgaaaggagatgtgctggaccagcaattagtagtgggtccaatgtggctccagtacatgaaacccagtcaggagtaaattcatgtggacatgcaaaatagataaacatgcagcattcacaggagcacgtgaggagaggccagctgtgcatgcgtgcctgcatgtcaggacacacatgccatggggatacagatgtgagaggggctcagacatgaggaggctcaggacctgctatatcagaaaactgcaggttaacttgaaagcagaactttctgccaagagacggggaggtggaacctggaaaatgggaagcagagctccctcctgactcctcctctaccctccagaacttcctacagctgcagacttccaggagtaaccgcttctcctggatgggactttcagacctaaatcaggaaggcacgtggcaatgggtggacggctcacctctgtcacccaggtagattctgggagaaagggacactgtatccagtcgggctgggttcctgcaactctgacttgagctttccctgggggtcccccccaacctccctgaccccataggactaagagtctggggttttactgagttgaggaaggtggtcttcacacccacctccagacaggatgaaaggtgccaagaattccaccagcagagctgcaggaggagcttgccctgtgggtaggtgtgttaaaatacagtgtattaataggaagtctgaagtctagtaaggccaccagctcaggagacaattgccatttacacaaagtgagtagcttatcctacccacaggttcctagagggcgcacatttcacagcagggggccgctggggaagcagcagggtctgtcgtgagggaaagtcatggaggggactgtgggccagagcttttattatggtttgtatggggagaaaagggcaaggccaggcaagcaggcttcagatgggcagatatgaagcattttgtgggctctggggcatagaggctgcctagcggcctgacacctggccttggggtgattagggcagaaagatagtggcttggagtgcaagagcccaataaggcaggtggttggcagtacagaccccagactggttggtttgtattttaaaatcacactctcggccaggcgcggtggctcacgcctgtaattccgtcactttgggaggtcaaggcgggtagatcacgaggtcaagagatcaaaaccatgctggccaacacggtgaaaccccgtctttactacaaatacaaaaattagctgggtgtggtggcgtgcacctgtagtcccagctactcaggaggctgaggcaggagaatcacttgagcccaggaggcagaggttgcagtgagccgccaagatcatgccactgcactccagcctggcaacagagcgagaatccgtctc

SEQ ID NO: 15736 - protein, 216 aa, Homo sapiens
MSDSKEPRVQQLGLLVSKVPSSLSQEQSEQDAIYQNLTQLKATVGELSEKSKLQEIYQELTQLKAAVGELPEKSKLQEIYQELTRLKAAVGELPEKSKLQEIYQELTRLKAAVGELPEKSKLQEIYQELTRLKAAVGELPEKSKLQEIYQELTELKAAVGELPEKSKLQEIYQELTQLKAAVGELPDQSKQQQIYQELTDLKTAFGEFLHIKGPWA

SEQ ID NO: 15737 - DNA, 2127 bp, Homo sapiens
catttgctgatttaaaaaaaaaaaaaagattttggaaaaagtaaggcctgggtcaccagatacacacctgccaggtgttcagatgctggtccttccctggccccttaagtgagccatgaaaaggacctggtgattcacccacagataacggaagaaagttctgttacctcttgatagcagcctttgtgtccaccccatttccccaggtgggccgagagcattggtagctaattgtaatcactccacacaattagagctgtgctgccccttcccctagccagtggacttcggtacccagagtgaagcctgcagcctgtgtcagacaccagcatgtgtaatgggaggaaacagcttccatgtccagagcgctggttccaagggcatcttcaggcactgaaattggcactgaataggcatggggaagtttcagtggaagtgaatggggagcactggggggacttactgaaagactttcagatacagggagtatttgacacagctcacctccaactggcctggttttattctgaattgtttggagcagaggaagggagagggaaaacataaagatcagggtaataggttctaggagctgacggagctgatggagctgaacagggtagggaccatggaaggtagagctattgcgcaaaaattaggcagcctctaggcaggcaggcacttggctggatccaagtggcagtgttaggtgctgtgggtgaatgcacacccacaagtatatgcacattccctgcctcctggaagctcacagttcagccagtgatacatgtatagaagtttgaagcagtaacattagatatgaggttgaattcatgctgaccggatttctgtggacttcgtggaggccctgaaggctttgtaggatctagaaaggcagaaacagatgtggtgggggataggttgaagagtcgtggatgactcactaagacattgaggtgggaaggtatgcagggactataccacactgtgtggaggagggggttcatggaaagggtaagaactcccaaagggtagatgaagagccatgaagacccagctaaggaaacccatgaatgactgggatccactggaaagtcttgagcaaagaaccggaggatgcaagtgctgcagagaacagaccccatactgtggacggattgagagcacagtgggggcccctcaagctgttccacactctgggcagtagggtttatccaagtgcccaccaccaagtatctgggcactaggcagggagcaaggggtgtttccagttccagtgttaaaaaattccatccaatttgtaggttccaaggaaggattgggctcccagaagcttggagttcttgttttatgaccaccatccagccctaagagcctggggggtttgtatgcattttcattgcgcagatggacctcccaattttctcaactttacttccctttcacatttgcacagaccatataatcatggttttaaaggtcataaagttcactgtgctaggagatacagaaatactttcttgatgacggggccaaacgttcattaagtgctttcatgtgccctgcatttgaatttattcatgatagcttcaacattctgagtgtttactgtggggcaggcactgtgctaactgtgtattatcttgtatacttttcaggacaagtgaaagtgatgaccccatttaatagatgaagaaaactgacactcaaagaagggaaataacttgcccaagatcacagagctcaggttggctggactctaggacatcccatgcctccacaccatgctgcttgtcagcagcagcacgcagagctggttgcaaaggaggggctgacatatattaagagttgaggccgggcgtggtggctcacgcctgtaatcccaacactttgggatgccgaggtgggcggatcacaaagtcaagaggtcgagaccatcctgaccaacatggtgaagccccgtctctactaaaaatacaaaaattagctgggcgtggtggcgtgtgcctgtgatcgcagctacttgggaggctgaggcatgagaatcacttcaacccaggaggcggaggttgcagtgagctgagatcatgccactgcagcctgggcgacacagtgagactatgtctc

SEQ ID NO: 15738 - DNA, 3071 bp, Homo sapiens
  CDS (2)..(1141)
aatgaatccctgcggttggctgggggcagtgggtcccacactgcctaacttccctaaatgggcagcttcacttttagaaccccgggtccttccctggcaggcccaggtggcacatcctgtgtcgggtgggccctcaccttggatctccaggcctgacactgcccagctggatggaaccatggccccagccttcctgctgctgctgctgctgtggccacagggttgcgtctcaggcccctctgctgacagtgtatacacaaaagtgaggctccttgaaggggagactctgtctgtgcagtgctcctataagggctacaaaaaccgtgtggagggcaaggtttggtgcaaaatcaagaagaagaagtgtgagcctggctttgcccgagtctgggtgaaagggccccgctacttgctgcaggacgatgcccaggccaaggtggtcaacatcaccatggtggccctcaagctccaggactcaggccgatactggtgcatgcgcaacacctctgggatcctgtaccccttgatgggcttccagctggatgtgtctccagctccccaaactgagaggaacattcctttcacacatctggacaacatcctcaagggtggaactgtcacaactggccaagcccctacctcaggccctgatgccccttttaccactggtgtgatggtgttcaccccaggactcatcaccttgcctaggctcttagcctccaccagacctgcctccaagacaggctacagcttcactgctaccagcaccaccagccagggacccaggaggaccatggggtcccagacagtgaccgcgtctcccagcaatgccagggactcctctgctggcccagaatccatctccactaagtctggggacctcagcaccagatcgcccaccacagggctctgcctcaccagcagatctctcctcaacagactaccctccatgccctccatcaggcaccaggatgtttactccactgtgcttggggtggtgctgaccctcctggtgctgatgctgatcatggtctatgggttttggaagaagagacacatggcaagctacagcatgtgcagcgatccttctacacgtgacccacctggaagaccagagccctatgtggaagtctacttgatctgaggccacttaagcatggggtggggagcttctcccagagtggccccagggggttagaggaggggtgaagattggggccagtatcgatcttatgaagctggaggacttgtgcagtgctggactcacccaggacttcccaaacccagaggctgccatcctaagcagccccacagcccagtgttctccttgggggcaggaacctggggaggggcccagagcaaagggcatcagggagaaagtcccgaggaaatgtgaccagtggcttctgctcggagctgcagaccccagggctcttggtggaggcaggggaaccctgagagtgctgtttacagagaacctcagctcccgtctgcctcagaaaccctactgggctgagctgccctccccaccagggccgctgtgtcctctgcttccctccgttctgcttcagcttcccctaaggttagggaagaaagaatcgggctcacgaatgccagaggcagtgatgtcccatcctggaggagaggaaacagtgactaaaagctggggacccacagaggggttggcagcttctcttgtcgggacaggtgtcctttgctgggcctctggatggccctgccctgactggggctgctcctccctcctgtcctgggaccccgcagagcccacgctctcactgctgcctcctgctggccgctgcctccttagaaagctgtgaccaggcagctaagagcctctgggctgcagggtcagcctctcccaagactgaagtgcagaggctggacttggggctctctcccccagcttctacacctgggctccaagtctgagttcccacaggggacccagcagcctccaggaagtccataccctggggtggctgagaccttggctctgtatggaggctgctcaccccacagacactggtggggagaccatggctcagaggaagggtggagcaaccctactcctacccctcaggatagagagagaagacacacttgggacacagtgaagacagtaacttggaactgaccacggcctggaggactggcccaggcagggggacagggaaaatggagcccaagtagcctctggccagggacccaatgtcccgaggaatctgcctcccacccactgactcagggctcagactcagcctctattgtccagagcactggcttggcgtccagcaatgaaggctggagaatgcagcctggattcccctacacacacacacacacacacacacacacacacacacacacacacacacacacacaggtgtctactgacctggagtgactggaatagcacctggggataaatgtgacaactgtgcattgaaccctgggtcagggacgttccaatggccaagagagtgacacagccaggaccctggtggacagccagaggggccacttcaggatggatgtggggagagtggaagaggcagggagtaatcctgggggacagcagggaggaggcacttcttccctatgtccaggagagggcaatagagggaagactgaggctgaagaattgacggctctggacccaggacagacagacagacagacagacagacacgcacacacacccatctctgtctagcaagcagcctcctaagatagctgttctccctatcatgacggtgtagccaccatcctgttgtatactaggagagaacttaacccacctgggggaaaatagctccccaagagctggcaccagtaccactgatggccctgcttcctctgagtgagatgcccaggaggaggagccctagggaagaagtcagggacagggaccaggataccactctgtcactgtgtgaccctcagcaagtcactaacccttggcctcatttttcctgtcttgtgaaagaggacaataattcctacttctcaagattgttttcaagataaagtaacattagcattgtacaatg

SEQ ID NO: 15739 - protein, 380 aa, Homo sapiens
MNPCGWLGAVGPTLPNFPKWAASLLEPRVLPWQAQVAHPVSGGPSPWISRPDTAQLDGTMAPAFLLLLLLWPQGCVSGPSADSVYTKVRLLEGETLSVQCSYKGYKNRVEGKVWCKIKKKKCEPGFARVWVKGPRYLLQDDAQAKVVNITMVALKLQDSGRYWCMRNTSGILYPLMGFQLDVSPAPQTERNIPFTHLDNILKGGTVTTGQAPTSGPDAPFTTGVMVFTPGLITLPRLLASTRPASKTGYSFTATSTTSQGPRRTMGSQTVTASPSNARDSSAGPESISTKSGDLSTRSPTTGLCLTSRSLLNRLPSMPSIRHQDVYSTVLGVVLTLLVLMLIMVYGFWKKRHMASYSMCSDPSTRDPPGRPEPYVEVYLI

SEQ ID NO: 15740 - DNA, 3136 bp, Homo sapiens
  CDS (260)..(2221)
attttgcaattgtgggttggctgaagaaaagaagacaacatgggaaaggaaaatctgggtgataaacggattaaacctttaggttaccgctgctctagataaacccatgatgtgactttttgtttttctcctaggtcagctgagggaacagctcagttaccttaagggtgataatttttttaggtttacttgttcggattgctcagcagatggcaaggagcagtatgaaaggctgaagctgacatggcagcaagtcgtcatgttggcaatgtacaacttgtctctggaaggaagtggacgtcaaggttatttcaggtggaaagaagatatctgtgcttttattgagaaacattggacttttttactagggaataggaaaaagacgtctacctggtggagcaccgtggcaggttgcctcagcgtgggaagtcccatgtacttccgttcaggtgctcaggaatttggagagccaggatggtggaaacttgttcataacaagcccccaacgatgaaacctgaaggagagaagttgtctgcctctactttgaaaataaaagcagcctcaaaaccaactttagatcccatcattactgttgagggacttagaaaacgagcaagtcggaatcctgtggaatctgccatggaattaaaagagaagaggtctcgaactcaggaagcaaaagacattagaagagcccagaaggaggccgctggctttcttgacaggagcacatcttctacccctgtaaaattcataagccgaggccgcaggccagatgtgattctggaaaaaggcgaagtgattgacttttcctccttgagctcctctgaccgcaccccgctgacaagcccatctccttctccttctctggatttctctgcccctggtacacctgcctctcattctgccacacctagcttgctttcagaagcagatctgattccagatgtgatgcccccacaagccttgtttcatgatgacgatgagatggaaggcgatggagtcatagacccagggatggagtacgtcccaccccctgctgggtcagtagcttctgggccagtggttgggggcagaaagaaggtcagaggccctgaacagataaagcaggaggtagagagtgaggaggaaaaacccgacaggatggatattgacagtgaagacacagattcaaacacatctttgcaaacaagggctagagaaaagaggaagcctcagctggagaaggacacaaagccgaaagagcccaggtatactcccgtgagcatctacgaggaaaagctgctgctcaagaggctggaagcttgtcccggtgctgttgccatgactccggaagctcggagactgaaacgcaaactgattgtcagacaagcgaaaagggataggggattaccactttttgacttggatcaagttgttaatgctgctcttttgttagttgacgggatttatggagccaaagaaggaggaatttccggacttccagctggacaagccacgtacagaaccacctgtcaggacttcagaatccttgaccgataccagacttccttgccgtccaggaagggatttcgacaccagaccaccaagtttttgtatcgcttggtaggatcagaagatatggctgtggaccagagtattgtcagcccttatacctctcggatcttgaaaccttatatcaggcgtgattatgaaacaaagccacccaaactgcagctcctgtcacagattcgttcccacctgcacaggagcgaccctcactggacgccggagcccgacgcacctctcgattactgttatgtgcggccaaatcacatcccaacgatcaactccatgtgtcaggagtttttttggcctggcattgacctgtctgagtgtctgcagtacccagacttcagtgttgttgttctttataaaaaagtcatcattgcctttggcttcatggttcctgatgtgaaatacaatgaagcttacatttcatttctgttcgtccaccctgaatggagaagagcagggattgcaactttcatgatctatcatctgattcagacctgcatgggcaaggacgtaacccttcacgtctcagcaagcaaccccgctatgctactgtaccagaagtttggattcaagactgaagaatatgtattagatttctatgataaatattacccattggagagtacagagtgtaaacacgcattctttctgaggctccggcgctgatgcgaatacagctcacagagaaacgcatgtgctattggagaacaggtctttgtggagatctaaaggcagtgattgatttcacagggagctctaatctctgtgattacatggtccttcaaactcccaaccaaagtgagaaaagcggcatgcagtgaaatgagcagtgagcagccctttagcaaaatcgccctccagtccttcctggagatgccttcagccagcatcccagactccacagttatttatgaatgatgtcgtgattctccctccacctgacagtttgtaagagtgaaagagcatctaacctgatgctcttggagagagataacctgtctgtcataacttaaaggatgagaaattgtggtgtagctattaaagattcatgcagtcccaaaaggcactgtcctgggatgatgagagattataaggtgatttcataaaaggaatccaaccctgtgcccggccattgatgtgttgtcattgaatccaggaggatttctagggcactgaagttttgttgtttcttttgctgactttggttacagtcagaaaaaataaactagatgtttgtgtctacatgttctacctgttgtacctattagcatcttcctgcagggacttgggcccatggcctgggaggttggtttgggattggggttgttgggcagcctgccattcacctggcctatcctggcccttctcatgcccaagacagttgtttcacaggagtggaagtgtgggtgatgcaagtagaaccctctagatgtaccctgtgtggtctgcaggactggactgtttgctgtgtttgtggatgttggcgatagactgtcagttaggttgtttgtgatccaacaagaacatttccaaaagtatctaggtgttctcaaataaaaagctttctttgcacaaccc

SEQ ID NO: 15741 - protein, 654 aa, Homo sapiens [sequence omitted]

SEQ ID NO: 15742 - DNA, 2984 bp, Homo sapiens
  CDS (445)..(747)
agctctcactcctttcgtgagaaatgtattctcttccagatatatcccttcctcagcttttctgctctggcctatctttgaaccaccatgtaagctggtgagccagttcttcatggaaactgcatggtacccatcagtcttggctaaaaatgtctgttgacaaagatgaaagtcctgccatcccctcaagacttagccttatccgcaggtagaaggcctagagaggctatgtcccaaatcctacctcaatgctgaattagactgggctcttgcttgtgctagtctgtattgaagagattagtcaagttaagaaccaaagggttcttaaactgctaggagaagaatagtggtcaaaagaatggcttctttctatcttgaactgaagccctggacttcacgggcctctgatgaggattccgcttgcagccctaagagggtctacctatggagatgacccttagctgtgtgatgcatgcacctgaccttctcctctcccctgtcatccgtccccattcctgccctgttccctgttggtatgtgtctgagtttatttcactgttaaatcgtgcgtttgcctgtctttcgcagatatctccatgtctcctcaacaaactggagctaagtagtggggagcagaccaaagccctgaaccagttagagagggtactactctttaagaacctcaaggtctctctccctctctttcccttcccctttttatttctttcaatgtttattttttatatataacacctgggtcccatttccattgtgtagagcacaacttactcctccctagtaacacagcacggctttggaagagttgcacgtgattgtagctttgcagtgttgggaattctcctggggcatctggttgcctggatacaggagaaggaagacttgaacatcacatagttagcctagaaagcctggggtctgctgttaccttgtggggaggcttaagatctaccatttctagggaaaccgtgagggaccttcaagcaagacccttccccttctaccttatccttgtctcagagctggcatagagagcttaagcacagtcctcagctctatctggattacctggactgggtttggagggaaagggtagtccatctagttgggatcttttttttttttttttttcttggttaccattaaagaggtcattccaaggattagaactctagattgatggaaagaagccaggtgccaggatagcccaggacactgggaatactttggggtctgtgaagatgccctctgtcctctaaaagtcaaggtataggggagcttaggggagggatccaagctaaagattaccctaatctgcatatacctgctttaggaagaaaggggagagaaggaggtgtaggctgtctgggctgtccatcacaagagtgtgcatgctgaaggtgtggttgtggacatacaggtcactgaaagtaaaaaactctgtgtatgtacacctagctagatagtccattggcccgtgttctctttgaatgcattgtgtcatttcatttgtgtgcttgcacagtctcaagctgcagctctcattagtggctatccagcatgttgccatgattattaacctgggacctgctccttttttgtaaagcttacactgtcctttggagtacagagtcatacagataaggtggcgtagaattccatgaatacctactgcccaccccacaccttcagaccttaggagagggagaatagctataccttttaagggctgaggcattcgtgagaactggcagcctcttggcccctactccagccagcaggctgagaacactaattgaaatgatcaggttggagcaagctttgcagaagatagagaaggaaacgtgaaaaactgatcctcgtatgggaaggaatctcaatgactgactggcttctcagtggaagtaggactgcctggagtccctgaaatgggggagcctcctggagagaaaggctacctcataaaagtagatccagttcttagtacttttgggagctcaatgataactgccagtagagccaggaggtctctcattgatctcttggcctcttgcccttttgcatgtttggcggactcttctcccataacaatttttactatgaacttgatccagttgagctccagtggttcctggggagagaatccttttgcttcctccttagctatagcggtcagtacgcctgaagctcagttctaagcatatgactgcaggcattttggagatggatcatctagaagtataaatccagtatgaggctgttgctatgttactaagagctgggtgaaggaagggctcagctgttcagcctcatctttattggaaggagctatgggtaggaatggaagaattgtgtggtttctaagcaaggaatcaaagattacccaggttctgagagcttgggggagcttgaggaagggagtcaatccctcactatcaaaaggaattgaacaggccatggacaataggatatattcagcctttaggaagaggcagagagaaaaagtgcttctgctctctttagagtcattctaatggtttctggaagagtgttgccattgcccaatccaggaatggtccaatccaagaatggtctatcagtctaggaatagtttagaatgactttgtagagggactgagttcaaacccaactgagaaaacatcagggcttaaaaaacaaattgggccgggcacagtggctcacacctgtaatcccagtactttgggaggccaaggcgggcggatcacgaggtcaggagatcgagaccatcctggctagcacggtgaaaccccgtctctactaaaaatacaaaaagaattagccaggcttggtggcgggcgcctgtagtcccagctactcaggagactgaggcaggagaatggcgtgaacccaggaggcggagcttgcagtgagccaagatcacgccactgcactccagcctgggtggcacagtgagactctgtatc

SEQ ID NO: 15743 - protein, 101 aa, Homo sapiens [sequence omitted]

SEQ ID NO: 15744 - DNA, 3334 bp, Homo sapiens
  CDS (1553)..(2224)
aagtcttttttcctaataatccattttccacattgccatgagggtaaagggttccaatcaaaaccaccattaaactgcatagtttctagtcttccctcagccctgatgctaattatgatagtttgcatagacataacttaaacttgtgattctccctccttccagagctttttgtagccctttttccccccaaaattagttttgttcaaaatcaagcattgggcccagccattaagataagacctaataagtgagagatacagttcccaagagtttacagatccaggtgttcacatggtggtggccagtctaccgtttatcttgtcaaggttgttactgctaatttggtgtcactttggtcttgggcagcggtggtgggcgacgtatctaatgagcgtgccattgacttctccatgtttgtctgtgtacgaggggtgcaggttgtctgtaatccactaaagtgtcagccacacccagctttagtaactcgctaatcgcacaccctgggtatatcagccaggggctgctacagttaatggtacacagttgatggtacacaggctgaaaatgataacgaatcaagaccctactacatttccaaagccgaaaagccatgagggttacaatttaaatgagcttgggaaggaacgctcccgaagacgtctccagcctgaagggtcagagccgctggaagcctggctgtctctgggctttctcgtctcagtgcagcaaggcaccgtgatcaaccaacccgtgatggggaaggccctggttctgtctttgtttgggggtaaatagctgtgtggtgttgagtgactgtgattggcttttccagctcctttaacacaaactacaacccactcacgatacaacttcggcagatgtggtcaaattgatgtttgttgacttgcctcatttccttccagctcttaagttccaaagtctaactgggatggtagatgtgaaatgcatgattgtcgtcctaatttctgcatgtgtttatgacaatgtgttgaggggagggggaggagagccagagagcattttcaggaaccgaggtctttccttgtcttactctgggggaatgccatgtagctctgatagagttgtctatcggtctgtttgtgaatgccctttcgcttaaacttccagcccttctggtggcatccttggttgtaaggtggctgctgtataacgtccactctctttcatatttaatatgtgtgattgttactgttgtctttttgttttaaagtaaccataagaggagatgatctgagttatatttattgatcagaggaatagagtgcagtaaaactcatactggcatttcgcttttctcatttccctgtaaatgggcgggtattaatccattcccaccttctaatgtccttgatgtccagctggctttgtgggtgtgcaatggttttactgtactgcctcgatctgtgccaggcatttatacacagccacatgtgcgagtcaggtagagcgtatgtggtcacccccatggctcacggagttagctgaatggcctctccgctgtccctagatggcagaaacggtggacacaagcgaaatggtcaacggcgctacagaacaaaggacgagctctaaagagtccagccccatcccctccccgacctctgatcgtaaagccaagactgccctcccagcccagagtgccgccaccttaccagccagaacccaggagacaccttcggcccagatggaaggcttcctcaatcggaaacacgagtgggaggcccacaataagaaagcctcaagcaggtcctggcacaatgtttattgtgtcataaataaccaagaaatgggtttctacaaagatgcaaagactgctgcttctggaattccctaccacagcgaggtccctgtgagtttgaaagaagctgtctgcgaagtggcccttgattacaaaaagaaggaacacgtattcaagctaagactaaatgatggcaatgagtacctcttccaagccaaagacgatgaggaaatgaacacatggatccaggccatctcttccgccatctcctctgataaacacgaggtgtctgccagcacccagagcacgccagcatccagccgcgcgcagaccctccccaccagcgtcgtcaccatcaccagcgagtccagtcccggcaagcgggaaaaggacaaagagaaagacaaagagaagcggttcagcctttttggcaaaaagaaatgaactcctttccttcacctcctgccctactcttaccttttcagtgaaattccagcatgcaagctcagaaccaacacattactctctgtgcctaatgttcctcaatgtggttgattttttttttttttttaatttatagagcatttcggggggggtgggggaaacacacctaaacactttatctccaagttacaaaagtttgaggtgcagagggaaggccagattttttttttaatgaaattatatagattagatctcagtatttaaactgttcctcaatttgtgaggctgtgttggaaataacccgcctctagtgctgttggtatgcaaggcagcgatgcttaatcaatatttcctgtgctcaccagaggcaaaatgtaccaatatcctgacaccattctctctccatttacttctggtggttaccctgactcttgactcttagaagtgcccgagatggggctaacctttattaaacagatcgcatattatgatcttgctgcagccacagtgcagctccacattaactctacagaccaaaccatttgtatctggcatcacttactaacacacgacatgcggcttttctgcatcaactgctatgacggttaagaatgtcagtatacaagaaggaatagaaaactgatactgttttaaataatctgtaatttcaattttttttttttttgctgaaatacattatattgtacgtttgagataattctagtacaaagtataataaaactagatgtataataaaccctttaaatcattggtaagtgtacaagtggtggaactgaagcatttactggacaaagtaatgttactctaatggttacttgctcgtgcgttgccacactgtgttataatttgcttcatttccttgctatttgatacatagtgtgcatttctctgtcactgtaactattgtaatgacaaattttcatcttactgcacaatcaaaatgacattgataggaatgaactccagaggctgggcctgaacagggaggtggtcgctcaggcctggtgctcagtcgtacgacctgtacctctcaacttttgccctatctgttaaatatatgctatgtcattaaatgcttttaaatct

SEQ ID NO: 15745 - protein, 224 aa, Homo sapiens
MAETVDTSEMVNGATEQRTSSKESSPIPSPTSDRKAKTALPAQSAATLPARTQETPSAQMEGFLNRKHEWEAHNKKASSRSWHNVYCVINNQEMGFYKDAKTAASGIPYHSEVPVSLKEAVCEVALDYKKKEHVFKLRLNDGNEYLFQAKDDEEMNTWIQAISSAISSDKHEVSASTQSTPASSRAQTLPTSVVTITSESSPGKREKDKEKDKEKRFSLFGKKK

SEQ ID NO: 15746 - DNA, 3206 bp, Homo sapiens
  CDS (469)..(1179)
agttgcagcggccggggaagatggtggaggacggcgcggaggagctggaggatctggtgcacttctccgtgtctgagttgcctagtcgcggctacggcgtcatgggtgagatcctgcggcagggcaagctgtgcgacgtgaccctcaagattggggaccacaaattcagtgcccaccggattgtcttagcagcctcgatcccgtatttccatgctatgtttacaaatgacatgatggagtgcaagcaggatgagattgtaatgcaaggaatggacccaagtgccctggaggctctgatcaactttgcctacaacggcaaccttgccattgaccagcaaaatgtccagtcattgctgatgggggcgagcttcctgcagctgcagagcatcaaagacgcctgctgcacattccttcgagaacggcttcacccaaaaaaactgcctgggtgtgcgccagtttgctgagacaatgatgtgtgctgtgctgtacgacgctgccaacagcttcatccaccagcactttgtggaggtgtccatgtcagaagagttcctggccctgcccttggaagacgtgcttgagctggtgtctcgggatgagctgaatgtcaaatctgaggagcaggtctttgaagctgcattggcctgggtcagatacgaccgggagcagaggggtccctacctgcctgagctgctgtccaatatccgcctgcccctctgtcggccccagttcctttcagacagaatacagcaggatgacctggtgcgttgctgccacaaatgcagggacctggtagacgaagcaaaggactaccacctcatgccagagcgccggccccacctgccagctttcagaacccggccacgctgctgcacatccatcgctggacttatctacgctgtagggggcctcaactcagcaggtgattccctgaatgtggtggaagtgttcgaccccattgccaattgctgggagagatgccgtcccatgacaacagcccgcagccgcgttggcgtggccgtagtgaacgggcttctctatgccatcggaggatatgacggcaagctacggctgagcactgtggaggcctacaacccggagacagacacatggaccagagtggggagcatgaatagcaagagaaggtattctggaagccacgtgcagcccgaacatacacactgagcacctggggagcgccatgctagacgagcaggggcacacagtagagtaaaatacaagctttggcctgggagtttcctgcagccaggccagccactgccagtacctcctgggagcgagcccccatctgcttaaaagtaaaatatccaccttgtcctttggggaacttggggagaccaggcgtggacatgtggaagttgtgttgttattttaagtgccagataaggactggaaatgtgtattatggaagattcgaagagggagagaaactggactggaacttctggaagatttcagggaagaggtgggattaaagttgaaacttgaagaataaggaggatttacctttattagtgataaaaggaaatccaaggtgtttttctgtgtaccttccttccccaggactcccctcacacatgcacttccactacctggggagaatacgaaccaaagcaatgttcttttatttaggtcacacacattctcccagacaggagcacataggtatttgcaaggtgggccaagttgatatgtcactcagtacattctagctacctgctctctccacttctctgcttatattgtctgaataagaagtgggattagaagacatcccagtgcctttgtttagcccttcttactgctgaggtgacaggtggcatgtttcattatgtcagacacgtgatggagtcatcacatgtgtgggcagctgaaaagctggcgcagcccaaggaggggagaggaaagctgcccagggccccctggccgttacccaggacagctctgcactgattgcttttacacattgagcttccttgatatatgcctaatgttgttccacatccagcagcgtttgcatgtggatgtgagctgggagggatctgcctttgtactggtgagaccagttcacaaagcatcggagtaggttcctttgggaagaaaaaaatacgtaagatctgccctcccaagaacgcgttgagagtcctttcctcccaccatccccacttttgctccttggatactttgcagcttcctatgtttgagtgactcattgctccgtgtccccaaccatgagtagcttttttgctttgactgcagtcagctgtccttccttgtgtgtctgctctggaccacttccttgctttgatgttactgggtttagagggctgtcttggaggaaagttctctgggtattcctttccttcactgtggttaatatcctgttattagtgtgggcccggttccattacatcccttttaaattacaggctaccttaaaacgttcctagtcacttctcttctgacatcccacacagctgtctgttctgccagttagtgacatcctgccatctttccttcctatctcccccagtgttctacgccatcccatagacctttcttacactggactattccagtccatgctgatcagcattttctccttctcttcacactcgcctttaccacctagttgatagttaatctcatgcagttttggggcacctcttaattcattttcatattgttctacacctgttttgttatgtaatttttatgtttgttttgtgtccgtatccagaaggatagtgatcatgtctagtaaatttgtgatcttcccacaatacttgcctaaggcaagtccctctcctctttctggctggttcagggggtcagttatcatgtccctgaaagggacattctgtggatcagtttgattactatgtacatttaaaaggtagcagcaagccaggtatggtggctcacgcctataatcccagcactttgcgaggccaaggagggcggatcacctaaggtcaggagtttgagaccagcctggccaacatggtgaaaccctgtctttactaaaaatacaaaaattagccaggcatggtggcgggcgcctgttatcccagctacttgggaggctaaggcagggagaattgcttaaaccggggaggcgggggttgcaatgagctaagatcgtgccactgcattccagcctggttgacagagtgagactccgtctc

SEQ ID NO: 15747 - protein, 237 aa, Homo sapiens
MMCAVLYDAANSFIHQHFVEVSMSEEFLALPLEDVLELVSRDELNVKSEEQVFEAALAWVRYDREQRGPYLPELLSNIRLPLCRPQFLSDRIQQDDLVRCCHKCRDLVDEAKDYHLMPERRPHLPAFRTRPRCCTSIAGLIYAVGGLNSAGDSLNVVEVFDPIANCWERCRPMTTARSRVGVAVVNGLLYAIGGYDGKLRLSTVEAYNPETDTWTRVGSMNSKRRYSGSHVQPEHTH

SEQ ID NO: 15748 - DNA, 4078 bp, Homo sapiens
tcttttggtgctgtctcaaatgggtcaaccattcacttcctccttatgccctccatgcttttggctgaggataatgaagcctttgtttggagtaccaggttacactccaataaatgattacatttcccagccaccccaccctaccaatttcattgtgttggctgttcttttccgactaaggcaatacctaggaaaacgcttgaagcagcaattgttactgcaattttctgtgagctgagcctggtgttctaggtggcctagaaataatggtgtcatttgtgacacctcgagtgagggcaggagagtaaatactttggctaggagaagagtgatttattctttatcagaattctaggtgggggagggagaatctgtgaatgcataaagttttcttcatttttaaattttgtctcagtctttattgcttaggttagtggtccttgaacttgtcccctgaaagagcccagttctctatattctttttcttctcttgggttcttaattccccatatagtggaaattccttctttgctgttttggtatgggtaggtctgggggccagctgggcttggacaagccatttcctgctgcagcccagagcagcctggctgttccaccttgctctaaacagtcctgaaattgcccagtcctctgcttttgggaaatccatccccttcttcccattctttgtctaccacttagcttagggctttcttaccttttatttcgactgtagccgttggcttttaccaagtctctttgtttttagcatttcttcattccagtctgttctgcacactttgatcaggagaagcttctcacattccagccatgttcatgttttctctcttgctcaaaaacctgcaatagcttcccattgctgaaaatctaaatttagcttttagtcagaactttccacttaaagttcttacccctggctatatattcaaatatctagggagcaatttaaaaaatactgatgcctgtgttctaccccccaccaattaaagctgaatctctagggtggagcctcagatgttgtttctgcatttgtctttcaagctgctagaattctcaagtacaaccagggttgacaaccactgcattggtccttgatacctaagaattgtgagctctcttatccgtctctgcccaccaaagacattcagccaggtcaacaacatatcatacgttgcaaccacattgatcacagactgatcaccaaactgctatattttcttttctcttcctctaggcgcaagatatcttagtggctagatgggtgcaggaaatcagtctgtagatccctcttcatatctgctgcagcctagccactgcagaggcactctgcataggatggtctaagtgtctctgtcttcatcttacctctgtggaggagacgtggaatcaagccagcccacaagccctgagactggataggccggagagaaagaggagtagccagagcggtcgggaaaagaggaaaggaatactgtgggtaaaagggacaaagaccacgcaacctgaggaaagacattgtattgaaagggtaatgactatttggctaaagggactgactcctgggttcctgaggctcaaagaccaggagacttttccactcttgcaagctgcacaagtaccatacttagtgttctgggctgagaggggagacaaaagcatcgtcaggttgccaaacaatgtcccagttgccctgggaggcacaaacctaccaaagtgccataggccaggtgcagagagaatcagaggagctgatttgcttggggtcagagcagagctgggttttttcagatgatcactttcacatactccttgttaaatgggaccaaaggggaagaagaagaaacccttaagcttttgtaatattgtcttgggtaccagataccataaaaggcagcatgagagaaacattcccttgggccagtgtcatggtggattttcttgcttgagaggcaaggatttcagctttcatttggtaccacagaatttaaaattgtaagtgcctatcccttttgactgttgatggcttctttggggttttagttaccccagttgaaagagaaatttttcatattggggttgagaagaatggaggctattaggagcaaagctttaatgagtgaaagtctggtgaatcctgcaattttgatatgtttccagtggattttgagaacacagttttaggaccagagtagatgttgttccctagaaaatagagtcagctattgatattgtgcctcccatccctcatatctcagtgttttaaccccacctgagtttggagaccagtttgtccaaggatctttcaaacatgtgagcccagagtagaacttctgagtcaaggatcatgtctttttctgaggagctttgcttggggcactggaaatcctgtttagatcaggactattggaatattatcctctccaggggaagtgccaggttgaacatttaaggctttgcttctaggcccagctatacattcaccagcaaatcacttaacttcctaaatttctttaaaatctgtaaaatgggatcagtctaatatgcctacctcaaatgatgacagaatgacatctatatgcatatgaggcctacgttagttgaaagatgctataaagatataagggatttgttacttgtctttcttgaaatgttacagttggggtgcggttgcttctatcttctggacctctgcccattcagcatacagctagaggaatctttgggcagatccacattctttagcactagctaggctttgactccaaagctatctggtctaccttgatgttctgagcaggaaaactgaggacctcaagaaccattccaaatttctactcattctccctaagacccagagcagacccaggacctaaagaaattacatcatctctattttcccttggctccagcccactcttgtttgaacctcccacttttgttgttccaactacttcttgagatgaaggaagggcagaacattggccctcttcactgaagtcttcaccccttaatccagggttcaatttttagttcaccttagcctgtttgagattagaagctgggccttaacttacaggtgtgtccggcatcattcaatcagcctgttagatccagaatccagcactgtgacgctacataaccatgggctctgtccttccagttcctttagtgccttccctcactggtaggttcactctgagggcttccttccttgaactccagtggcaactatagtctgtttcccacaatttgttgtgtgtgttttttgttgttttgcagcgttttcatattgtcttttatgtaagtcatgtttctgaactatcgtataaatttcattagggtaagaatcatgtttgctttatgcactgtgtaacatgccttgcagtcagtataggcacttaaccttattgatcagttgttccttggtgttgaataatgtgttaggtagccaggtggacctgtgtcctagcctggagaagctctatgtcaccttgtaggaagccatctgaatttgactcagcatcatatgctgggcctgtgctgcacttgagctttctttccagccgccaggagggatggttgtcctggccaacagcgaatttaatgggtggtcaaaagaagatgtgcctgcatagaaggctgaaagagggagctggaagtaggaggagacaaggagatagtgacaccagtatcttgtcacagaaatcaaggaaggcaacagtttaaaggaggggagggagatcagtggtgccaactggctcagaagaggtttgctgggttaaatctcaagatgagcccatgagatctggtggttagcagaggcctttcctgacaaccccattttaagcacctcttccccatcactctatctcatcactgttactgtctgtgtagccctgtcatgagctaaaatcatcctgtttgtttattgctagcttatgtgtctaaagtatactccttgagaacagcaactttgtctttttcacctttgtactgagtcccctgacatggaataagatatgaataaatgcacagacttgtccaaaatcatccaatt

SEQ ID NO: 15749 - DNA, 3175 bp, Homo sapiens
  CDS (337)..(1767)
ggtgaaggcctcccccgtcgccgcgcggcttcccggagccgactgcagactccctcagcccggtgttccccgcgtccggacgccgaggtcgcggcttcgcagaaactcgggcccctccatccgccctcagaaaagggagcgatgttgatctcaggaagcacaaagggaccttcctagctctgactgaaccacggagctcaccctggacagtatcactccgtggaggaagactgtgagactgtggctggaagccagattgtagccacacatccgcccctgccctaccccagagccctggagcagcaactggctgcagatcacagacacagtgaggatatgagtgtaggggtgagcacctcagcccctctttccccaacctcgggcacaagcgtgggcatgtctaccttctccatcatggactatgtggtgttcgtcctgctgctggttctctctcttgccattgggctctaccatgcttgtcgtggctggggccggcatactgttggtgagctgctgatggcggaccgcaaaatgggctgccttccggtggcactgtccctgctggccaccttccagtcagccgtggccatcctgggtgtgccgtcagagatctaccgatttgggacccaatattggttcctgggctgctgctactttctggggctgctgatacctgcacacatcttcatccccgttttctaccgcctgcatctcaccagtgcctatgagtacctggagcttcgattcaataaaactgtgcgagtgtgtggaactgtgaccttcatctttcagatggtgatctacatgggagttgtgctctatgctccgtcattggctctcaatgcagtgactggctttgatctgtggctgtccgtgctggccctgggcattgtctgtaccgtctatacagctctgggtgggctgaaggccgtcatctggacagatgtgttccagacactggtcatgttcctcgggcagctggcagttatcatcgtggggtcagccaaggtgggcggcttggggcgtgtgtgggccgtggcttcccagcacggccgcatctctgggtttgagctggatccagacccctttgtgcggcacaccttctggaccttggccttcgggggtgtcttcatgatgctctccttatacggggtgaaccaggctcaggtgcagcggtacctcagttcccgcacggagaaggctgctgtgctctcctgttatgcagtgttccccttccagcaggtgtccctctgcgtgggctgcctcattggcctggtcatgttcgcgtattaccaggagtatcccatgagcattcagcaggctcaggcagccccagaccagttcgtcctgtactttgtgatggatctcctgaagggcctgccaggcctgccagggctcttcattgcctgcctcttcagcggctctctcagcactatatcctctgcttttaattcattggcaactgttacgatggaagacctgattcgaccttggttccctgagttctctgaagcccgggccatcatgctttccagaggccttggtggggttatgcttcctcatctcttcagtctgggtctttctaagcttcatcctgaccattgtcatcagtttgctgtaaaacacccactttatccggggctcagcacttgcctaatgaagcacacaaccttccctgcatgcatggttgtttccatctcagggcatgtcctagggaggtctctgagtcacataggagtgaggacttggtgggaggaagctggggcgtgatgtaatatgcctttgtttccagagagacagaggtggtagtttggctgggcagggagccttgctttaccccattgcttgtgttaactcacaccttcttgtttcctctcctgtccttttcccccagcctttggctatgggctgctttgtctaggaatggcctatatttcctcccagatgggacctgtgctgcaggcagcaatcagcatctttggcatggttgggggaccgctgctgggactcttctgccttggaatgttctttccatgtgctaaccctcctggtgctgttgtgggcctgttggctgggctcgtcatggccttctggattggcatcgggagcatcgtgaccagcatgggcttcagcatgccaccctctccctctaatgggtccagcttctccctgcccaccaatctaaccgttgccactgtggccacactgatgcccttgactaccttctccaagcccacagggctgcagcggttctattccttgtcttacttatggtacagtgctcacaactccaccacagtgattgtggtgggcctgattgtcagtctactcactgggagaatgcgaggccggtccctgaaccctgcaaccatttacccagtgttgccaaagctcctgtccctccttccgttgtcctgtcagaagcggctccactgcaggagctacggccaggaccacctcgacactggcctgtttcctgagaagccgaggaatggtgtgctgggggacagcagagacaaggaggccatggccctggatggcacagcctatcaggggagcagctccacctgcatcctccaggagacctccctgtgatgttgactcaggaccccgcctctgtcctcactgtgccaggccatagccagaggccaccctgtagtacagggatgagtcttggtgtgttctgcagggacaggcctggatgatctagctcataccaaaggaccttgttctgagaggttcttgcctgcaggagaagctgtcacatctcaagcatgtgaggcaccgtttttctcgtcgcttgccaatctgttttttaaaggatcaggctcgtagggagcaggatcatgccagaaatagggatggaagtgcatcctctgggaaaaggataatggcttctgattcaacatagccatagtcctttgaaagcaagcacgttttccacctcactgtctccaccctccacctctgagatggacacttaagagacggggcaaatgtggatccaagaaaccagggccatgaccaggtccactgtggagcagccatctatctacctgactcctgagccaggctgccgtggtgtcatttctgtcatccgtgctctgtttccttttggagtttcttctccacattatctttgttcctggggaataaaaactaccattggacctag

SEQ ID NO: 15750 - protein, 477 aa, Homo sapiens
MSVGVSTSAPLSPTSGTSVGMSTFSIMDYVVFVLLLVLSLAIGLYHACRGWGRHTVGELLMADRKMGCLPVALSLLATFQSAVAILGVPSEIYRFGTQYWFLGCCYFLGLLIPAHIFIPVFYRLHLTSAYEYLELRFNKTVRVCGTVTFIFQMVIYMGVVLYAPSLALNAVTGFDLWLSVLALGIVCTVYTALGGLKAVIWTDVFQTLVMFLGQLAVIIVGSAKVGGLGRVWAVASQHGRISGFELDPDPFVRHTFWTLAFGGVFMMLSLYGVNQAQVQRYLSSRTEKAAVLSCYAVFPFQQVSLCVGCLIGLVMFAYYQEYPMSIQQAQAAPDQFVLYFVMDLLKGLPGLPGLFIACLFSGSLSTISSAFNSLATVTMEDLIRPWFPEFSEARAIMLSRGLGGVMLPHLFSLGLSKLHPDHCHQFAVKHPLYPGLSTCLMKHTTFPACMVVSISGHVLGRSLSHIGVRTWWEEAGA

SEQ ID NO: 15751 - DNA, 3345 bp, Homo sapiens
ggaatcttttttttctgagcagtaggtctcattagtgagcttagaatactccataaaccatgctgtaaacagatgcactgtcatccaggctttgttattccatttccaacacaggcagagtggatttagcatcattcttaagggtcctagaatttttggaatgggaaatgaccattggcttcacgtcaccagctgcattcgcccctaacgagagtcagcctgtccttttcaatctttgaagccaggcattgacttctctctagctgcgaaagtcctagatgccatcttcttccaatagaaagcggttttatccacactgaaaatctttttagagtagccaccttagtcaaccatcttagctagatctggagaacttgcttcagtttctcctgtaaagcttgcagcttcaccttgcacttctatgtgtggaagtgacttctttccttaaacctcatgaaccaacctctgctggttttctgcttttcttccgcagcttccctcacccgtctcggccttcatagaattgaggacggttaggaccttgctgtggattcagctttggttgccagtcacaccagccgtcgggcaaagttgttgttttaatctctccagaccactcagacttcttccacatcagcaataaggctgtcttgctatcctgtcatttgtgtgttcactggagcagctcgtttaatttccttctggggcttttcctttgcattgccgctcagccgtttgatgcaagaggcccggctttctgactgagttttagacatgcgttcctcacaaagcttaatcatttctagcttttggtttaaagtgagagatgtgggattcctcctttcacgtgagaggccatggtaaggttactaattagcctaatctcaatattgttatatccagggaagggggaggctggaggaaagggagagatggggaacagccggttggtggggatgtaggaaacacacattgataattcagcttcttatatgggtgcggttcatggtgccccaaacagtgacagtagttttagattcctgatacctgccgggcacctggcatgggtgtggagggcagagttctgaggtggtctcttagattcctggcccctaatgtacacaccccttcttccagttactcattcagacactcatctggtactgtcatgaagagacttgcagatgtcgggaggtcccaggtcagtgaggtgagaagggaggtcgtctgggagagcctgacctaatcacacagaccctgggaagcagaggttcctccatctggttggagaacagaggctgagattagatgcgtgagaaaaatgtgatgtgctgtgcctgccttgagattcaggtggcccctagggacggctcctgctcacagccagtaagcacatagggttcttagtcctacagttgcagggaactggattctgccacgaaatctgaatgagtttggaaaccagttttccccagggcctccaggtgagagctcagcccgatgacatacagttgcagctttgcgtgaccctgcgtggagatcccagctggcctggcctggatgtgtgacctgcagaactgtagggtaacaaatgcatgctgctttaagctgctgagtttgtgtaaattgtttttggagcagtggataactgggagagggcttggcactgggcgggtggagtccccttcttggaagcagttcccagagtgaggattcccagactgcaggctggggcattgccctccacagcggggttggatagagcatcccagtgcctgcgtgaggtcgcataattccgggtccagtcagcttttccaaagtgagcacctgtgtgactcagggcaccaccatgtgcccctgccagtgacagtgtctcctgaacaccattgcagcttacatccttccaccagggattggctctctgttttctagctttatgtaaatggagtcgtacaatatgagctcttttgtgcctggctgcttttgctcagcacttcgtctgttgtgaggtccacctgtgcttttatgtgtggcagttttttttctgtgcattattgtttgtgtgagtcttctgttgctagatatttagggtgttagaatgttgctaagaacactctagctacagacttctgcagggtaggcttgcagtttctccagcaacctaattcccttgaaaatatcctcactgttggggctgcttgctgccagtgcatcccacgtcacagctctggttttggtttttgttttttattttttgagatggagtctcactttgtcacccaagctggagtacggtgttgtgatctctgcttaccgcaacctctgcctcccgggttcaagtgattctcctgtctcagcctcccgagtagctgggattacaggtgcatgccaccacgcctggataatttttgtatttttagtagagatgaggtttcaccatagccaggctggtctcgaactcctgacctcaagtgatccacccaccttagcctcccaaagtgttgggattacaggcatgagccgctgtacctggtgcagctctggtttttaaacgagcagaacctccagttttatttactggcttctgggctgggctgatcccccctccctcattatattggcagtggccttgaggtattgaagacagtagtagtggatgggaaggcaacattactgatcttcgcagtggcccggctcccactgcccagcaagaaccccaaagagaaggctcttgaggcgagacagtcagccttctcatcctgagagccacattaatgggtcctcagtgcataagcagaatatatatggaaattaagcaaatacatggctgggtgtggtggctcactcctgtaaccccagcactttgggaggccaaggtggctggactgcttgaggccaggagtttgagaccagcctggccaatatggagaagccccatctctactaaaaatacacaagaattgcttgaacccaggaggcggaggttgcagtgagctgagatcacgccaccatgcaatcagcctgtgcgagagagcaagactatcttttaaaaaaaaaaaaaaagcccgggcgcagttgctcaggcctgtaatcccagcactttgggaggccaaggtgggctgatcacctgagtttgggagttcgagaccggcctgaccaacacggagaaaccccatctctactaaaaatacaaaattagctgggtgtggtggcgcaagcctataatcccagctacttgggaggctgaggcaggagaatcgctggaacccgggagctggagattttgatgagccgagatcgtgccattgcactccagcctgggcaataagagcaaaactccatctc

SEQ ID NO: 15752 - DNA, 2964 bp, Homo sapiens
  CDS (96)..(1709)
acaactatttggccctgagaagtcgttctggacgctccatcatcaatgggaactgggcaattgatcgaccaggaaaatacgagggcggagggaccatgttcacctacaagcgtccaaatgagatttcgagcactgccggagagtcctttttggcggaaggtcccaccaacgagatcttggatgtctacatgatacaccagcagccaaacccaggcgtgcactacgagtacgtgatcatggggaccaacgccatcagcccccaggtgccaccccacaggagaccaggggaacccttcaatggccagatggtgacagaaggcaggagccaggaggagggagaacagaaagggaggaacgaggagaaggaagacttgcgtggggaggcccctgagatgttcacctcagaatcggcacagaccttcccagtcaggcatccagacagattttctccccatcgaccggacaacttggtgccaccagcaccgcagcccccacggcgcagccgggatcacaactggaagcagcttgggacaacagaatgttccacgacctgtgggaaaggatcgcagtaccctattttccgctgtgtgcacagaagcactcatgaagaggctcctgagagttactgtgactccagcatgaagccgacccccgaggaggagccctgcaacatcttcccttgcccagccttctgggacatcggggagtggtctgagtgcagcaagacctgtggcctgggcatgcagcaccgccaggttctgtgccgccaggtgtacgccaaccgcagcctgacggtgcagccctaccgctgccagcacctggagaaacctgagaccaccagcacctgccaactcaagatctgcagcgagtggcagatccggaccgactggacctcgtgctcggtgccctgcggcgtgggacagaggacccgtgatgtgaagtgtgtgagcaacattggggatgtggttgacgatgaggaatgcaacatgaagctccggccgaatgacattgagaactgcgacatgggaccctgtgccaagagctggttcctcaccgagtggagcgaaaggagctcagcggagtgtggggccggagtgcggacacgctcggtggtgtgcatgaccaaccatgtcagcagcctgcccctggagggctgtgggaacaaccggccggcagaggccaccccatgtgacaacggaccctgcacgggcaaggtggagtggtttgccgggagctggagtcagtgttccatcgagtgtgggagcgggacgcaacagagggaggtgatttgtgttagaaagaatgcagacacctttgaagtgttggacccctctgaatgttctttcctggagaaaccccccagccagcaatcctgccacctcaagccttgcggagccaaatggtttagcaccgaatggagcatgtgttccaagagctgccagggtggctttcgggtccgggaagtgcggtgtctgtctgatgacatgactctaagtaacctctgtgaccctcagttgaaaccagaagagagagaatcttgtaaccctcaggactgtgtccctgaagttgatgaaaactgcaaggacaagtactacaactgcaacgtggtggtccaggcaagactctgtgtctacaactactacaagaccgcctgctgtgcctcctgcacccgtgtggccaacaggcagacgggcttcctggggagcagataacactcctgcacccccatcagtagggcagcatcactgccttcccgggggcttcagcagtgcgcctggctggctgctgctccaccacgggccccctggcccaggcgctgccaaccaacttagtcaccacccctgcctccggtgaatgcaccccgtagtacccaggggctttttacacaagatgtttgaaagccacagtcagtcctttaagcatcaccatgtactgatgatcccctccttggacctggcatctgctaatggtgccctttgaaagtcaagcagtgggaagtacatggagctctcagccctgctcccatctggcaccttcaagtcagcagatgggccactgacagagcactgccccatccctggtgctactggtctttctaaacttagcaccctggagagtccaaggaggcagcgcccccaacccagcgccccactaagccttgctgacacgcgtgcatccctctgtgacctcagcccagatgtgcctgttttcattctcaaagacattagactgttttcctgccctatgacacagatagctcacatgaatattgtgctttatttagcaggtgtactcacagatactagctccttagcagctcacaacatcccagaatggaggcaggggggtgactcattatccccattttactgacagggaaactgaggctcaacttaagtaattgacctgccaggtatattcacccatccagtggaagagctgagtccccgccccagtcatctaccagtatccagcatggggcctgtacttagatgtgaaaggtgctgcttcatttctgaccaagagactgagaagtttcccagaatgcaaacaaagcccaggcccctgaaatctttccggtcaagcctttatcccagcactcagttgttttggatgtctgttcctacttgcccttacccccaaagttacagatcctagttacaggactctgccagctttgttaaactgtccgtgagacaagaaagccattggggaaaccaggtgattgcctgaaattcttactccgttccaagtgctgttcctcccaggaaatcaaaggccagggtccttatggccgtggagccttcccgaccacagagccaacttgtgaagcacacagctctgcagcctgggctctgccctgcctcagccgcctcccccacgctcttcaccacgttcctggagagtccggccaacctgtcccagccaaaacactgctgtattagaaaaagtctctttctggtc

SEQ ID NO: 15753 - protein, 538 aa, Homo sapiens
MFTYKRPNEISSTAGESFLAEGPTNEILDVYMIHQQPNPGVHYEYVIMGTNAISPQVPPHRRPGEPFNGQMVTEGRSQEEGEQKGRNEEKEDLRGEAPEMFTSESAQTFPVRHPDRFSPHRPDNLVPPAPQPPRRSRDHNWKQLGTTECSTTCGKGSQYPIFRCVHRSTHEEAPESYCDSSMKPTPEEEPCNIFPCPAFWDIGEWSECSKTCGLGMQHRQVLCRQVYANRSLTVQPYRCQHLEKPETTSTCQLKICSEWQIRTDWTSCSVPCGVGQRTRDVKCVSNIGDVVDDEECNMKLRPNDIENCDMGPCAKSWFLTEWSERSSAECGAGVRTRSVVCMTNHVSSLPLEGCGNNRPAEATPCDNGPCTGKVEWFAGSWSQCSIECGSGTQQREVICVRKNADTFEVLDPSECSFLEKPPSQQSCHLKPCGAKWFSTEWSMCSKSCQGGFRVREVRCLSDDMTLSNLCDPQLKPEERESCNPQDCVPEVDENCKDKYYNCNVVVQARLCVYNYYKTACCASCTRVANRQTGFLGSR

SEQ ID NO: 15754 - DNA, 3049 bp, Homo sapiens
  CDS (1366)..(1779)
taaaagttcggaaaatttgcagcctgacaatgtgatagaaaagaaaaattcccattttctgaggagaaattcaagctggctgcagaaatttgcatgagtaacaggagccaaatgctaattcccaagacaatggggaaaatgtctccagggcatgtcagaggtctttatggcaacccctcccatcacaggtccagagatatcaggaaaaaatggttttgttggccaggcccggggtcctcatgctgtgtgcagcctagggacttggtgccctgcatcccagccactcccaaccatgactgacaggaggcaaggtagagcttgggctgtagcttcggggagtgcaagctccaagccttgacagcttccatgtggtgttgagactgcgagtgcacagaagtcaagaactggggtttggaaaccttcgcctagattaaagaggatgtgcggaaatgcctggatggccaggcagaagtttgctgcaggggcagggccctcatggagatcctctgccagggcagtgcagaagggaaatgtggggtcagagaccccacacacagtccctactggggcaccacctagtggagctgtgagaagaggtcctccagaccccagaatggtagatccaccgacagcttgcaccgtgtacctggaaaagttgcagacactcaatgccagcccatgaaagcagctgagagggaggctgtaccctgcaaaggtacaggggcagagctgcccaagaccatgggaacccaccccttccatctgcatgacctggatgtgagatgtggagtcaagaggagatcattttggagctttaagatttgactgccccactggattttggactctcatgggcctgtagcctctttgttttgaccaatttatcccatttggaatggctgtatttacccaatgcctgtacccccattgtatctaggaagtaattaacttgctttggattttataggctcatagatggaaaggacttgccttgtctcagatgagacattagactgtggacttttgagttaatgctgaaatcatttaagactttgagggactgttgggatggtgtgattggttttgaaatgtgaggacatgaaatttgggaggggccatgggtggaatgatagggtttggttgtgtccccacccaaatctcatcctgaattcccatgcgttgtgggagggacccagtgggaggtaactgaatcatggggacaggtcttacccgtgctgttctcgtgatagtgataagtctaacaggatctgatggctctataagggggagtttctctgcacaagctgtctttgtctttgcctgccatccacgtaagacgtgacttgctcctcattgcctttcgccatgattgtgaggcctccccagccatgtggaactgtaagtccattaaacctctctttcttttgtaaattgcctagtctggggtttgtgaacagactaatacaatggcttttcaccttgcagaataaaatcctacgagatcctcatgctctagctcctggccaggccacctcctcaggagttagatcacttatccgtctctccctggcccacccttctctgtcacatggcttctttgctgaccgtgatacacaccacacttgtcttctctacctggaagttgtattccccatacccacatggctcacttcttcacttcattcaagtctctgctcagatattaacctcttcagagagcccttccttcacacactgtcttgcatagcagcctctcctacaagttgtcttctttctccttaacttttgtgatggttaattttaggtgtcagcttgactggattaaagaatacctagagaactggaaaggcattatttgttagtgtgtctgtgagggtatttccagaagagattgatatatgactgaatgggctaagagggaaccatccgccctcaacgtgcagttggcttggaacaaaaacggaagaaaggcaaattggtcttactctcttggagctggaatacacgcttccattcctgcccttggatttcaggatcccaggctgttgggtctcaggacgccaggacctacatcagcctttccgtcaccgctggggttctaaggcctttgggctaagaattatatcatcagctttcctgattctgagactttgggacttggactgagccatgctaccagtatccctgggtctccagcttgcagacaatctgttgtgggacttctcagcctctgtaatcatgtgagccctttctaactcataaaccctctcttatatatctatgtatcgattggctgtgtctctctggggaaccctgactacgtatacttttgtttgaattcaaagtatttatccctacctgatattacatcctatatctgtttgttttctgttttttccattagaatacaagtttcatggggacagggactttatgcatttgtttactgctgtatcttaggctcaaagttggcactcaataaatattggttaaataagtgaattacaagcaggttggattattaggtaatatggttcgcagtgtgggactcctgaactccaagatgtctttgaaagtagccattttttttttaatttctaatggtttagtcagactacggattacttaataacagggactatagttcattcatggatatatccccagaatcaggaacagtttctagaatacgcttgagtgctcaatagacatagctattatagttaattgaaatggaattggcaatgtgggaaataagaaatcacatttttggccaggcacagtggctcacacctgtaatcccagcactttggaaggccgaggcaggaggatcacttgaggtcaggagttcgggaccatcctggccaacatggtgaaaccccatttctactaaaaatacaaaaagtagctaggtgtggtggcgtgtgcctgtgatcccagctacacgggaggcagaggtgggagaatcgcttgaacatggtagaggttgcagtgagccaaaatcataacactgcactccaggttgggcaacagagcaagactccatctc

SEQ ID NO: 15755 - protein, 138 aa, Homo sapiens
MIVRPPQPCGTVSPLNLSFFCKLPSLGFVNRLIQWLFTLQNKILRDPHALAPGQATSSGVRSLIRLSLAHPSLSHGFFADRDTHHTCLLYLEVVFPIPTWLTSSLHSSLCSDINLFREPFLHTLSCIAASPTSCLLSP

SEQ ID NO: 15756 - DNA, 3778 bp, Homo sapiens
  CDS (2388)..(2984)
cgtatataaacttggtcatgtggcttggttttaaaacagttcccttgactgtaattggcaggtgatagcatctacagcatggaaacctgcacctagtaggtgcttaagcatagcttcccttcccatgaagaggaggagacagggcacccactggccgagaggacaggagagatttagttcattaaggctgctcctctgtgctgcccccaccccgcttctgtggcaggcctggacctgatctgcaaacagacttgcctgcctgtgcctgtccctgaggcccatctccagagcagagggagggcatgcaccgctgggctgggtggtggtcctggctgagcctcctgctctcaccttggaccatttgaggtgcgtgctcagagagtcctttgttgccatgagacacttgccagccatgtcccgggatccacctgttctgccacaagaactgtgtctgtgacatgctgtcatcattggtagagactcctggcactagaacagatgacagaaacccacttataccagcgtaagcaaaacaaggaagtcctgtgttacaaatctgaaaagtgtagtagatttggtgctgggcagggctagatccaggtacttaaacaggttggccaggcatttgtctgtctgtttctgagctctcctctcctatgtcgacatctttgttctcaagcagcttttcctgtgtgttgggagaagccatccccagctgctctaagcttagctacctcagtagagagagaaggtcgcttttctaatagtttctgcggaagtccaaaggctgtttctccatagtcagatctgggtcacgcaccccatgtatgaagaatgcaggtagaagtggtttccttaaagacaatgggaatgctcattgatttgaggagaaagcagaaccctgaatgtctacaagatactctcatgccctaggtgaacctggggacacatatccagcccaccagcacctgtcaggcctggtctctggggctgccagggtttgggttctgtctggagcaccagagtaaggcaggctgtggaaggagttgaagcaagtgctaaattaggtagggtctcttgggctgggcagaggagtcactgggagccatgcaggagcttgttaaacagggagtggcatcagatttgtgccagctgtttgtggagggcccgtgagcaggaattggggcagtggacaacaaggcaggaggactgacgcagaacacattgcagcaactcagggaaggatgatgatggcttggactttggtggtggcagttgcctgtgtgtatggagagaaatacatggatttggaagatatgttatgccacgctgttgacaggacctggtgacttgctgaatgtctgatctctgggtctaagttttgacccctgtatggtgaggtcagacgttggaccgggaggtctctgaagttgcttctagctctagttctgtgatttggggctgtgtgagcagcatagtctggtgcttatagtggagatgctccttatgtggtgctgtggggtctttgcatgcctgggccccccagcgagggtcctcagagaccagtgctctcagcagtgctcttgggtactgactagcctgctgcctgccgcctttggccctgcgtgtgagagtgcccgtgtaggacacaccctggcctctgctcaccagctgcatggcccatctgcatgccagacatgcctgcccacggctgggtttcatcacctcccttccctctgcatgctcctgtgtctgtgtcaagcttccaacttcgggggcgggtggttctaggctgtaccctggactgagaagctcagaacagcttctggtcaggggagtccaaggctggaggtcgtggccaggcacagccacagccacccctccccttgagacccttgtttgttggcgcaggaagccgtctgttcggcgccctcatcatgttactgccatcgtcatgcccatcctgcccgcagaccatgtccctggcctgccctgacccctgcccctccccagtcctcctgagggcagcccttttgcttgggttcccaggttgtgccctgagcatggctgagaccctggcaggcggccctgctgcttgccttatttcttcccctcaggccatggcctggaggtggaggcagtgactccacggcaggtggctgtgtccctctggactggccttctgctctgcccagccatgctctgaggaccctccaccctagggcctgctttctctccttggtgctccagccaggagcaggcagagataggccctggagaacaccctgggttgtggtcctgaccaggcctggaccttgtactgagtccctgtgtgaccctgggcagacaggaccttcctgacaggcctcagtttcctaggctataaaatgggagcttggttgcaagatctctcattgagtaagtcatcgtgctccagacagtccctgagtgtgggggccacttctaggctggaagtgggtggggtgggagtggatgatgagctggggtctggcggtgccacccctcctgtctctgagcatgggtttggctctgaccagaggggcttcctgaatgaggggcccctgcccttccaagcagtcgtgtgtcctgcccggcctgtgagtgcctctctccctcctcctgcagtgcgccgcgtggctcctcgtttctccatccctcccagcagccaggaggtgatgccaggcggcagcgtgaacctgacatgcgtggcagtgggtacacccatgccctacgtgaagtggatgatgggggccgaggagctcaccaaggaggatgagatgccagttggccgcaacgtcctggagctcagcaatgtcgtacgctctgccaactacacctgtgtggccatctcctcgctgggcatgatcgaggccacagcccaggtcacagtgaaaggtgagtgtggcaggtgctgtaaccagtgccctccctgtcatctgggaggtcctggtggtgggcgaatgtgagctggctgccatgggcacaggcatggctgagggattcttgccctttcctgggtgtccctgccctggggtcctccagcccttagagggagggagggatttctgttattagccggcttaatgataatagttaaggcatattgagtttcttggtgggagacatcatgctagcaagcacagttgattttgtttttttctgttttaccctgggagataggtgctcttattatttccatttttgaaacgagggaaccaaggcacagagagggtgtatcacttgccccagggtcacataaaaataaatgacagagcagggacttaaacccagtgtggtctgaatccatatctcaccctcaccactacatagtaccagaccttcaggtttaatagcctcccagcaagaagggtgtggtaaaatagtaggagaaagtgtgttctctctgccctgatacctggggacaggcacacatgtattacacatatgtcacatatatgtaaccgattctggccaggcacggtggctcattcctgtaagcctagcgctttgggaggccaagttggaaggattgcttgagctcaggagtttgagaccagcccagttaacgtagtgagacccccatctctacgaaaaaaaaaaaaaaaactgggcatggtggcacacacctgtggcccagctacttgggagggctgagacaggaggatcacttgagcccaggagggtgaggctacagtgacgcagtgagccatgatcacaccactgcactccagcctgagtgacagagcgagaccctatg

SEQ ID NO: 15757 - protein, 199 aa, Homo sapiens [sequence omitted]

SEQ ID NO: 15758 - DNA, 3267 bp, Homo sapiens
  CDS (81)..(1145)
acttgacttacaagcagcggccgtacaccttcctcttgcctagaaaatgccactcctcggggaaagtccagaatggcaagatgtccaccaacggtgtgtccaacggtgtgtccaatggcctgcaccttcatagcaatggcttccggctgccggagagtaggggacatgtcagcccccaagtagagctaccaccatacctggagcgtgtgaaacagcaagccaatgaggcttttgcctgccagcagtggacccaagccattcagctttacagcaaggctgtgcagagggcccctcacaatgccatgctttatggaaaccgagcagcagcctacatgaagcgcaagtgggatggtgaccactatgatgccctgagggactgcctcaaggccatctccctaaacccatgccacctgaaggcacactttcgcctggcccgctgcctctttgagctcaagtatgtggctgaagccctggagtgcctggacgacttcaaagggaaatttccggagcaggcccacagcagcgcttgtgatgcattgggccgcgccatcacagctgccctcttctctaaaaatgatggtgaggagaagaagggacctggtggcggcgccccagtccgcctccgcagcacgagccgcaaggactccatctcagaggatgaaatggcgctgcgggagcgaagctacgactatcagttccgctactgcggccactgcaacaccaccacggatatcaaagaggccaatttctttggcagcaacgctcagtatatcgtcagtggctctgacgatggctccttcttcatctgggaaaaggagaccaccaacctggtccgtgtgctccaaggggatgagtccattgtcaactgcctgcagccacaccccagctactgcttcctggccaccagtggcatcgatcctgttgtgcggctctggaacccccgaccagagagtgaagacctcacaggccgagtcgtggaagatatggagggtgcttcacaggccaaccagcggcgcatgaatgcagacccgttggaggtgatgctgctcaacatgggctaccggatcacgggcctgagcagtgggggtgccggggcctctgatgatgaggacagctctgagggccaggtgcagtgccggcccagctagaccctccagccctggtccccagcccctgctactggctggaccctctgccctgggcaggaggtcaggggattctgttttggtttgtcttccccaccacccttttttttcatttcccctgttttgtttgttagtttggcgttaggggtggaggttgctacaacttgctggctttcggactctgggctgattgtcccctgactatccccagccctgaaaaaaagagcaggaggggacacccctccatatgcccccccccatctcctgctttcatgtccctggagggctctggcctgcctcaaaaccccttctgcctcaggtggggaggaacaagctgaactgtcttcagggactgtcctgccctttagctggcagcagcaggaggagtgggattcccaattggtaagggctcgccttggcctgttgccactcttgctccctagcctgcaaggctagctcccctgtggtcttcaggaaaggttttgaaaaaggatgggtcccaccctccctccagagccaccagtgttagagcggagcccaaaggaaggatgggagccctggagtgggcaagaccaggccacctgctgaggtcgctgtggagcaccctcgctcctctcctggctactagctctggccctgcacctactctcactggccacctctggaggctctgcctttcccaagggccctggcagagggtggggcactgcaccttaccccacccatccatgccagcacttctgcactacggccattctcctcttgggcgctcctcagcctcactgtgacctttctgccagagctcccagccaggcctactctgctgaggtggcgcttcctgctaagggcccttctctgccctttctgccctccttcccatcccacatgctgagccgccacaaagaccaaagaagtgatggcttttctctgtcccctgctgctctgaggggagaggggtgggtctcctgagccactcagatgggaaagtcccttactcggcccctccctccccagcagccccaagctttacactggatgcagcgatcaacccaccactcaccaggcctctcctcccctctgcccccggctcttagctccagctgctccaggtagttggttcatccttccccctctctccctccctgcttccccttcagtgcttacttggctccagccctccagctgcagcccctggggaaaagcagcctcccttctcctctccctccactccctcgctccctccctcagcccctgtctctgccaggtgcctcctctcagtcaggcttcagagcagccctggagacaggagggccatgttaaaagctttttcacagttttaagaagacaagtggagggtgaggatagtggtggggggtctggcaccatctcattgctttaatcccagcaacacaggtggcagcttctcccccttccttcccaccccagtccctcttcccacccccctcttctagcttggtaatgaagtatatttattggtgaaggaaacagctgctgctgcttctcctgctgctgggacctgctcccctgtctcttctccgtgacctttctctagccagggagaagggagagcaggagtattggggctgggccctggggcccaaggaccagctgggtcccctttgctttcttgtgttccagccacctgccatttcctccctgcctcccaccctccctccctgccccctgtcctgcttcccaccccctgcctgcccagcctgggccctgcagtgtggagagacacataagccttactgtcctctgggggcaggagccgagcctttttgttgctccgctcccaggagagtgagggtgacgcaattgattaaaaccattttgttctaggtgtggctggtggcatttgtggggtgcagatgggtcttggaaccaaagtgagggcacctggtccctcacctctgtagctctatgacttagtaaccacacctctactggacagaatgaggcctgccttgaagggtcaccgtgagcagcggccacccagcccagcagggctgagtgcagagcccagctctcatggctgtgatttgtaatcatcagctttcactctctggctgttttctcatcagtaaaataagggacttgg

SEQ ID NO: 15759 - protein, 355 aa, Homo sapiens [sequence omitted]

SEQ ID NO: 15760 - DNA, 4171 bp, Homo sapiens
  CDS (3650)..(3955)
tactttcagagaaaatctttccaaagaccctcttaagaaagtcctatttctaaaattttcatgtttgattcattcagatatgattaaagcccatcatggtctgtgtaaatgtttctgcattcttagaaactttctccagttttttataactagtccattggatgtaggaatgccaaagagtctaactaaaaagagagggaatcttggctacaatggaatacctaggggtatgggaagtaagtaatagtctttatttccatatgaatattgctggctttacacctgcaataattaggcaagagactcaaagatagttttttcagaaaagttttctttcaaggatctagcaagtctgagctatgcttccaactttactgccctccatcatccggcatctttgactcatccaccaccttctgtccctttcattctcattccccatgtgtcagctccccagaaaggacatatcttgtacaccttgccacagcactcatcacctgcttctggactgcctgagcaagagtgatacttcctgttctaaagacaggagtgaggatgggggatactcagactttgggatgtgccagaactgtggctagtccccaggaagcagaacttggaggactcataaaggagccaatcccacctccatcctaaacaaggccagttcataaaccccatctggcacagcagcagtctcaggaagctaaattggggagtgccctgtatctcactccctaaactggggagtgagagcatcctgatggtccgctcttgggctgtgacagtggtcccctgcaaatgaaaaggggagctgtactgatgtcaggagatgtggctcaccgtcattattagagtcagggcctctcctgcctacttcggtgggtgaggacagagagggggatggagagaatccttaatccttcattggtaacatcctgagatcctcctagagttccagacatcatacttatcatgggatttgtttgccttattttagcctccctgccctctggccagtgagttgaattaaataattgtgccctcagtatcaaggagtagacaatgtagactatttttatgcagccctgaggacccccagtcatgactcttgataaggtgaggcatctgggttgggtgctaaactatgagccttcttcaccctccttccagtaatgcctatttcagccctgcctagcctgcaccatcttgataattaggtaggatgactgcagattgaaatcaagcagctatttcctttggcttttctggcagacactgcccactgcctccagtgcgtgcactgtagatggtgggtggtccctatgggtgggtgctagggggaaaattccacccctgcagtaagcagaagcaggcagaagtctgctggaagctgcaggcctcccgcactgacttgcaatgttccttgtgttccaggtgctgctgtttctttaagaggaaaaggaagaagactgctcagcgccacaagtgaccagtgcctcccaggagtcctcaggccctggggactctgactcaattgtacctgcagctcctgccatttctcattggaagggactcctctttgggggagggtggatatccaaaccaaaaagaagaaaacagatgccccctgaaggggccagtgcgggcagccagggcctagtgggtcattggccatctccgcctgcctaaggctctgagcaggtcccagagctgctgttcctccactgcttgcccatagggctgcctggttgactctccttcccattgtttacagtgaaggtgtcattcacaaaaactcaaggactgctattctccttcttccccttagtttactcctggtttttaccccaccctcaaccctctccagcataaaacctagtgagctaaaggctttgtctgcagaaggagatcaagaggctgggggtaaggccaagaaggtaggaggaaaatggcagacctgggctggagaagaaccttctccgtatcccaggtgtgcctggcagtatggtttcctcttcctctgtgcctgtgcagcattcatcccagctggccttggggttcaggttccttctcccctccctcctgagaagttacactgtaggacacaagctgtgagcaatctgcagtctactgtccctgtgtgttggcgttcttagcttttttgacaaactcttttctccaggtagtaggacaatgaaaattgttctaagcaaaggaaagaaaactgactttgttgcacttttagtttttttaaaaaaaacaaaaacaaaaacatggcagatgcatattgtgtctggttatattgggggttttacttttacctgttttgagggggatggggccggccaagccattcagagagaacatgggtccagaggacattctcagtggaaagagtttgatctgcagcacccagaagagaagccaaactcggtgtcattctgagtgaacactcaggttggcaagaaaacatacttgaattttcattcatcttctcagcagctgaagaatgtccctaccagagcatcttgacctaatcagcttacagtttgaaaacctagctctccagaacatgagatgagccagccgagccagactgtgaccaggaaacagctcatcccagagaaggagatgcttaacaaaaaaaaattgaaattgtttcccatgctgccagggacttccaactagatagccatgtgacgtcctggtgacttgggggaaaaattagtgatgaaacagccaccaccatattgccattagtggaaaaaaagaggacagtgaacctgccttccacctgccagagggacctcagggtgtggcattatagggccaggaaaagaaaatcggtgtatcctatctgccccaatagctgagctgtagcatttgggctggcctgccttatcagaaaccaagcttatgaagatcttctcccagcaggtccatagcagtaggcttaggatgcagtatatggggccgcatttaaaaggagggaaagattgtttggtgctggaacattccagggaaaaggagactggaatgaaaggtctgaaattatcttctcaattggactccttccagaaaggtggccgtgcctctaagcatgtttttcccagtatgccctaggcctccccccatggtgttttcatatgaggtactactgtgaaggatctggttcctcattcactgtttgacaagtctttcatgtgtggagttactcttctcatgcccaattttcatttgagtttagtggcttaaccaaacaatgactcctcattccagcggtgacagaagagaaagggtcatttacatcaggaaagaggtcttgtatctgggagtagagagctaaccatggagcacagtggctggtgggtgacttagtctgatggtttgtggaccatagaagtcttcacctctggtttgaggtgcagggctgtcttttgtactggagggtgtggggatattttctgatagttgccatttcttgaaaaattcccttgatgtaccttacacagagcagaaataacattaacatggatcagaggtactgggcttcatctgttccattggaccttggctagggaatatcatttcactggcatcaaacctgcttagcttatgaaaagatggtaatatgtcatttctataaatgtttctatatatgaaacataaagtggcagggagatacaatatcacaccccttccccacaaggactgtgaatattgggatttatgtccttgccattacctagtggttacagccctatcactaaaatttacatcgtttctcagttgggatttgggcattgctaacttactgtatagaaagtttaacttttcctcacccctgtatagaaaatgccttgcctctcaagagagggcagagggggggccaggtgcagtggctcacgcctgtaatcccagcagtttgggaggccaaggcaagtggatcatgtgaggtcaagagttcgagaccagcctggccaacatggtgaaaccccgtctctacaaaaaatacaaaaattagctgggcatggtggcatgctcccgtagtcccagctactcgggaggctgaggcaggagaatcacttgagcctgggaggcagaagttgcagtgagccgagatcgcaccactgcactccagcctgggcaacagagtgagactctgtct

SEQ ID NO: 15761 - protein, 102 aa, Homo sapiens
MFLYMKHKVAGRYNITPLPHKDCEYWDLCPCHYLVVTALSLKFTSFLSWDLGIANLLYRKFNFSSPLYRKCLASQERAEGGPGAVAHACNPSSLGGQGKWIM

SEQ ID NO: 15762 - DNA, 3142 bp, Homo sapiens
  CDS (1966)..(3132)
agcggtggcctagcccttcaggcctggccgctacaataaggctggcgaactcgcagcgcttgaatacccgtggcctaaccgtccactcggaagaccggtcccgctcgggaggctctgcagtcgcgcctggggtcagggccgggggcgaatgtggctcgcgttctaggcctccctgggttggaaaaagactatgttagcaagtgtcacgccatgcttttgccaactttccaattaaaggttgacattcctgcataagcatttctctgtgaaaatgtccttgcctcttacagaggagcagaggaaaaagattgaagagaatcgacaaaaggctctggcccgcagagctgagaagttattggcagaacagcatcagaggactagctcgggcacctccattgctggcaacccattccaggccaagcaaggcccatcccaaaatttcccaagggagtcttgtaagccagtgagccatggtgtcattttcaagcaacagaatctcagtagctcatctaatgctgaccaaagacctcatgattcccacagttttcaggcaaagggaatatggaaaaagccagaagaaatgcccacagcctgcccaggccacagtccacgtagtcaaatgcctctcactggaatctctcctcccttggcacaaagtcctccagaggtccctaaacaacagctcttgaattatgagttaggtcaaggtcatgctcaggcttaacctgagatcaggttcacaccctttgctaacccaactcataagcctctggccaaaccaaagagttcccaagagacaccagctcattcctctggacagcctcccagggatgctaagttagaggccaagacagcaaaagcctccccttcggggcagaacatttcttacatccattctagctcagagagtgtaacgcccaggacagaaggaagactccagcagaagtcagggtcctcagtccaaaaaggagtgaactctcagaagggaaagtgcgtaaggaacggcgatcgtttccaggtgttgattgggtacaatgcggaactcattgcagtgtttaagaccctgcccagcaagaattatgatcctgacaccaagacgtggaacttcagcatgaatgactatagtgccctgatgaaagcagcccagagcctccccacggtcaacctgcagcctctggaatgggcctatggcagcagcgagtcaccctccaccagcagtgagggacaggccggccttccatcagctccatccctttcatttgtcaaagggcgatgcatgctcatctccagggcctacttcgaggcagacatcagttattcacaggaccttattgcgctttttaaacagatggattccagaagatatgatgtcaagaccaggaagtggagctttctcttggaagagcacagtaaactaattgcaaaggtgcgctgcctcccacaagttcagctggaccctctgcccacgactctcaccctggcgtttgcttctcagctcaagaagacatctctcagtctcatgccagatgtcccagaggcagacctttctgaagtggaccccaagctcgtgtctaatctgatgccctttcagagagctggagtcaattttgccatagccaaaggaggccgcctgctgctcgctgacgacatgggcctggggaagaccatccaagccatctgcatcgcagccttttaccggaaggagtggccgctcctggtggtggtgccatcctccgtgcgcttcacctgggagcaggccttccttcggtggctgccatctctgagcccagattgcatcaacgtcgtggtgactgggaaggaccgcctgacagctggcctgatcaacattgtcagctttgaccttcttagcaagttggaaaaacagctaaaaccccttttaaagttgtcatcattgatgaatctcacttcctcaaaaacagtaggactgcccgctgtcgagcagctatgccggtcctaaaggttgccaagagggtgatcctgttgtcgggcacaccagccatgtcccggcccgcagagctctacacgcagatcatcgcagtcaagccaactttcttcccccagtttcatgcctttggacttcgctactgtgatgccaaacggatgccttgggggtgggactactcaggttcctccaacctgggagagctgaagctcctgctggaggaagcagtcatgctgcggcgcctcaagtccgacgtcctttcccagctgcctgccaagcagcgcaagatagtggtgattgccccaggacggatcaatgccaggaccagagctgccctggatgctgcagccaaggaaatgaccaccaaggacaaaactaaacagcagcagaaagatgccctcattctcttcttcaacagaacagctgaagctaaaatcccatctgtcattgaatatatcttggacctactggaaagtggaagagagaagtttttagtatttgcacaccataaggtggtcctggacgcaattacgcaagagcttgagagaaagcacgtgcagcacatccgcatcgatggctccacctcatcagctgagcgggaggacctgtgccagcagttccaactgtcggagaggcatgctgtggccgtgctgtccatcaccgctgccaatatgggcctcaccttctcctcggctgacctggtggtgtttgctgagctgttttggaacccaggggtgctgatccaggctgaggaccgcgtgcaccgcattggacagaccagctccgtgggcattcactacctcgtggcaaagggcacagctgatgactacctttggcccctgattcaagagaagattaaagttctggcagaagccgggctttctgagaccaatttttcagaaatgacagaatccactgattacctctacaaggacccaaagccgcagaagatctacgacctattccagaagtcctttgagaaagaaggaagtgatatggagctcctggaagcagcagagtcctttgacccaggaagtgcttcaggaacatctggaagtagttcccagaacatgggagacaccctggatgaaagctcattgacagccagtccacagaagaaaaggagatttgaattttttgataactgggacagctttacgtctcccctgtaaaaggggc

SEQ ID NO: 15763 - protein, 389 aa, Homo sapiens
MPVLKVAKRVILLSGTPAMSRPAELYTQIIAVKPTFFPQFHAFGLRYCDAKRMPWGWDYSGSSNLGELKLLLEEAVMLRRLKSDVLSQLPAKQRKIVVIAPGRINARTRAALDAAAKEMTTKDKTKQQQKDALILFFNRTAEAKIPSVIEYILDLLESGREKFLVFAHHKVVLDAITQELERKHVQHIRIDGSTSSAEREDLCQQFQLSERHAVAVLSITAANMGLTFSSADLVVFAELFWNPGVLIQAEDRVHRIGQTSSVGIHYLVAKGTADDYLWPLIQEKIKVLAEAGLSETNFSEMTESTDYLYKDPKPQKIYDLFQKSFEKEGSDMELLEAAESFDPGSASGTSGSSSQNMGDTLDESSLTASPQKKRRFEFFDNWDSFTSPL

SEQ ID NO: 15764 - DNA, 3112 bp, Homo sapiens
ctaggtttgagtcctggttctaccacttacaacccagtgaggatccccagagggatcagtcccattgtacatatgagacaacaggttcagaggtgctaagtgtctcagccaaggtcacagagctagttaggggcagagctgggatttgcacataggccaactgtctaaagacccagtgggctcatatgccactatgggcagaacttttccggaacagcccccagttttcctggcagccgtaaagggaacctgtagttttctaggggcaatatcagttgttacaagatctgaatctttgatgtctaatgagctgggcctagcctcagtagaggactcctgctccacattccaccaagggaaacaggcattacggcccctacccaggacagctggtgccaggaatccaactttccccataggacaatggacctcccttaaacttgtctatttatttatttattttaaatagagacagagtctcactcactatgttgcccaggctagtcctgaacttctgggctcaagcagtcctcctgcctcagcctcccaaagtgacaggattacaggggtcagccactgtgcctggcccctccttaaacttcttttccagagactctagaatctttctttttggtggaaaacaataaaagatttggcactccacatggaatgcggcaggagactgcagtgggtgaactcccccggtcccttccagccctgggccctgctgcctgccctgccctgcacaccagccctgtaaggcatctgctgtcccaggggacctttgacaggccctccagcccatagtcagctcttccctgccctcccttgtaaagatagatgagactggcagctgcagtgcctggtatcaggaagtccctaggtggctggagggagtgggccagagccccagttcttggtgggacagcttcatgggaaatgcaggggaatgttcaggggctctgagacatggtggaggcgggtggggggactgatgcaggatgcggatggacaggtggtaaggagtttgtgcatgagagtgggactgggagatgtcacatatttccctggggctttcctggtaaatataactttggtcaaggagaaaccagcagtaggccacagcctaggccaaggtaaaaatgctgtcttctaatgagctccagatccacacggactgtagctttaatgtcctaggggactttagccaaggcctagaaaaagtctcctagaagcagagtttggagaccccatagatcctaccctcagccaggagctcgagctaggggcattccggatgcctccagatgaaaagactgcacaggtatcaccaggccacattgaggggacgtagcaagggtggcatcaaaccgtcggaactgccatcacctcggtcttgctttgggaaaggaacaaatacttctgaattcacggcagtggtatcacctgtgagggtgcagtcaatgctagtcagccctgccctccttggctctgccctctcctaggcgagtgcctggaaagtgacctctgcaagcacaggcagactcatcttccaacctcctgctggagccattctccccagggtctgtctgcagacttcctcccttgcagctacatgggtccaagtgactctgcagagagggagatgcctcctcctcaggtgatgggtcacaggaaggaagaaggtgacctcagtgggggacggtgtgggctggcaaggtatcagtgggctgtggttgccgaatgcagcacacagaggctctggcccttgctctcagcaagttctcattttaaactttctggatagacaaataatccttttcctctcatcttttgccaatggaggtggtgaaatgttctctcctctgtttaatcagataagacttctaaagaaagcagcatcagaagggccaaggtaagggagaaaatgctgtgctctgcccatctgaacctatcaagggcattaaacttggatcctaatgcacgtggcagacacagagcaacatcatgtagccataaggcctggaggagatgggggcaaggagccgtttcttactctgagcccaatcactaggtacctcaatgtgtcacaggtcagtaccggctttcagaggtcatcctttccattcccctgcctccaaccagggactcccaaaccacccctgcgggcttcccctaaccctaatgcttttcgcaaagggaaaaaataactgttgctacctagttttctcatcaagaggcctgtggacctttactgcatggaagttctttgttatatctaacctaaattcctcctgctataagggatagacagttgagtaaggtctagcgacagaaacacaggcaaaaataacctctggaggtcaccgggatgtaccatcaattctggaagcaagaagaagttttcctagtctccctttcagattagcacgaaggaagcagctctgctatgtgccggctccgaggagctcagctcaacagaaatcccagccctgggaggactctgggctccttctccttttaaggcaacgtttgagtgctcagggctacacaagcggcaacaagctccagcccctctcattcctggctatttggaggaaactgatgattaatcaaccctttccctcccacccccagcctgtttttcattaggttctttttaaagtgttggcacacctcctcaagaacagacacttggcagatccttgccaactaggaccccagggtaggggaggtaactaggaaggagtggggagtagtcctggattaggataaaggggagaagtcaggatgtgcggtgtcagggaagaaagaaggttaaattgaggctgggcgtggtggctcgcgcctgtaatcacagcactttgggaggccgaggcaggtggatcacctgaggtcaggagttcgggaccagcctgaccaacatggagaaaccccgtctctaccaaaaatacaaaattagctaggcatggtggcatatgcctgtaatcccagctacttgggaggctgaggcaggagaatcgcttgaactcagaaggcagaggttgcagtgagccgagattgcggcattgcactccagcctgggcaacaacagtgaaactccatctcaaag

SEQ ID NO: 15765 - DNA, 3337 bp, Homo sapiens
  CDS (259)..(1275)
gtcagtgataaaatctccttgaatcgctctctcccagatatccggcacccaaactgcaacagcaagcgctacctggagacacttcccaacacaagcatcattatccccttccacaacgagggctggtcctccctcctccgcaccgtccacagtgtgctcaatcgctcgcctccagagctggtcgccgagattgtactggtcgacgacttcagtgatcgagaccgcattgctcggaaccgcaagaccattgtgtgcccgatgattgatgtaattgaccatgacgactttcggtacgagacacaggcaggggatgccatgcggggagcctttgactgggagatgtactacaagcggatcccgatccctccagaactgcagaaagctgaccccagcgacccatttgagtctcccgtgatggccggtggactgttcgccgtggatcggaagtggttctgggaactcggcgggtatgacccaggcttggagatctggggaggggagcagtatgaaatctccttcaaggtgtggatgtgtgggggccgcatggaggacatcccctgctccagggtgggccatatctacaggaagtatgtgccctacaaggtcccggccggagtcagcctggcccggaaccttaagcgggtggccgaagtgtggatggatgagtacgcagagtacatttaccagcgccggcctgaataccgccacctctccgctggggatgtcgcagtccagaaaaagctccgcagctcccttaactgcaagagtttcaagtggtttatgacgaagatagcctgggacctgcccaaattctacccacccgtggagcccccggctgcagcttggggggagatccgaaatgtgggcacagggctgtgtgcagacacaaagcacggggccttgggctccccactaaggctagagggctgcgtccgaggccgtggggaggctgcctggaacaacatgcaggtattcaccttcacctggagagaggacatccggcctggagacccccagtacaccaagaagttctgctttgatgccatttcccacaccagccctgtcacgctgtacgactgccacagcatgaagggcaaccagctgtggaaataccgcaaagacaagaccctgtaccaccctgtcagtggcagctgcatggactgcagtgaaagtgaccataggatcttcatgaacacctgcaacccatcctctctcacccagcaatggctgtttgaacacaccaactcaacagtcttggaaaaattcaataggaactgagccctcatgtccccttggcaggccccccagggtctggcactcactgcagacttcctctttcaagggaggcagggcccctgtgggcactaggtgtaaaaggtgctggccaaatggttcagggtgaagagggctcttgattcaggggctggggtctgcctggtccttgagcccctgagttgtgggggtagggtgaagagcatatcccacaagaggccccacagggagcagagactgctttaatccctgctgacatcacggaaaagcaacagagccttttcaactttgtcactatgtccccttgaacattatgtgggagaacaccaaggtagcctaggccacccaaaagtgagtcctgcgaggttgcccagccctcagatggctctcctacatgatggtgctttagaaacaaaggtaaaatttgcctgtttggggcagcttttagtatcgatgccactcatctgcagcagaagagaaagaagtcctcttggggctttttagtttctgccgtcctggggggaacattgcagttactgcacagcttctgttctctgtcacaaccccaggtgatttggtccggtcaaaggccatacttggggccctaagagtgttcagtattgaatgctgatcagctgccaggtgaggagtcagaagagggagcccccctagacatttctttgcagctatggacatgcgggatatctccccctgctctctgggtatttgaaatgtcaattttagcactctccaggcacaaggacagcctagcaccagctttacagggcagtgtttcagatggccctgagcccacggaaaaggccaggtagacctccaaactagaaatgctggctgatttgccctgatccatgcttccatttccctgtctctcttccccaggcaattactggcctcaaaagaggaacagaggtgctgcgaggtgctcacctcacagagtctggaggcctccaggatcaactgtgggcaaagtgcctgcctctgacctcatcatggttctagttctcatacagaactccagaatttttaaagaactctataattggattgcaaactaggatgctacataggattctggtattccacatccaatatggatttctagaatgctgtgattaaaggagccagccaggtgtaatacagtcaaggcagcccccagcctagagacaatctgagaaatccaaagttggtggtgttgggaaagcagggggacatgtgtccctcagctcagcagaggctgtggtacaacatggtccttggtgaagacctgcacccctggaacctcccaccatcgtcacaactgtagtctcatttgcagtggagaaaagaacccgatgtcccacagccagatatacacccagctccatgccagcccttcatgtttaccttttgctttgttaattacatgtcagactcctagagggcctccagactaataggaagcatttctgtaaccaacctgccacccactgattcagaaatggaaatcacattccacaatctatggcttccaccagctagcccaggaaatacttgaaatcagcattccaattagtgttgagtctcttgattgtgtcatttaccaattaaataactgagacctaagtctgggaacagagccacgaatctgcctttgagatgctggcagatctcaaggccatcaattattgggggagggagggacaaacactcccaatcatccaccagtcagactgaatgtgtagctggcgaggaattacttccacttctggcccagcacaagccctgctttggccacctgtctgcaagagaggcggcccctgtgcttgcaacgcttacgtgttgatcccagtgtccttttccaaatgagtgctgtagctttagatgtggccctctatagaaagaagtcaaaagatgaggccccttctagaatctaggataacaagagtgttgacagtttgaggagtcgaattgagattcatcatcaaagagcaatgcagcgtcgttaaaataaaaactgtgccttttaaaaagaaaaatgcaaatatagagcacatccctaaacttg

SEQ ID NO: 15766 - protein, 339 aa, Homo sapiens [sequence omitted]

SEQ ID NO: 15767 - DNA, 2840 bp, Homo sapiens
  CDS (3)..(2426)
tcatggcagatgacttggattcaggacacaatggtttggtccactgctggctgagccaagagctgggccacttcaggctgaaaagaactaatggcaacacatacatgttgctaaccaatgccacactggacagagagcagtggcccaaatataccctcactctgttagcccaagaccaaggactccagcccttatcagtcaagaaacagctcagcattcagatcagtgacatcaacgacaatgcacctgtgtttgagaaaagcaggtatgaagtctccacgcgggaaaacaacttaccctctcttcacctcattaccatcaaggctcatgatgcagacttgggcattaatggaaaagtctcataccgcatccaggactccccagttgctcacttagtagctattgactccaacacaggagaggtcactgctcagaggtcactgaactatgaagagatggccggctttgagttccaggtgatcgcagaggacagcgggcaacccatgcttgcatccagtgtctctgtgtgggtcagcctcttggatgccaatgataatgccccagaggtggtccagccggtgctcagcgatggaaaagccagcctctccgtgcttgtgaatgcctccacaggccacctgctggtgcccatcgagactcccaatggcttgggcccagcgggcactgacacacctccactggccactcacagctcccggccattccttttgacaaccattgtggcaagagatgcagactcgggggcaaatggagagcccctctacagcatccgcaatggaaatgaagcccacctcttcatcctcaaccctcatacggggcagctgttcgtcaatgtcaccaatgccagcagcctcattgggagtgagtgggagctggagatagtagtagaggaccagggaagcccccccttacagacccgagccctgttgagggtcatgtttgtcaccagtgtggaccacctgagggactcagcccgcaagcctggggccttgagcatgtcgatgctgacggtgatctgcctggctgtactgttgggcatcttcgggttgatcctggctttgttcatgtccatctgccggacagaaaagaaggacaacagggcctacaactgttgggaggccgagtccacctaccgccagcagcccaagaggccccagaaacacattcagaaggcagacatccacctcgtgcctgtgctcaggggtcaggcaggtgagccttgtgaagtcgggcagtcccacaaagatgtggacaaggaggcgatgatggaagcaggctgggacccctgcctgcaggcccccttccacctcaccccgaccctgtacaggacgctgcgtaatcaaggcaaccagggagcaccggcggagagccgagaggtgctgcaagacacggtcaacctccttttcaaccatcccaggcagaggaatgcctcccgggagaacctgaaccttcccgagccccagcctgccacaggccagccacgttccaggcctctgaaggttgcaggcagccccacagggaggctggctggagaccagggcagtgaggaagccccacagaggccaccagcctcctctgcaaccctgagacggcagcgacatctcaatggcaaagtgtcccctgagaaagaatcagggccccgtcagatcctgcggagcctggtccggctgtctgtggctgccttcgccgagcggaaccccgtggaggagctcactgtggattctcctcctgttcagcaaatctcccagctgctgtccttgctgcatcagggccaattccagcccaaaccaaaccaccgaggaaataagtacttggccaagccaggaggcagcaggagtgcaatcccagacacagatggcccaagtgcaagggctggaggccagacagacccagaacaggaggaagggcctttggatcctgaagaggacctctctgtgaagcaactgctagaagaagagctgtcaagtctgctggaccccagcacaggtctggccctggaccggctgtgcgcccctgacccggcctggatggcgagactctctttgcccctcaccaccaactaccgtgacaatgtgatctccccggatgctgcagccacggaggagccgaggaccttccagacgttcggcaaggcagaggcaccagagctgagcccaacaggcacgaggctggccagcacctttgtctcggagatgagctcactgctggagatgctgctggaacagcgctccagcatgcccgtggaggccgcctccgaggcgctgcggcggctctcggtctgcgggaggaccctcagtttagacttggccaccagtgcagcctcaggcatgaaagtgcaaggggacccaggtggaaagacggggactgagggcaagagcagaggcagcagcagcagcagcaggtgcctgtgaacatacctcagacgcctctggatccaagaaccaggggcctgaggatctgtggacaagagctggtttctaaaatcttgtaactcactagctagcggcggcctgagaactttagggtgactgatgctacccccacagaggaggcaagagccccaggactaacagctgactgaccaaagcagccccttgtaagcagctctgagtcttttggaggacagggacggtttgtggctgagataagtgtttcctggcaaaacatatgtggagcacaaagggtcagtcctctggcagaacagatgccacggagtatcacaggcaggaaagggtggccttcttgggtagcaggagtcagggggctgtaccctgggggtgccaggaaatgctctctgacctatcaataaaggaaaagcagtg

SEQ ID NO: 15768 - protein, 808 aa, Homo sapiens [sequence omitted]

SEQ ID NO: 15769 - DNA, 2897 bp, Homo sapiens
  CDS (2219)..(2596)
aggcttaagctgtcctcccacctcggcctcctgagtagctgtgacaagaggcgtgtaccaccatgcttggctagtttttgtattttttatagagatggtgtttcgccatattgcccaggctggccttgaacttgttagctcaagtgatcctgcctcagcctcccaaagtgttgggattctagggatgagccaccatgcccagctggattcctttttttagtttgtttgtttttaaagacagttttccttttttgcccaggctggagtgaaatggcatgatcttggctcactgcaacctccacctcgtgggttcaagcgattctcctgcctcagcttcctgagtagctgggattacaggtgcctgccaccatgcccggctaatttttgtatttttagtagagatggggttttgccatgttggccaggctggtctggaactcctgacctcatgtgatccacctgcctcagcttcccaaagtgctgggattacaggcgtgagccaccgtgcctggcctccagctgaattcctttgctttaagtgtatatatgtctccaggggctgtcttcatttcagcaggctgtcctggcctgaaggaggcacccctaggctccttcctctgaacattcctagcctaggagctgggtggtaggaggtagcatgctgggaagcaggcacattcctatacctggggtcccaagagagccattgggtgggtgggcagacagaacatacagtttaatagggccagggagaaactgtctccctcctttgctcttttcaggcctgcggtccctggggcactgatcattatttaaggagcagtgagggcctggcatcctgtcccctggtcagaagaaactacccaaaacttaaagctcccccagctccctgaccacctcattcacaggcctctgtcctgggagccacacctggggcctcagcaagaggagggccctgggccagcagcctgggcttctagggctcacctcacctctgccagtagcgcccagagggcatattctgggggctgagtgggtggtgggggtagggagagaccccaaattcccccctctcctaattctcccacccccaacctaggccccatttgaggctcaaggaaagccccaggctgagtccaggcgccaagcagaccccagctgcacctggcttggctccaacaccatggagacagtggctggggaagctggccaacccctcaccttctgtgatgtttgacagctgaccctctccccatcatacaggaagggtagcagatccactttctcccagtctggattcctgcacacagcgagcctgagccatgtgttcctccttgccaccccagcctgcattcagtgcctctgatccagggagatgaacccaggggttgctcctggacagggcagatgaaggggctgcttgcttggaggatgtattgggggtggaaggagcaggttagaaggagtttgggccatcaacctggctcagcactggtttggggcaccccaaccaccagcagagtgctctcatcatccccttttgctatcttgtggctcaggaagcaccagtcattgggggtggggtgggtaagggtttctcagggtcgacccaggcatagggagagaaaacccttaacatgtttcatcccagcaccctcctccttgcagctggttgagtatttctcaggccttctccatcctcctcgtacttcagctccctcctcaactgggacttggtgtgtaccagaggcaggggcctgctgactccctggatgctgctcctgggagccctgcacgggggagggctgcagaggggcctcctgctgcattctgcagtcctcgtgccctgtgggtgatgttctgtagctggccctggacacatctctttccaagcttgaagtgggggtgggggaaggtggagaggacactacttgtgtctctttgttctacctcagctcctcacctcagggctgagtggcccttaataaatgtggggggagggcagcaggctttgtggaagtgcagggagctgaggctaatttagagtggggagaagagtgcacagctgcctcctcccaccctctctccctccctccctccttccctccctcccttcctctcagctctttccctctgccctgtctgtgcagccccagtcagggtagagggcagagggcagctggagcaagccccctgagcccgggaggctgcattattcatgagtgcactgcgtgctgagttgcctctccctggaggagggggtggggtggtcctagctaacctgtgctcccttttcctggtcataggagctgacacaatgagtgacacgagttctgtaagcttggaagtgagccctggcagccgggagacttcagctgccacactgtcacctggggcgtgcagccgtggctgggatgacggtgacacccgcagcgagcacagctacagcgagtcaggcgccagcggctcctcttttgaggagctggacttggagggcgaggggcccttaggggagtcacggctggaccctgggactgagcccctggggactaccaagtggctctgggagcccactgcccctgagaagggcaaggagtaacccatggcctgcaccctcctgcagtgcagttgctgaggaactgagcagactctccagcagactctccagccctcttcctccttcctctgggggaggaggggttcctgagggacctgacttcccctgctccaggcctcttgctaagccttctcctcactgccctttaggctcccagggccagaggagccagggactattttctgcaccaccccccagggctgccgcccctgttctgtctttttttcagactcacagtggagcttccaggacccagaataaagccaatgatttacttgtt

SEQ ID NO: 15770 - protein, 126 aa, Homo sapiens
MSALRAELPLPGGGGGVVLANLCSLFLVIGADTMSDTSSVSLEVSPGSRETSAATLSPGACSRGWDDGDTRSEHSYSESGASGSSFEELDLEGEGPLGESRLDPGTEPLGTTKWLWEPTAPEKGKE

SEQ ID NO: 15771 - DNA, 3591 bp, Homo sapiens
  CDS (700)..(3273)
ctgcgacgactggagttccatgccagcaagatcgatgagctgtatgaggcatactgtgtccagcggcgtctccgggatggtgcctacaacatggtccgtgcctacaccactgggtccccgggaagccgagaggcccgggacagcctggcagaggccactcgggggcatcgcgagtacacggagagcatgtgtctgctggagagcgagctggaggcacagctgggcgagtttcatctccgaatgaaagggctggctggcttcgccaggctgtgtgtaggcgatcagtatgagatctgcatgaaatatgggcgtcagcgctggaaactacggggccgaattgagggtagtggaaagcaggtgtgggacagttaagaaaccatctttctccctctactcacggaatttctgtctattaaggtgacagaactgaagggcctggccaaccatgtggttgtgggcagtgtctcctgtgagaccaaggacctgtttgccgccctgccccaggttgtggctgtggatatcaatgaccttggtaccatcaagctcagcctggaagtcacatggagccccttcgacaaggatgaccagccctcagctgcttcttctgtcaacaaggcctccacagtcaccaagcgcttctccacctatagccagagcccaccggacacaccctcacttcgggaacaggctttctataacatgctgcgacggcaggaggagctggagaatgggacagcatggtccctgtcatctgaatcttcagacgactcatccagcccacagctctcaggcactgcccgccactcaccagcccctaggcccctggtgcagcagcccgagccccttcccatccaagttgccttccgcaggcctgagacccccagctctgggcccttggatgaggagggggccgtggccccagtcctggcaaatgggcatgcaccctacagtcggactctgagccacatcagtgaggctagtgtagatgctgccttggctgaggcttcagtggaggccgttggcccagaaagcctagcctggggacctagcccacctacacacccagctcccacccatggagagcaccccagtcctgttcctcctgccctggaccctggccactctgccacaagctctaccctcggtacaacaggctctgtccccacatctacagaccctgccccatctgcacacctagactcagttcataagtccacagactctggcccttcagaactgccaggccccactcacaccactacaggctctacctatagtgccattaccactacccacagtgctccaagccccctcactcacactactacaggctccacccacaagcccataatctctacccttactactacaggccctaccctcaatatcataggcccagtccagactaccacaagccccacccacactatgccaagccctacccataccacagcaagccccactcatacttccacaagccccacccatacccccacaagtcccacccacaaaaccagtatgtcacctcccaccactacaagtcctacccccagtggtatgagcctagtccagactgccacaagtcccacccatcctaccacaagccccacccatcccaccacaagccccatccttataaatgtaagcccttccacttctctagaacttgctaccctctccagcccctccaaacactcagaccccaccctcccaggcactgactcccttccctgtagtcccccagtctccaattcctacactcaggcagaccctatggcccccagaactccccacccaagtcctgcccattccagtaggaaacccctcacaagccctgccccagatccctcagagtctacggttcagagtctaagccccactccctcacccccaacccctgcaccccagcattcagacctttgcctggccatggctgtccagaccccagtcccaacggcagccggagggtctggggacaggagcctggaggaggcactgggggccctaatggctgccctggatgactaccgtggccagtttcctgagctgcagggcctggagcaggaggtgacccgcctagaaagtctgctcatgcagagacaaggtctgactcgcagccgggcctccagtctcagcatcactgtggaacatgccttggagagcttcagcttcctcaatgaagacgaagatgaagacaatgatgttcctggggacaggcctccaagcagcccggaggctggggctgaggacagcatagactcacccagtgcccgccccctcagcacggggtgtccagctctggatgctgccttggtccggcacctgtaccactgcagtcgcctcctgctgaaactgggcacatttgggcccctgcgctgccaggaggcatgggccctggagcggctgctgcgggaagcccgagtactggaggcagtatgcgagttcagcaggcggtgggagatcccggccagctctgcccaggaagtggtgcagttctcggcctctcggcctggcttcctgaccttctgggaccagtgcacagagagactcagctgcttcctctgcccggtggagcgggtgcttctcaccttctgcaaccagtatggtgcccgcctctccctgcgccagccaggcttgactgaggctgtgtgtgtgaagttcctggaggatgccctggggcagaagctgcccagaaggccccagccagggcctggagagcagctcacagtcttccagttctggagttttgtggaaaccttggacagccccaccatggaggcctacgtgactgagaccgctgaggaggtgctactggtgcggaatctgaactcggatgatcaggctgttgtgctgaaggccctgagattggcgcccgaggggcgtctgcgaagggacgggctgcgggccctcagctccctgctcgtccatggcaacaacaaggtcatggctgctgtcagcacccagctccggagcctgtcactgggccctaccttccgggagagggccctcctgtgcttcctggaccagctggaggatgaggacgtgcagactcgagtggctggctgcctggccctaggctgcatcaaggctcccgagggcattgagcccctggtgtacctctgccaaactgacacagaagctgtgagggaagctgcccggcaaagcctacagcagtgtggagaagagggacagtctgcccatcgacggctggaggagtccctggacgccctgccccgcatctttgggcctggcagcatggccagcacagcattctaaactattcacccatgggttcctggtgcccctttccccccactttcagggctcaccaggcactggcagggagggtaagggctggctccagatacccctcccccacagattcctagcaatgaaaatctaatatatccttctgttgcccctggggttggagagtcagtgcctgcagtcaagtgcctcccagcctcggctcagcacatcccttgccaaaatcagtgtctggggcttggccaccctgccgctgcccagccacatcccttggttttgtattttatttacagagttttacagaaaataaaaaagcaaaatgtc

SEQ ID NO: 15772 - protein, 858 aa, Homo sapiens
MLRRQEELENGTAWSLSSESSDDSSSPQLSGTARHSPAPRPLVQQPEPLPIQVAFRRPETPSSGPLDEEGAVAPVLANGHAPYSRTLSHISEASVDAALAEASVEAVGPESLAWGPSPPTHPAPTHGEHPSPVPPALDPGHSATSSTLGTTGSVPTSTDPAPSAHLDSVHKSTDSGPSELPGPTHTTTGSTYSAITTTHSAPSPLTHTTTGSTHKPIISTLTTTGPTLNIIGPVQTTTSPTHTMPSPTHTTASPTHTSTSPTHTPTSPTHKTSMSPPTTTSPTPSGMSLVQTATSPTHPTTSPTHPTTSPILINVSPSTSLELATLSSPSKHSDPTLPGTDSLPCSPPVSNSYTQADPMAPRTPHPSPAHSSRKPLTSPAPDPSESTVQSLSPTPSPPTPAPQHSDLCLAMAVQTPVPTAAGGSGDRSLEEALGALMAALDDYRGQFPELQGLEQEVTRLESLLMQRQGLTRSRASSLSITVEHALESFSFLNEDEDEDNDVPGDRPPSSPEAGAEDSIDSPSARPLSTGCPALDAALVRHLYHCSRLLLKLGTFGPLRCQEAWALERLLREARVLEAVCEFSRRWEIPASSAQEVVQFSASRPGFLTFWDQCTERLSCFLCPVERVLLTFCNQYGARLSLRQPGLTEAVCVKFLEDALGQKLPRRPQPGPGEQLTVFQFWSFVETLDSPTMEAYVTETAEEVLLVRNLNSDDQAVVLKALRLAPEGRLRRDGLRALSSLLVHGNNKVMAAVSTQLRSLSLGPTFRERALLCFLDQLEDEDVQTRVAGCLALGCIKAPEGIEPLVYLCQTDTEAVREAARQSLQQCGEEGQSAHRRLEESLDALPRIFGPGSMASTAF

SEQ ID NO: 15773 - DNA, 4080 bp, Homo sapiens
  CDS (44)..(3313)
tcccagtccacttctctagggccagtagcagacaccagccagtatgccgaggaaccagggcttctccgagcccgaatactcggccgagtactcagccgagtactccgtcagcctgccctccgaccctgaccgcggggtgggccggacccatgaaatctcggtccggaactcgggctcctgcctgtgcctgcctcgcttcatgcggctgactttcgtgccggagtccttggagaacctctaccagacctacttcaaaaggcagcgccacgagaccctgctggtgctggtggtctttgcagccctctttgactgctacgtggtggtcatgtgtgctgtggtcttctccagcgacaagctggctcccctcgccgtggctggaattggactggtgttggacatcatcctcttcgtgctctgcaaaaaggggctgctcccggaccgggtcacccgcagagtgctgccctacgtgctgtggctgctcataaccgcccagatcttctcctacctgggcctgaacttcgcgcgtgcccacgcggctagtgacacggtgggctggcaggtcttctttgtcttctccttcttcatcacgctgcccctcagcctcagccccatcgtgatcatctccgtggtctcctgtgtggtgcacacgttggtcctgggggtcaccgtggcccagcagcagcaggaggagctcaaggggatgcagctgctgcgggagatcctggccaacgtcttcctctacctgtgcgccatcgctgtgggcatcatgtcctactacatggctgaccgcaagcaccgcaaggccttcctggaggcccgccagtcgctggaggtgaagatgaacctggaagagcagagccagcagcaggagaacctcatgctttccatcctgcccaagcacgtggctgacgagatgctgaaagacatgaagaaagacgagagccagaaggaccagcagcagttcaacaccatgtacatgtaccgtcacgagaacgtcagcatcctctttgccgacatcgtgggctttacccagctgtcttctgcctgcagtgcccaggagcttgtgaagctgctcaacgagctctttgcccgctttgacaagctggcagctaaataccaccagctgcggattaagatcctgggcgactgctactactgcatctgcggcttgcctgactaccgggaggaccacgccgtctgctccatcctcatggggctggccatggtggaggccatctcgtatgtgcgggagaagaccaagactggggtggacatgcgtgtgggggtgcacacgggcaccgtgctggggggcgtcctgggccagaagcgctggcagtacgacgtgtggtcgactgatgtcactgtagccaacaagatggaggccggcggcatccctgggcgcgtgcacatctcccagagcaccatggactgcctgaaaggggagtttgatgtggagccaggcgatgggggcagccgctgtgattacctagaagagaagggtattgaaacctacctcatcattgcctccaagccagaggtgaagaaaacagccacccagaatggcctcaatggctcggccctgcccaatggagcaccagcttcctcaaagtccagctcccctgccctcattgagaccaaggaggccaacgggagtgcccacagcagtgggtccacgtcggagaagcccgaggagcaggatgcccaggccgacaacccctcattccccaacccacgccggaggctgcgcctgcaggacctggctgaccgagtggtggatgcctctgaagatgagcacgagctcaaccagctgctcaacgaggccctgcttgagcgagagtccgcccaagtagtaaagaagagaaacaccttcctcttgtccatgcggttcatggaccccgagatggaaacccgctactcggtggagaaggagaagcagagtggggctgccttcagctgctcctgcgtcgtcctgctctgcacggccctggtcgagatactcatcgacccctggctaatgacaaactatgtgaccttcatggtgggggagattctgctcctcatcctgaccatctgctccctggctgccatctttccccgggcctttcctaagaagcttgtggccttctcaacttggattgaccggacccgctgggccaggaacacctgggccatgctcgccatcttcatcctggtgatggcaaatgtcgtggacatgctcatgctgctcgtcgcaggcgccgtggccaccatcaacctctatgcctggcgtcccgtctttgatgaatacgaccacaagcgttttcgggagcacgacttacctatggtggccttagagcagatgcaaggattcaaccctgggctcaatggcactgacaggctgcccctggtgccttccaagtactctatgacggtgatggtgttcctcatgatgctcagcttctactacttctcccgccacgtagaaaaactggcacggacacttttcttgtggaagattgaggtccacgaccagaaggaacgtgtctatgagatgcgacgctggaacgaggccttggtcaccaacatgttgcctgagcacgtggcacgccatttcctggggtccaagaagagagatgaggagctgtatagccagacgtatgatgagattggagacatgtttgcctccctgcccaactttgctgacttctacacagaggagagcatcaacaatggtggtattgagtgtctgcgtttcctcaatgaaatcatctcggattttgactctctcctggacaatcccaagttccgggtgatcaccaagatcaaaaccattggcagcacgtatatggcggcttcaggagtcacccccgatgtcaacaccaatggctttgccagctccaacaaggaagacaagtccgagagagagcgctggcagcacctggctgacctggccgacttcgcgctggccatgaaggatacgctcaccaacatcaacaaccagtccttcaataacttcatgctgcgcataggcatgaacaaaggcggggttctggctggggtcatcggagcccggaaaccacactacgacatctggggcaatacagtcaatgtagccagcaggatggagtccacgggggtcatgggcaacattcaggtggtagaagaaacccaagtcatcctccgagagtacggcttccgctttgtgaggcgaggccccatctttgtgaaggggaagggggagctgctgaccttcttcttgaaggggcgggataagctagccaccttccccaatggcccctctgtcacactgccccaccaggtggtggacaactcctgaatggcctcgagcctgcaacattccaaaccggaagggagaatttattttttgaaactgaaggaagtcccgaccttcctggattgaagtgcacactcatggactttaggtttagaaacctcctcagccttcatttgttcgtggatgtgtgagctctgagggtggccctgctattcctctgtgtgcctgtagtgtccccagcataggggtcttaggcatagggctgaacagtccttccagagccctcgttccaatccctgccgtccttgcccctgaggggccctgaccactgtgagcaggagggtggcagagctgggacaaagctgcctttgccgctgggctttccgggactgtggagggagcacaggcggggaagctccacttcagacagggcttggtggggcaggacatggctcccattttgaagggaggtctccatgtggtccgagtgaggtgagacggccctcgtcctggtgttcctgatcatcttgaaaggttcttctggaactcctgtccccttagtcatgagaacagaaagtgcaatatttcctttcacctggcaggggaggggggatttatttctgaaagaaaaatatataaacaaacagatcttctacatttatatttttaatcttctgttaaatacactttccgatattgccttgccttttgagctcttgctacagtcgcctttgctactgctttaagagaatttacaggtattgataaagaacaagactgttttattaaaagctttattcaacttg

SEQ ID NO: 15774 - protein, 1090 aa, Homo sapiens [sequence omitted]

SEQ ID NO: 15775 - DNA, 4035 bp, Homo sapiens
  CDS (151)..(1959)
aattcttgtattggaatcctttatactttggcgcaggacagcacttctcctgatgtgcagacctgggcattacattctctatcattgatcattgattctgctggcccactctattatgtgcatgtggaacctaccctttctcttattataatgttgttgttaaatgtgcctcctactcatgctgaagttcaccaaagccttggtcgctgtttgaatgcccttattaccacgttaggtccagagctacaaggtaacagtacttcaatttctaccttaaggacttcctgtctactgggttgtgcagtaatgcaagataacccagactgccttgttcaagctcaggccatctcttgccttcagcagcttcatatgtttgctccacgacatgtcaacttgtctagcctggttagctgcctctgtgtgaatctttgtagcccctacttgttactgagaagagcagtactggcttgcttacgtcagcttgtacaaagagaagcagctgaagtttcagaacatgctgttatgcttgctaaggatagcagagaagagttgactccagatgctaacatcagagaagttggccttgagggggcattgttgatctcactagacaaggagacagatgagagattatgccatgatatcaaagagactttaaattatatgcttacatctatggcagtggaaaaactctccctgtggttaaagctttgtaaagatgtacttgctgcatcagctgattttacagctgtaacttgtgtggatacaatgcaagaagaagaaggagataaaggggatgatgcctcagtcctgaccaccagacgtgatgaaaaatcccatccttttaccaatccccgatgggctactagagtctttgctgctgaatgtgtctgtaggataattaaccaatgtgagaatgctaacagtgcacattttgacattgctttagcacaagaaatgaaaaaaagagattcaagaaatgactttttggtactgcatcttgctgacttaattcgcatggcttttatggctgccacagaacacagtgaccagctccgtctttctggccttgaaatgctgttagttgttattcggcgatttgcaactgttccagaaccagagtttccaggtcatgtgattctggaacagtatcaagccaatgtaggagcagcgcttagaccagccttcacttcagagacaccacctgatgtcactgccaaagcatgtcaggtttgcagtgcctggatagcaagtggagttgtaagtgaccttaatgatctccgaagagttcatcagttgcttgtttcatcgttaactaaaatacaggctggaaaagaagctctaagtcacttatataatgaaagtgcttctaccatggagatcttagctgtgcttaaagcctgggcagaggtctacataattgctgtgcaaagacataaaaaccacagacaacctttgaagactaccacctgtttagaagacggtatcagaaatggatcatgttcatcagatggactgcttgacttagtctatgcagatcttggcacactaagcagactctggcttgctgcacttcaggattttgctcttttaactttgccttcagaatttgcctcccaacttcctgctgaaggtggtgctttctacacagcagagactagtgaaaatgcaaaattgcattattacaactcctgggcacttatcctccatgctacagcattgtggcttacaagcacgggtttggttgttgctgacccagatgaaggagcatctaatctctccaggcctgtaacaccaacttccatgtgtcagggttcatcatctggggctaccataaagtcccctgaggatgtctacactgatagattccatcttattttaggaatcagcgtggaatttctatgttccttacgttcagatgcaaccatggaaagcataactgcttgtttacatgcattgtaagcacttctagatgtaccttggcccagatcaaaaattggcagtgatcaggacttgggtatagaattgctgaatgttctacatcgagtaattttaaccggagaatcaccttccattcagttggcttcacttgaagtggtaaggcagattatctgtgctgctcaagaacatgtgaaggaaaaaggacgaagtgcagaagttgatgatggggctgctgtaaaggaaactctgccagagtttggagagggaaaggacaccggaggacttgtgcctggaaagtctttggtctttgcaacactggaattgtgtgtatgcattctagttagacagctcccagaattaaaccctaaattgacaggtagcccaggagtaaaagctacgaagccacagatactattagaagatggaagtagattggtttcagctgcattggttatcctttccgaacttcctgcagtgtgctctcctgaaggaagcatctcaattctccctactatattgtacctcacaatcggggtcctcagatagactgctgtgaagttacctgggggccagttatcttcgacagttgcagcttccctacaggctctaaaaggaatattatcttctcccatggcccgggcagaaaagagccgtactgcttggactgaccttctccgaagtgccttaacaacaattcttgactgttgggatccagttgttgaaacacaccaagaacttgatgaagtcagtctacttactgctatcacagtgtttattttgtctaccagtccagaagtaactaccatcccatgccttcagaagcgctgtattgataaatttaaagctactcttgagataaaagatcctgtggtacaaatcaagacctaccagctcctacattccatctttcagtatccaaatccagctgtttcctacccatacatttactctttagcatcctgtatcatggaaaaactgcaggaaatagacaagagaaaacctgaaaacactgctgagcttgagatcttccaagaaggcataaaggtcttagaaacactggttactgttgctgaagaacaccatcgcgctcagctggtggcctgtcttttgcccatcctcatttccttccttttggatgaaaattctctgggatcagcaacttccataatgagaaatttacatgactttgctctacaaaatctcatgcaaattggacctcagtattcatctgtttttaaaagtttagtggcttcttctccagccctaaaagcccgccttgaggctgctataaagggcaatcaggaaagtgtcaaagtcaagataccaacatctaaatatactaagagtcctggaaaaaactcaagcatccaattaaagaccagtttcctctgattttttttttggaatagtaagcaccttaatataataaatacttgatcattgcctttggtgacaaaagggacattgtagacacaagtgcccttagaggtctagttgattgtattaccttaaatagctgtgactcttcaaagtaacagcatacttaacatttttgtgtgtgtgcgtggggtttgagttttgttttgttttgtttttctatttaaaaagacaatggagctaacttgccaggaattttaagaaagtgctaaagaactaaacttactaaacaatccactgctttaaaaatgaaatgaatttcttctaacagtccatacatatgtggtatacttaatactgtgacagatataaatatgactctagtgtaaattatctgcactaatattgtatcccaattgctgatttaaattctgctttggcccggcacagtggctcatccctgtaattccagcactttggaaggccaaggcgggcggatcacgaggtcgggagtttgagaccagcctgaccaacatggtgaaaccccgtctctactaaaaatacaaaaattagccgggtgtggtggcacacacctgtaatcccagctactcaggaggccgaggcaggaaaatcgcttgaacctggcaggcagaggttgcagtgagccaagattgtgccactgcactccagcctgggcgacagagtgagactccatct

SEQ ID NO: 15776 - protein, 603 aa, Homo sapiens
MLLLNVPPTHAEVHQSLGRCLNALITTLGPELQGNSTSISTLRTSCLLGCAVMQDNPDCLVQAQAISCLQQLHMFAPRHVNLSSLVSCLCVNLCSPYLLLRRAVLACLRQLVQREAAEVSEHAVMLAKDSREELTPDANIREVGLEGALLISLDKETDERLCHDIKETLNYMLTSMAVEKLSLWLKLCKDVLAASADFTAVTCVDTMQEEEGDKGDDASVLTTRRDEKSHPFTNPRWATRVFAAECVCRIINQCENANSAHFDIALAQEMKKRDSRNDFLVLHLADLIRMAFMAATEHSDQLRLSGLEMLLVVIRRFATVPEPEFPGHVILEQYQANVGAALRPAFTSETPPDVTAKACQVCSAWIASGVVSDLNDLRRVHQLLVSSLTKIQAGKEALSHLYNESASTMEILAVLKAWAEVYIIAVQRHKNHRQPLKTTTCLEDGIRNGSCSSDGLLDLVYADLGTLSRLWLAALQDFALLTLPSEFASQLPAEGGAFYTAETSENAKLHYYNSWALILHATALWLTSTGLVVADPDEGASNLSRPVTPTSMCQGSSSGATIKSPEDVYTDRFHLILGISVEFLCSLRSDATMESITACLHAL

SEQ ID NO: 15777 - DNA, 3719 bp, Homo sapiens
gtcttgctctttaattgtaactttacagtgttttcgctcacgagccgaaacttcaagttccctttttgccagcagagtttgggttgcggtcgctggaaaacttgatgcgcactgaaatctcttggtctgtgcatgaggaagagtggatccagcttcttgtcttggctctctgttctctgaatgccttgtactttttgcttttctatcttaccattttttttttgtttgctttcactgtgaataatatattttcatctttccttaccttgctttttttgctgacagaaaatggtgaatgcacaccgtgggtgcagtgagggcttggtgcctgctacgtgggcagcttccacctgtggctggcttattgggctacttggagccacagaatcattgctgagctccgatgtgccagagagtcccaggccatatgggtcactcttctagcttgggaatcttaagtccagctttttggatgtcatcctccctggagggggagctcatgaaagtccaaggttcgagtcttcctccccagagggctaccctgtaatgccgtgggggggtgtgtgtgggggtggcagggaagctctgtcagccttggctatggctgatgccagtcagggtcatagacacctgtttgttctcccctccctgccacaaacgttgaggactgtgaacattatgtcactgtgacctgcttacaatggtaactaagcgttaggcagaaggggttgaggaggggggagacataggctcttctgtaatagtatggtgtcgacatggtgttctttcccctcccttttagctattgaaacaatccacccggtagagtgaacagcttgaggttgatcctggcctgtgataagagccaggtcagtatacttgttagggacatgtgagagacctccccgccacactgcaacattcacagcacctttcctggacctcctgtcacctcgcaggtcagggagttatgtcccctgggaacccagggcttgtccagagctacccacagttgtctgcatttccaggtagcccgattttggggttctaggatgtttcatctcctgggggggtaatcaaatccctggaagaggacaagaaagactgaggtaggaataaagttcttttaaacctcaagggtgcccattgcaggttatcaaaactcacttggtgaaccctgaagagggagatgggtttggtggaaatggtttctccacttgcctatttggcctcttttatgatgcttccaaggaatcttgaattcagcacagtcaaaaccaaactcaggatcttctcttgccaaaagcagtcccttcccagggccccttctgggtgtctggcaccgatatttgaacactcattgccataagccagaaatatagaaggcgatctgtgtaccccctctctgttagcatccatacctagtccacctccaagttctgaaaaatctctccagctcttcacttgaatctgcctgccttctgccactgccctggtccaagtcaccatctgctcatgactgaacttagagtagccttcgtctggcccacctttatctgctctgactcacctctagtgctttctccattcttctgccatcctggtcttttcagagccataacatttgcttgtcacccttattatgaaaaaccaaccacttggtggccttctgttgctcttgggacagatcttcatgtggcccacaaggctctgtgcagcccagctttgtctccctgccagccttgtcttacacaccgtgttgtccatcgtatctgtagcctggccataccctagcagttgccttcctatcctcaactacatcacatgctctctggcctcaggacctttgcacatgctgtttatgctacttggagtgttttgttcctttcttcaccctcagccactccctctggactgcactccacagggcagaagctgaggatgttcagaagcccagacggagttggctgccctttgggacccaagcgagttgtaaacattctggcttcagatgtaaatcaaaggcagagccctgagttttagggcagagaattccttctatcagctctgcaatgagccctcacaggcagactcgggcccaaatatagcctaggtgctgtttatgtatttgaaagtatttaaggctggtccttctgtcatcggtcctccaaagtcttttattacattttgggactgtggtatatagagttccaaatttctttctcccctagagcaaatggtttcagtttactgtaatgcataataaacatgtaaacataaataggcacacttcagaccaggttttccctgtagcttagctttctctgctaaggcccccttccaggtttttgggtcggtgtggtcccaggttatgctcagactcgcccttcatcacctcctccttggcctgcgaggcggtcatggcttcttcgtgactcatcttcgtggcactggggattgcagggaggcatggtgatgtccttttccagtcacaaggctggactgccaaacgaactgccacagattcctttccagtgccccaagctgaaggaaagcgtgatcaggaagcaggcagcagacgtatttgaacccagacatgctcgaccccctccctgagcaggtgtgaaattgtgtatgcagctccatagctccactgaggattctgaagtgatcctctgcacgacacttcccggaaataagtggaaagcttactgcatgactgaaaagtacgtatcagtcctgcacccctaggattgccctggactcttgtctaaactgtttgttgttgataccagcctcagaagctggatgcctttaagccatggctagtgtgtttaaccgatcccttttatgaagatcttgtaagcgcgtggtaatagcccactatgctttttaactgaaccagcagagcaaacatagttaatggagagacatttttgtcattccttggcctctgtttatttgcaaaaacgagtaaagtgttacctgcaagtggttcagtgcgtgccggggtgtcaggctgcaggtatgtgagcttgttcaaggcttgtcttgcccacgcagcagtttgagagccccagagggcgaacgctggggccctgttggaagcggtgtgtggatgaagccacccaggagtcccttctctcctggtcacctatagggcttgcatcactttttaaaggagcactggcccgaggcctagaaaaacagccatgtgggtgggtaagaatcacaaagacattgcaagtcagtcctaactgtctctccaagatggtcttgaatttgacaaggtgatgaagagttggtgctggcaggtttaagaaaacaaacacaaaaccaggttggggtgctgatttagtgccttgctgccttttcagatccctcccctgaactgctggcacctgatgtttgagctatttttgtacctgtctcttctcaaactagatgataagtggcctcagggcagggactacatactcctgagagctgcttgagctcgaggtgtttattttcctcagtaagcattttttttcaggagcatgacttggctcaaaaaaacaaaaagaaaaaagaaaccctcccctcaatttacctgtgtctaaactttggtgaattattctcccatctgccttctgggcagaggagaaatgtggaatgcatcaagttcaaggtcttggtatttaagagctggctttaaaggttgccatgttaacaattgt

SEQ ID NO: 15778 - DNA, 3763 bp, Homo sapiens
  CDS (52)..(834)
acttccaagttctggtacaaggcggatatttcaagagaacaagccatcgccatgttgaaggacaaggagccgggctcattcattgttcgagacagccattccttccgaggggcttatggcctggccatgaaggtggccacgcccccaccttcagtcctgcagctgaacaagaaagctggagatttggccaatgaactcgtccggcactttttgatcgagtgtaccccgaagggagtgcggttgaaagggtgctcgaatgaaccatatttcgggagcctgacggccttggtgtgccagcattccatcacgcccttggccttgccgtgcaagctgcttatcccagagagagatccattggaggaaatagcagaaagttctccccagacggcagccaattcagcagctgagctgttgaagcagggggcagcctgcaacgtgtggtacttgaactctgtggagatggagtccctcaccggccaccaggcgatccagaaggccctgagcatcaccctggtccaggagcctccacctgtgtccacagttgtgcacttcaaggtgtcagcccagggcatcaccctgacagacaatcagaggaagctcttcttccggaggcattaccccgtgaacagtgtgattttctgtgccttggacccacaagacaggaagtggatcaaagatggcccttcctcaaaagtctttggatttgtggcccggaagcagggcagtgccacggataatgtgtgccacctgtttgcagagcatgaccctgtgcagcctgccagtgccattgtcaacttcgtatcaaaggtcatgattggttccccaaagaaggtctgagaactcccctccctccctggacccaccgatgcctctcgaagccctggagacagccgttgggtgagggtggggcccccactttttaccaaactagtaaacctgacattccaggcccatgaggggaaagaggatcttccagctctgcaaaaacaagaacaaacaacatcaccgtgaattggcctttcctgaaagtgacttatctgacacatctctgtagccacatgctttttgggtagaagaagctgggcatgggtgcaccccaccccctagggtccccatgggaaagggacatgcaaggaaacagcacagaacacgaggtggtccccatgtccctggcacactagcattctgggggatgaggaatccccagcccttgaggcagaggtgccgagtgactgccatgcttcgcccgtccgcatgggcgcttctgtccagctgcacccgaggccgggggtttccctcacctcggtcttcccaagatggagatgctaacgaaactgagaagggggcgtatgtttgacgaaggtttgtgcaagtcaggcccttctggaacacagcagggcctacaacgaggggcctttgcgatgggctgtgaggatgggggtggtgggaagaattggccacgttagagaccccatgccaccccaccatggtgagtgctctgtgcctcctgctcacctgtggtgagctgggcgagctgggcgagctgggcgagctgggctggggagagcctgtgaggaccgagaggagaaatgagaagaaggaacaaaaatattatttctatgtaatttatattttacttatgccaaattatttatgataatttgccattgctatactgtaccagtgtcaaatgctgcagcctgccaagctgtgattttgtgaggcttgtccctatgtaggatgcaccgcaggcccctggccactgaaagagtgtgcagtggactgtgggtctcccatatgcggtgccgcccaaaggtggctttgcctcaagcaacctaccctgatgttttactcattggaatgtttttccccgattgtggatgacttcttttctgatggagagagtccaggagggatggaaaactcctggatttaagctcagcatcccccacatgggcttttcgatcatcttcaggcctgaagctgcacgacctgaagttcgcctgcatttatcagcccttttgtgctgctccttgccaccttggggttcctgctggggaccatgtgtggttgtggcatgtgtgagcagaagggaggatgaggaaaaagagaagaaaccccggtactgacaagctgtttttgagtgccactgtttgccatcatctaagccactgaatcaagtgtatttcaggcttatttcaacattccaatgccctggttttcctgcttgaatctgttcgtggtcaaaggtttgggggaatttgtgaccctggaccatccccagagtgaaagatggagctgggccacatcagaataaggccttggccccatcctctcacagcctaggtgctctgcaggcatactgactgtcctgattgcgatccagcccgaaattccctcctctgctttcaaaagtcaaatcccccattcttaggccacactggtgtcacaagctcctgtcagggagctggggtttgggaatgtgctttgtgaactctgctttaaagtgaggggccgaggaaaacttagaaacaggcagagttggaagcagccaaatcacagtgggtgttgtgtgtgtgtgcgtgtgtgcatgcgtgcgtgtatgcgtgtgtgaaagcaggtggaccattccactttttagctcctattgatgcaccaaaccaagtgcctcatttctgtgccaaatgtttgccttggtcgtcgtggacctccttctctaacttgaggtggcatgactgtcaggaggtgctggcattttcagcagatcctcatgtgttgaccctgatgtctttagcagaggcctctagcatctcggtttttcatccactgcaggaatgtggccacagggagcagaggtttgtactttccccaagaggtcctcatcctgagacggtctctacccatgtttaacccaaagagtgcaggccaggttccttatccttctgatgaaggatgagagagctcatttagaagtcagagcaaactagggtctcagtattgagaaacgcagcctgccagggaatcacagagacatcggggtgcccgcgatggccctcatgaagccatgcctcgacggcattcaggaagccctgcaaacgtgctttttgaactcattggccaggtgtgatttttacacaaggtaaacgtggtcaagggcatcggggaatttgctccaagcagatagctccctctgaggaaccaaaggaagcaagtttccatgatttctgaagagctggtataggaagtttctttcttccttttgtgttacatgtgcattaaacagaacaagctgtgtgtcatcacagattgtactgtgggctcagaaaccgtgagagagcccccaccgtggacaccggctctatggccacaggaaaaggaacgtttccaggcattttgtctccagggctcccgctggacaggcacgtactgccccggggagtaaatgcggagagttcacgaactgtgcccaacgcatgttatagccagggtcctactaactactcagtaaaagaacgtattgttgtattcctccagtgttaagctatagccatgttaaaagtcactgtgcatttattctcagcatcaaataccttgtaacgtcttctctgccttgttagtgcatatttttacttttctgatactgtaaagaatatatccagtatgtaaatgaatgttctataaatcttttgtatagtcattttctctgctccttaaatatcatctctattcagagtataataaaattatgaacttggtaagcctc

SEQ ID NO: 15779 - protein, 261 aa, Homo sapiens [sequence omitted]

SEQ ID NO: 15780 - DNA, 3962 bp, Homo sapiens
atatctggcagctggctatgccatcattgccgaaaacaaactcctataatccaatgctctctcatcacatatcacctcacaacaagcggaactatttgccctaaccaagaccctcactctagcaaagggaaagagggtcaacatttacaccaattccaaatatgcataccatgtcctacagtctcacactgtaatctggcaggaaaggggtttttctaactacaaaaagaaccgccataataaatggcaaactcatacacaagccgctggaggcagctaaactaccactagaggccgtcattatccattgcaagggacaccaaaaggctacagatgccataaccaagggaaacttcttagcagattcggcagcctggcaggcagcccttagaacactattgttattgcccattttccctagcatacacccaagaagaaaaaggtgccttgctggctccagggctgttcataacgaaagctgaatttacttagactacaaactcatcctacccaagacccaaaaactttctgttctcacccacatccataaccaattccatgcgggttatctcccgttgctccaatttctaaaaacctgtatacattcccttaccatggccatcagcttggaccgcctcactaaaggttgctctgcctgcagtcagacttcccctcaggggcccttagaccacctccttttccctcccttcaggcccaaaggccagttgccgggacaggattggcaaattgacttcactcatacgttcccccataaagaaagtctgatatctcctcacgatggtagataccttttcaggtggatagaagcctttcttactaccactgaaaaggcacacaccattgcctctaccttcctcacacacatcatcctttgattcagcctcccctcatctatacaactggacaattgaccagcatttatctcccaagtcactcaacaggtttctaagtctttaaacatcatatgggtttttcacattctctatcacccccaatcctcgggtaaatttgaacaggcgaatgccctcttaaaacaacagttaaccaaactttccctagagatcaaaatgaaaactgaatatcacttcttcccttggcccttatgtgcctcagggccctcccccgaaaacctctaaatctaagtccttttgaactcttgtatggacgttctttcgtcctacagaactttgctccatcccctcccttacaggacacctggccagcactgcacctcactcaacacttagtccgacagtacactgacactcacctccccaaacctgaggattcttcccaattcactttcttacccttacagccaggagactgggtctgggtagcacacccctcctcccctttccaacaaaatggaatggtccctatcaggttatattcaccatccccgctgctgcaaagttaacatcctttccctattgtatacaccattccaaatttaaaaaggcacccggcccacaccccgaagtctcctcaccccggaaatattcttcctttcccacaggaccaacctcgctgtgcctaacaagaattccagaagtcacccatccgaaaggcgctggcccatgacactctccatttccaatcttaaatcttttacttcataccttgtctcagatctctcctggtaccccttccccacgcccttagataatccatctcaattcctcacgctaattgaggagctatggctgcaaggcaccttccaggatttcacacctacacaaatctcctttttctccttttgccttctctgcttatgggatattctgagtccccacccccaatcactgacagctgggcccccttcatcagcctcacacaccacgtattaagtcagtcacaatctcccctctcctctaactgctggatttgtctttctacacacacccaatgattcacggctcttccggctgacctacttacatggacacagtccaacgtgagcttacacatttcttacttggctataccattcttggctgattcattcctgaaaccggttcataacctggaaactcagctaaacacctttccttcaaactcagctctctcagcatggtttcaggtagggctgttgccctccttcacctaatagcttctggactaacatccatacaaaccaacacagcatcatctaaaccaccaatatgggggtaccatttctactcaaacttcctttatatccccaccccccttatgtctcagccgaacctaccctaatccagcccacgccacaatggtgggacaggttccccagtcctatgtggtcttatttttacccttgcactccctgtagaccatcaattctacaccctaattacaaaatcatatccacctctgcctggcagaaggtgttatgcttttctggctcgcctaccatccacacatccctacacctcaccaccggatcctcttttctttccttccatccaattcctggcttccccgctgccaactctgctctctatgtctccagtttaaaggtgccccctggaaaaaatgtaacaattccctcacctgtgactggtacctgacagccaccacaccggggcagcaatggctaacggttgacaaagacaatttctttctctctccaaaaccaaacagccttcatcaactccctagccaagactccctatcaggcccttacaggtgccgctctggctggcagttacccaatttgggaaaacgaaaataccctatcatggctacctaccttcacctacaacttctgcctgtccacccccagtctcttctttttgtgtgatacaaactgatatctttgcctaccagccaactggtcaggaacttgcaccctggtctttcaggctccaaccatcaacatcctaccccctaaccaaactattctaatttctgtagaagcctctatctcctcttcacccataagaaataaatgggctctacatctcatcaccctgctaacaggattaggcatcactgctgcacttggcactggattagcaggcataaccacctcaatcacctcataccaaacactattcacaaccctttctaacaccgtagaagatatgcacacttccattaccagtctccaacgacaattagacttcctcgtgggagtcatccttcaaaactggagagtcctggacctcctaaccactgagaaagggggtacctgcatatacctccaggaagaatgctgtttctgtgttaatgaatctggcattgttcatatcgcagttcgtaggcttcatgacagggctgcagagctttgacatcaagtcgctgactcctggtggcaaggatcatcccttctaagatggataccctgggttgcccccttcctaggacccctgatcttccttttcctgttactaatgattgggccatgcatatttaaccttgtatcccgcttcatttcccaaaggctgaattgttttatccaggcaagcatgcaaaaacacattgataatatatttcacctttgccacgtctaataccagagccttcgaggaaaccattcggaagctccagaacccaggccctaatcacaacgcccctatccagcaggaagcagccagatgatcaacgacgccctttttcctttttatactaaagtaagaaataagaatgttagcccaaactgcactattttgcagacccctaccattttacaaactggtcagagtggaaaattccaccagggcctgagctgtgagaaacatcctgtcaggcaggtcccaggcctaacccctggctgcactaaattccttcattatcagcagccaaacacaccgcccccaccccattttcacaacaatcccagacctctcctgcccgggactgtaactggtccagcctgtaagcgggaagggggctctggcactagctggtaccccctctccgcaggtctttctcccaataaatctgtgttgccattg

SEQ ID NO: 15781 - DNA, 3928 bp, Homo sapiens
  CDS (129)..(1340)
gcgggaagggtcctgggccccgggcggcggtcgccaggtctcagggccgggggtacccgagtctcgtttcctctcagtccatccacccttcatggggccagagccctctctccagaatctgagcagcaatgccgtttgctgaagacaagacctataagtatatctgccgcaatttcagcaatttttgcaatgtggatgttgtagagattctgccttacctgccctgcctcacagcaagagaccaggatcgactgcgggccacctgcacactctcagggaaccgggacaccctctggcatctcttcaatacccttcagcggcggcccggctgggtggagtacttcattgcggcactgaggggctgtgagctagttgatctcgcggacgaagtggcctctgtctaccagagctaccagcctcggacctcggaccgtcccccagacccactggagccaccgtcacttcctgctgagaggccagggccccccacacctgctgcggcccacagcatcccctacaacagctgcagagagaaggagccaagttaccccatgcctgtccaggagacccaggcgccagagtccccaggagagaattcagagcaagccctgcagacgctcagccccagagccatcccaaggaatccagatggtggccccctggagtcctcctctgacctggcagccctcagccctctgacctccagcgggcatcaggagcaggacacagaactgggcagtacccacacagcaggtgcgacctccagcctcacaccatcccgtgggcctgtgtctccatctgtctccttccagcccctggcccgttccacccccagggcaagccgcttgcctggacccacagggtcagttgtatctactggcacctccttctcctcctcatcccctggcttggcctctgcaggggctgcagagggtaaacagggtgcagagagtgaccaggccgagcctatcatctgctccagtggggcagaggcacctgccaactctctgccctccaaagtgcctaccaccttgatgcctgtgaacacagtggccctgaaagtgcctgccaacccagcatctgtcagcacagtgccctccaagttgccaactagctcaaagcccctggtgcagtgccttctaatgcgctcaccaatccagcaccatccaaattgcccatcaactcaacccgtgctggcatggtgccatccaaagtgcctactagcatggtgctcaccaaggtgtctgtcagcacagtccccactgacgggagcagcagaaatgaggagaccccagcagctccaacacccgccggcgccactggaggcagctcagcctggctagacagcagctctgagaataggggccttgggtcggagctgagtaagcctggcgtgctggcatcccaggtagacagcccgttctcgggctgcttcgaggatcttgccatcagtgccagcacctccttgggcatggggccctgccatggcccagaggagaatgagtataagtccgagggcacctttgggatccacgtggctgagaaccccagcatccagctcctggagggcaaccctgggccacctgcggacccggatggcggccccaggccacaagccgaccggaagttccaggagagggaggtgccatgccacaggccctcacctggggctctgtggctccaggtggctgtgacaggggtgctggtagtcacactcctggtggtgctgtaccggcggcgtctgcactagtgaagccctgggctcttcccaccacccatctgttccgttcctgcagtatacctggcccctctccgaagccccttgtccctttcttggggattgtggaggctgggtcagaggggagttaagggactgcaggcctggcagcaggacatgccttggctgaaccaagtcctgagagcagtatctctgtccccacggtgccttgtgtgggtccccgtccttggctttctgggtcctgggctgcccccagtgctccagaccttccccactggcaatccaggttatcatccatgtcctccagaggagcttcctcctccaggcctcagccctgttggcccaggtggagcaggagggaccactggaacatgtggtgcttgggaatgcctctcctgttgcattggtccctgaaggcctcagggcaggtatgtggtgtgtgggcgactccacaagacctgcctcccatcctggcagcccagcctgagaccgttgcattgaggcaggcaggagcggcagggtggctgctctccaggagcccaactgccttgagttcctgccccactgggccccctcccctgctgggcaatcctgggaaggtctggaggttcctgtggacctcagggaagccaggggcagctgtcaggcctgaggaagacctgtggagctcctctccagcctcctctttccctcccctctggtctccattctcttcagctccctacatgggctggggaggagacacctggtgggcagagctcaggcagaggtttggatttcagctccctcacttccggggctgtgtggctttggcagatgtcagacttctggtcttgcttctccacgtggacagtgagtatctggctcattcttcactgggttcttctgagattgaacctacaggtgtttgccaagtgcctggcccagagcaagtggccactgcttctcccatctctctcctgcccaacctggtagagctgagggcatgagaggcagagtgcacagtggtcaagggtgcagctctgcagcacaggcagcctaggcctgcgtcccaacctgcctctcaccagctctgtgaccttgggcaagggatttatctgtctgtcccttagttttctcacctgtaaaaggaggataagtatatatatatatttcccagtgttgtgaagattaaaggagtttatcgatgtaggtcttaggatgagtcctggcatttaccaagggttggatatatgttattatcactattaagtgttgagggtccaggcatgctgggcaacagggaccccatctctacaaaaaagtttaaaaaattagccaggcgtggtggtgcacctgtcgtcttagctacttgggaggctgaggtgggaggatcacttgagcccagaagcttgaagctgcagtgagctaggatcgtgccactgcactccaacctgggtgagagagcgagaccctgtctcaagaaaaagaaaaatgcagagaaacaggagtcttggctactcctttagaggcagactcagaccctcctgcctcacagctttatctttgtatttgccccttactttatcttgtgccttgagaaattgctggggagagaggtatgtccactgggcagctgtacaggatggaggatctagggcgtttccactcccagcagccaggttccctcaccccaagctcacccactgttggggagattatctacaataacaccagaaacacattggggtggattgggggtatccttatgggttcttttcagggaaccattgctggacaaggcacaggagccacctccatttctgagctctgcaagggacaagaactagagccatcaggggctgggctcactgtggccccaccccaagccgtcagcctccagggatctacaccctgccttggctgctacagctttttcactccactgccctaggggagttcagcaacctaatgatctctatctctgaacatctcttcatcccatgctccaagtccagcaacctgcaccctggaaccaggagtggaccctacccgagctgtctgtattaatccccatcccccaccaccaatcttaaaaagccctctgtccccctaccctaaaccccagttaggtacccatgctgggcaggtcagttaacaatttatgcacaggtactagttttattgtattaccgttccagggtagctttg

SEQ ID NO: 15782 - protein, 404 aa, Homo sapiens
MPFAEDKTYKYICRNFSNFCNVDVVEILPYLPCLTARDQDRLRATCTLSGNRDTLWHLFNTLQRRPGWVEYFIAALRGCELVDLADEVASVYQSYQPRTSDRPPDPLEPPSLPAERPGPPTPAAAHSIPYNSCREKEPSYPMPVQETQAPESPGENSEQALQTLSPRAIPRNPDGGPLESSSDLAALSPLTSSGHQEQDTELGSTHTAGATSSLTPSRGPVSPSVSFQPLARSTPRASRLPGPTGSVVSTGTSFSSSSPGLASAGAAEGKQGAESDQAEPIICSSGAEAPANSLPSKVPTTLMPVNTVALKVPANPASVSTVPSKLPTSSKPLVQCLLMRSPIQHHPNCPSTQPVLAWCHPKCLLAWCSPRCLSAQSPLTGAAEMRRPQQLQHPPAPLEAAQPG

SEQ ID NO: 15783 - DNA, 3895 bp, Homo sapiens
  CDS (93)..(599)
ttaaagaaaagaaggcagcagtgaaagaatttgaagacaagaaggttgagctgaaagagaacctgattgctgagctagaagaaaagaagaaaatgattgaaaatgaaaagctgacaatggaactgactggagattctatggaggtgaaacctatcatgaccagaaagttgcggaggcgaccaaatgatcccgtccccatcccagacaagaggaggaaacctgctccagcccagctaaactatttgttaacagatgaacagatcatggaggatctgagaacattaaataagcttaagtcacccaagagaccagcatctccatcctctcctgagcacttgcctgcaacacccgcggaatctccagcccagaggttcgaagctcggatagaagatggcaaactgtactatgacaaaagatggtaccacaagagccaggccatctatctggagtcaaaggacaaccagaaactgcgctgcgtgatcagttctgtaggagccaatgagatctgggtgaggaagacaagtgacagcaccaagatgaggatctacctgggccagcttcagcgcgggctcttcgtgatccgccggcgctcagctgcttgactttctacagtgctcttctcttgaccctttttctggagtgggttttatttttgttttgtttcgttttctccttaatagaaaaatgttaacttactgggaatagctactcagccttggaaatggagagcactgcagtgaattctttagggcacttttgtggccggatgcttccaactttgtcagtcttttctgcctcaacttcttccagacatcagtcaccatgagactgttttactttcaggcgtattggggggtttgatttactttccttttatttctttattttttgcttatacttgtttttgaaaacctcctctgagtttgaagggacagctatttttattgattatctttaagtctctctaccatggagaagagcaggaagggatacactctccagtgcattttcatgttttgaatctgattagtggatcacgtagctactttccctgtcgcgtccaattcactatttgcccagaagcttggggcagaggtcctagcaggagatgatgaattctcgtggctctcggccttctcagagaaataaatgctttgtgtaacatctgtgcacaccatccattccgctcgctgagcgatggaaaagcttgcctggaagactatgtgcactgaagtaaatggggttgggggaggggacatttcatatttataatgtgctgaaggtaccatattttaaatgttatttaatgcaggtgatttattcaaacatttgttctagcttaagctggaataagcagtggtcatttcagaagttttcatttgtaattccttcctctcccttgttcccaagtaggtagtagtaagtatgtgccacaggctgattatctgggtaatcttttacgggtgggaggtgagattgatagtgcaataatcagtgatctatagaccctcatgcacgattcaagtttcactcttgtggctgatgccattattgcacattggccattccaaacctgtgggaactttgttgtcaggccctgagcgctcacagcttcatttggcccaggttgaagacaaggaaagctctgctgtggctgcctctggactgacaccctccctaatgagtcctgatgaaacagcctttcctacatccttccctcactcccatgattggagaaatgattcattgggtgatgagtgttggggttttctatactcatgttgccatcttgagatgttcaaaaaatttggggttagagcaactgttagcgtctctatgagcaatcagtagaacttacacatcctaggaaatctttctttgtaagtaattcttttggtctcaagtgattctcttcatgttgtctcttgatgtacatacccccaagcaagttggggggactgtgatgacaattaaatcaccttctctgaagttctggctctgcagagaccaaaccttactgacttgtacagacttgtacaagtaaagacttatacagatagatttttgttttaacttacaatccgttttttcctctttttttttttttttttttctggtgttggagtcttatttagaaaacaggataaatgacgctgttatcaaaagttgcctggggttctgtatttcttctctgccctccaatccccgactgctatgatgtttactacagtgaacccagcccatggtaaacacaggcttcacctgttcgtgtttgttagccttgactgtgaggcaggacttccctcgcttgaactgttacacatacgatgtgtgtgtcacatcacatattgtgcagctgttggttttcatgtagtgccctgcgatggaaattagatatatttcatgtatttttccattgaaggtggagtttttcaatgatcatgtgttttgtcctcctaaacagtataccaaagtttgtttttatagttgaggattgtattgataaccactggggttccgcattgaagcaggaacatattgcctctttttctggccttctctgtgggacctctgcttttgtgaagcaactatttatttgaagaccagggtatgggcacttttgccttctctcctctctgacttttgagggtattgagggcgcccttagtcatagtctcgactccgccattgccttctcctcggcgtcctcacaactcttaattgggcctagtgaaaatgggggcaggtgagaagtccattttgagaatcagcatagtaaattacatttctaatcccagaggacttaatattttcttttgtcaccccagaggtgaaaaatcagcagttgaagcctgacaggcctcagtggtgaccaggaacagaagcagccttcctgttagtagatgggggtacttctgtggtgggcagaagccttactaaaggggaagacagactttgaagtttctagacgagaaggaggcttgcttctagcctgggtggccattattccaaaaggtcattgtttctcactagaccccagggcaccagatgaatttccaagtttaaactctttcctgcaggtgattactttgaaaaaggttggtccagaccattttgatcaagaacctgtatatgtgttgtgttagaggcatctgcctcaagtctatgtacagtgtttgctgcgggtgtgttccaatattcattttacctctgcttgggggttttgtgtgttcccctccccccatgccctgcctacccccttttccctgaaccacgtccttttgaataatttccagatggatttctgtagccataccaaagccagggtgttttcattcatgcggatactagtatttatagatgtctgactacctaacttaatttttgtttttgaacttctaattggggccagtgtaaggtcgatcccagaggctgatctgcaaatcaagctacatgtatttgtgtataagaccctgtgttcaggactgggtgacttttctaagaaatatggggtttagaatggggttgactgtattttttaacctaattctggagagaagattgtattttttacagttttttgggtttggcttccttctcacatttctttagctttgaatttttactaaataaatttcctcctgattaattttttttttctcatctgggaatttgaaatctcggtgcttactgttacaccaatttgtccaaagagttgaaatcactttaatgccagaacatggtaaatttgcagccatttcaagcaggtgatggtctttttttataacatcgttaacgggtaccattaaatattctgagaggtgaatgtaaaatataaaaggtataggtttttttttttttttaaagaaaacaataaactttcaaagagaaaacc

SEQ ID NO: 15784 - protein, 169 aa, Homo sapiens
MIENEKLTMELTGDSMEVKPIMTRKLRRRPNDPVPIPDKRRKPAPAQLNYLLTDEQIMEDLRTLNKLKSPKRPASPSSPEHLPATPAESPAQRFEARIEDGKLYYDKRWYHKSQAIYLESKDNQKLRCVISSVGANEIWVRKTSDSTKMRIYLGQLQRGLFVIRRRSAA

SEQ ID NO: 15785 - DNA, 3915 bp, Homo sapiens
  CDS (2614)..(2994)
agctcagtgcccagcatgtctgtggtgagtgtgtagttcaggaagtgaactggcaaaactgagtatcaccctctcttcctgggttcttgccactcccctgaaaaccagggtagcattgtcacatcagatagctccgctacgtgtgcgctgaccatgctgagatgggcactgtggactcagcctctggtcattgctggaaccagcggcctccatgtgaggtacaggggaacgcactgctagcagatggttgggatgtggacactcgtcctgccctcttggcttggtgctgtgccatcgcacagtcattcgctgtttagcatgcatgggagagagtgaagcacaagggcccaggcccctgggagtgcctgccctcaatttggaagagcccttgggcacagcataggcgcctggcagaattggactgggccatgatccagggcattgggacctcacctaggagttggggttctggtcagaagccctgtggagacagggtctcccctgtgggcaccaaactgacctcaaactgctggttctttggccctggggacagggctggttgaagtactctcccggcagctgtcacctgcagggagaggtgggggtaggggtgctgtgtttcttagctgttcctcgttgcagtgttaaatccctgcaggttccttattctcagcttgtgttgtgagtttcagtgttgggggctaatgtgggtttgcgtttttggtcttggttttcccagtggccagtccatcagccactgcactgggggccaggtagaggccaactgcaccctgcctgccagagtagaaatactggtaggccccaggctctgctgccccttccatgtccttgtgtaagcatccatggacaaagctgactcacggggtgtgcacagctgcagggaggccaggaaacaggggttttattctagagggccttgtgctcagtgacagaccagagtcccatcactgagagagcagggctggggcagcacaaaggactggatagcatttgccatgatgccatgtgcacagccagtgcaagtccttcattgtagctgtggtcagaggtcatgagacactgccttcagcagccctgggagtccacctggtgtgtgcttagagctgtgcatctgcagatttcagaaggacttacgtttggtgaggtgctttgaagtaacacttcacaaataccaagaagcaagaaatacacaaataagcaggtaatggttctttggtgtttacattagctagtgggcaacggttctttggtgttcacattagctatagtcccagaactcagtccatgaggtggaatcacaaaaatggaattcatttctggctgtcagtacacaaactgatttaagatatcaccttgaattttaagctgacaaacagtgatctaaactgaatttcactgattgccccacctgaaagtcagacctgatagataatgccctcccttaactcaaggccagcagcagatgtgttagaggggacccttgtgcctcgcagccctcatctcctaatggctgtggggtcactgtgtcgagttgtaatgcctaatgagctcctctaaaaacatcctgaaacttgtgtaaaaaaacagcagactcccagtggaactcgccttcagatgcagcccagaataagagttctagaatgtgtgtgccatccttttgtctcaatctgcatgattgcaagtctcttcaacatgattgggtgcgtggagtgtctcggtcatgtgtcttcccctctgagcatgccttttgattcgcacctgtgtcacaattgtgccagcctgtgagatgtgtctgcctgtcaccagtatcggcacatttagttttccctttacgtgagttttggtaaaatagtgacaaaatgtaatgcagtgctcagtcacagaaaaatgtcaggcctacagaaatggagcatttggctggtgggtagcgtgatgaccataggctttatttggctggtgtggtaaacaagcagcagcttgtgcaggtgagaataaatggccatattgcatttcattttaaggactcccttaaaatgaaaatcttcgtgtgggacatgaacacaggctttcacgaaattgatcatctacactatatgtatgactgttgaaaggctgttgttcctcagaaattcttaaaatgttatgtaatgtacatgagtcccttcaggaagtcatcagctttgttcagtttcctcagattagatagtaaaactgagattatgaactataaagatgtgtgtaatttatctgtcagtgaacttgactttaataaaagctttttgaaaaagaactctgggtggggtgcattggctcacacacatagtcccaactactgtggaggtcagggcaggaggatcactggagcccaagagttcaagatcagcctgggcaggatagcgagaccctgtctatagaaaatattaaaaatcagctaggcatggtggcttgcccttgcattccctgccacttgggaggctgaggtgggaggttcgcttgagcccaggagctcaaggctgcaatgggctgtgatcgaaccactgaattccaacctgggtgacagagtgaggccctgtctcaaaaagagaactctcgatgtcactggctttccatgtaagcagagcacatcatgtgagccccattcgtggatgtcagtcagcagaacagaatcttggacctggagcttgtttgtcctgtgctagaggttggaggtgtctctgtctttctgttggttcctgtcagttcaggtcacttagagattctgttacatacaccagctctgacaggttgggggagatgatcaaccttccgcctgcgcctgttcccttccctgactcatgccaaagtatccctgagatctgcaagggaccgaggacagtactggctggtggtctgggtacaggccacagaggcatctggaccccatgtgcatctggaccagtttggttggatccattcatggacacaaaacggatgtgaactcacagagctacattttctccctgcccctgttcaggcacagtgaggtgtcggggaatgtagctgccagagttgactgtcccgttctttggtgtaatgcctgaaggccacctttaccattggtctgtggtcctcactgaagaaagaaacattcttcctaaaagactttttttcctcagagttggagcccacagcgtggtcaggaaagagaagtagccactggtggctcctggcatcctcctgctgggcagccccttctcaaagtgtgaggggtccccttgtgtacaagcaggaaggctctgagaaagtcaggtttgctcctaccacaggataattccgatgaacctgaaaagcgggttttggcttgtgtgcagggactctggtggaagaaagggtgacagcacctggcctgggcatgacacaagttaggacccgtaccaagaggccctggaattgagggtgggggttgctgtggactctttctccctcttaggaaactctattgggtctccatctgtcacagaagcagtaaatgatgtaggggctgccaggtatagggtcctgtggggatgctggaacatgccgaggcaggacgtgccagccaccctctgcccatatgtgcagcagggccacagatgtgcttgtcggtaggagagaccaagctgtctgtgtgccgatgtcttgacacctgagacttcaggttcacccatcctggttctgccattccattgcagggtggcttccctcctttggggactcttaacgctttggtctgttaaaaaaaaaaaaaaaaaaaaatccgggcgtggtggctcactcctgtaatcccagcactttgggaggccgaggtgggctgatcatctgaggtcaggggttcgaggccagccctgaccaacatggtgaaaccccgtctctact

SEQ ID NO: 15786 - protein, 127 aa, Homo sapiens
MSLAFHVSRAHHVSPIRGCQSAEQNLGPGACLSCARGWRCLCLSVGSCQFRSLRDSVTYTSSDRLGEMINLPPAPVPFPDSCQSIPEICKGPRTVLAGGLGTGHRGIWTPCASGPVWLDPFMDTKRM

SEQ ID NO: 15787 - DNA, 4805 bp, Homo sapiens
  CDS (271)..(1680)
aacgggaaaatctccttcttccacaatgcagttgtccgtgaaaatctgcgacaatttgtagaaagtcttcttccagggaacttggtggagaaagttacaaataaaaattacgtcagattcctctctggctggcagcaagagaataagcctcatgtccttctgtttgaccaaacgcccattgtgccactgttatacaagttgactgcctttgcatacaaagattatttatcatttggatatgtatatgtgggtttgagagggacggaagagatgataaggcggtacaacatcaatatctacgcccctaccctcttggtctttaaagaacatacaaacaggcctgccgatgttatccaggcccgaggtatgaagaagcaaatcattgacgacttcatcacccgaaacaaatatctattggcagccaggctcaccagccagaagttgttccatgaactctgccctgtgaaacggtcgcatcgacagaggaagtactgtgtggttttattgactgctgagactaccaagttgagcaaaccctttgaggctttcctgtcctttgccctggcaaacactcaagacacagtgagatttgtgcatgtctacagcaatcggcagcaggagtttgccgacaccttactaccagacagtgaggcgtttcaagggaaatcagcggtgtctattttagaaaggcgcaacacagcaggaagggtggtgtataaaaccctggaagacccttggattgggagtgagagtgacaaatttatcctcttgggctatctcgaccagctgcgtaaagatccagctcttctgtcctctgaagcagtgcttcctgacctgaccgatgaacttgcccctgtttttctccttcgatggttctactctgcttctgactacatctcagactgctgggatagcatttttcacaacaactggagggaaatgatgcccctgctgtccctgatcttctctgccctcttcatcctcttcggcactgtcatcgttcaggctttcagcgactctaatgatgagcgagagtcaagccctccagaaaaggaggaagcccaagagaagactgggaaaactgagccaagcttcaccaaagaaaacagcagcaagattcctaaaaaaggctttgtggaggtaactgaactcacagatgtaacatacaccagtaacttggtacgtctgaggccaggccacatgaatgtggtcctcatcctgtcgaattctaccaagaccagcctactacagaaatttgctttggaggtctacacatttactgggagcagctgcctacacttctccttcctgagtctagataaacacagagaatggctagaatacttactagaatttgctcaagatgcagctccaatcccaaaccaatatgataagcatttcatggagcgtgactacactggttatgtactggctctgaatggccacaagaaatacttctgcctcttcaagccccaaaagacagtcgaagaggaggaagccatagggtcgtgcagtgatgttgactcttccctctacctgggtgaatctcgagggaaaccttcctgtggccttggatccaggcccatcaaaggaaagttgagcaagctctctttatggatggaacgcctgctggagggctccttacagaggttttatatcccatcatggcctgaactagactgagaggattttccaaagagatttgaactcttcagactttttaacatgcccctgtgaacaggtattttcaggactcaaactaccacaatgaacagagtatagattttagattgctcttctagaaccatggctagaagaatctttcctttgtcctgttctaacctaggaatgaaaaacaccaccagtttgaatcgcctagatgaaaatcttttcctctgggtgttatttttccccactgaatgccacaccattgaaaatagactgctcatcccctcttcctttcttgtccctgtcccatgctcaccccaccctcctgtcctgtgtcttggagaagcacagggctccaccctgcaagcggcatctggcggaccctcatgagcctgtcgtgcaggccaggtcattggccccttccccaatcccggccctgctgtgctgctgccatggcgcatgctcctaactctgaacaacccacggcagcttctagccccgcatctggaaaaaggcccctttccaagcaatctcacgtttactggttgttctgggagtaagtggctaaatgtatattttgggggtatcccccaacaacagtttgttggccacaggttgaaaaggaaaggaataaacgggagttctgcatgtgagttctcaagaaaaggaaagggaggctgagcagtggctgaagcgatgcagccttgagacacgctgtgagcatcccatccgccgccccagcgctgctggtagccaggggaggggtctgcacagcgagaagtactgtgatgactttgagccgttgacatgtatgtcttcagatgcctttctgcctctgtcgattttagggtatggatattaggagccataacttgtaatcttgttctctgaacgtagagataagctgctataaagccagtagatgttaaactgaagagaagttattcccacctgctatgagtcaggcttaaggaatctcttcaatagtgtctctttagtaaaataccaaacatgtctttgtatcaaggaacttaaaatttctcaacaattgtattttgaacactgttaccctaaaagtgctgtctcttcaagtcatcttttgcaggaagtgagccaagatttgttctagactcccattttgcaaaaggcttactttccacttctgggctgtattttgatgtctcatcttcattgttttcactcttaacttagagctgcttcaccagtattggggtcagactggccatcagcacctgagcgtgctgagctccaggtatagtggaccccagggtgcctcataccagccagttagagagcataccttttatttttcagggcagaatgaccagtggttctgagtttgagtttggatagcttcaaagagtggtccgttcaaatgtcaaagcaaggtgcctttggtggctttgtgaagggtgaaaatcagtgatgggacatttactaagtatttctttttttttttttttttttttagttgttgagacagagtttcactcttgttgcccaggctggagtgaaatggtgcgatctcggttcaccgcaacctccacatcccaggttcaagtgattctcctgcctcagcctcctgagtagctaggattacaggcatgtgccaccatgtaattagcccggctaattttgtatttttagtagagacgggatttctccatgttgatcaggctggtcatgaactcctgacctcaggtgatctgcctgcctcagcctcccaaagtgctgctgggattacaggcgtgagccaccactcccggctaagttagtatttctttaatcttaatgctttaaactaagccacttggatcctgaataatttaaatcttgagctacattggtaagtaataaattatttaaggccaggaattcctgtagttttcatggagtctgtagctttattaaaaaataaatcactgccaggcttcattcttccacatgatcctctaaaaatggacacttcctctgaatgctgtatctcatggcacctggtccaactagaaatggtcaaggaattcatttggctccttgatacatcagtcctcaatattactttctaggtattttatggccagattgcttatatgagtggtcttttggtttggtagtaggtttttatttttaatttctgtactaatgaaattcctgactttaatttctgaaaaccaaaaactctccaagtgtatttatttatattttttttaatagagacgaggtcttgctatgttgcccaggctggtcccaaactcctggcctcaagcagtccttccaccttggcctcccaaagtgctgggattatcaatatgagccaccatgccagatttgttcatttttaaatatttttatctcttcaagtcatcttttgatcttttaaaaagcaccttcaaacagctgcaccttccatttgcactaggaaatgaaggtagtgatgggatttgcaatgttcctggcagatgtttcagcccaaaagctcttctacagaccggtttagagctggtgccctatgagaatattagggagcttttattttaaattgaactttacccttgtccatgcaaggcattcctcctgaatgcatccatgaatttgtttacttttgcgtcaaacatatgagccattgtcatgctcagcctgtgccaccattgctctgtctgatgtatgtaatcatacaagacctgattttggttctaacacagtggtctttgactatcaacattgatgtttttagagatgggttcttctggttgatacagactatgcattgcgtttagcagatggggtaaaactggcctaaaacaagtctttgcagaatacatgccaatttccaaaaaaaaaaaaaaaaaatttgttgctcaggtgttgcacaatttttatctaacactgaggctatcagctccaactaaacaacatttcagtgggtgaggctgccctaacttccattagggccatggtctcactgccatcacttattagccatgagaatttggttgtagttttcaggtaggttggtttcttcctcatttgcagctagttgatacttgttcctttttatttattaacatcccaatcaatttgcagctgccatcattacataaatatttttctgttat

SEQ ID NO: 15788 - protein, 470 aa, Homo sapiens [sequence omitted]

SEQ ID NO: 15789 - DNA, 3677 bp, Homo sapiens
  CDS (996)..(3437)
attacaggcggatcccatggggccggaggcctgcaccaccgcgagatgtggccattttacaagaaagggctaataagttggtgaaatacctgttggttaaggaccagacaaagatccccatcaaacgctcagacatgctgagggatgtcatccgagaatatgatgaatatttcccagaaatcattgaacgagcaagctacactctggagaagatgtttcgagtcaatctgaaagaaattgataagctaagtagcttgtatattctcatcagcactcaggaatcctctgcaggcatactgggaacgaccaaggacacacccaagctgggtctcctcatggtgattctgagtgtcatttttatgaatggcaacaaggccggtgaggctgtcatctgggaggtgctgcgcaagttggggctgcgccctgggtatgactgggctctctcagcgcttgctgtccgtgttgtcctttggcaagagaggatggtcctaggattgcatcagtctggtggtctggtggagcgggtggggtgctggactgggtagagggcccagggttctgacctgggtggatgacgggcaaatggtcctgaactctctgctgtctctctccttaatgtcctctgtctgttctaagctgagatgttagatagaccttcagggatccctgacaaagaggcatctggtcttaactgcttgcttctagtggccatgtgctcattactttcttcacttcattgagactgccccatgtgctagagaggtttcttccatgttgggaaatgcctctgccctcatctgggcagttctgatctgtgttcatgggttatttttcccattgtcagggtgaggcattcactctttggggaagtgaggaagctcatcacagacgagtttgtgaagcagaagtacctggagtacaagagggtccctaacagcagaccacctgaatatgagttcctctggggcttgcgctcctaccacgagactagcaagatgaaagtcctcaagtttgcatgcagggtgcagaagaaagaccccaaggactgggctgtgcagtaccgcgaggcagtggagatggaagtccaagctgcagctgtggctgtggctgaggctgaagccagggctgaggcaagagcccaaatggggattggagaggaagctgtggctgggccctggaattgggatgacatggatatcgactgcctaacaagggaagagttaggcgatgatgctcaggcctggagcagattttcatttgaaattgaggccagagcccaagaaaatgcagatgccagcaccaacgtcaacttcagcagaggagctagtaccagggctggcttcagcgatggtgctagtattagcttcaatggtgcacccagctccagtggtggcttcagtggtggacctggcattacctttggtgttgcacccagcaccagtgccagcttcagcaatacagccagcattagctttggtggtacactgagcactagctccagcttcagcagcgcagccagcattagctttggttgtgcacacagcaccagcactagtttcagcagtgaagccagcattagctttggtggcatgccttgtaccagtgccagctttagtggtggagtcagctctagttttagtggcccactcagcaccagtgccactttcagtggtggagccagctctggctttggaggcacactcagcaccacggctggctttagtggtgtactcagcactagcaccagctttggcagtgcacccacaacgagcacagtcttcagtagtgcgcttagcaccagcactggctttggaggcatactcagcaccagtgtctgttttggtggctctcccagctccagtggtagctttggtggtacactcagtaccagtatctgcttcggtggctctccctgcaccagcactggctttggaggcacacttagcaccagtgtctcctttggtggctcttccagcaccagtgccaattttggtggtacactaagtaccagcatctgctttgatggctctcccagcactggtgctggctttggtggtgctctcaacaccagtgccagctttggcagtgtgctcaacaccagtactggttttggtggtgctatgagcaccagtgctgactttggcggtacactaagcaccagtgtctgctttggtggctctcctggcaccagtgtcagctttggcagtgcactcaacaccaatgctggttatggtagtgctgtcagcaccaacactgactttggtggtacactaagcaccagcgtctgttttggtggctctcccagcaccagtgctggctttggtggtgcactcaacaccaatgccagctttggctgtgccgtcagcaccagtgccagcttcagtggtgctgtcagcaccagtgcttgcttcagtggtgcaccaatcaccaaccctggctttggcggtgcatttagcaccagtgctggcttcggtggggcacttagtaccgttgctgacttcggtggtactcccagcaacagcattggctttggtgctgctcccagcaccagtgtcggctttggtggtgctcatggcaccagcctctgttttggtggagctcccagcaccagcctctgctttggcagtgcatctaatactaacctatgctttggtggccctcctagcaccagtgcctgctttagtggtgctaccagccctagtttttgtgatggacccagcaccagtaccggtttcagctttggcaatgggttaagcaccaatgctggatttggtggtggactgaacaccagtgctggctttggtggtggcctaggcaccagtgctggcttcagtggtggcctaagcacaagttctggctttgatggtgggctaggtaccagcgctggcttcggtggaggaccaggcaccagcactggttttggtggtggactgggcaccagtgctggcttcagtggcggactgggcaccagtgctggctttggtggtggactggtcactagtgatggctttggtggtggactgggcaccaatgctagtttcggcagcacacttggcaccagtgctggctttagtggtggcctcagcaccagcgatggctttggcagtaggcctaatgccagcttcgacagaggactgagtaccatcattggctttggcagtggttccaacaccagcactggctttactggcgaacccagcaccagcacgggcttcagtagtggacccagttctattgttggcttcagcggtggaccaagcactggtgttggcttctgcagtggaccaagcaccagtggcttcagcggtggaccgagcacaggagctggcttcggcggtggaccaaacactggtgctggctttggtggtggaccgagcaccagtgctggctttggcagtggagccgccagtcttggtgcctgtggcttctcgtatggctagtgaggtttcagatttattccccatgtttacagataccgctaataaattgcagtagtccttcccatggagccaaagtacatccttggaatctttgtccacacagcagtcaaggcagttatggccaatcagctgagggtgtcatgtgatggaaaaatctgtttgctgttcctgctttattgtttgctttctgtgtgctgtcatattttggtatcagagttacattaaatttgcaaaatg

SEQ ID NO: 15790 - protein, 814 aa, Homo sapiens
MKVLKFACRVQKKDPKDWAVQYREAVEMEVQAAAVAVAEAEARAEARAQMGIGEEAVAGPWNWDDMDIDCLTREELGDDAQAWSRFSFEIEARAQENADASTNVNFSRGASTRAGFSDGASISFNGAPSSSGGFSGGPGITFGVAPSTSASFSNTASISFGGTLSTSSSFSSAASISFGCAHSTSTSFSSEASISFGGMPCTSASFSGGVSSSFSGPLSTSATFSGGASSGFGGTLSTTAGFSGVLSTSTSFGSAPTTSTVFSSALSTSTGFGGILSTSVCFGGSPSSSGSFGGTLSTSICFGGSPCTSTGFGGTLSTSVSFGGSSSTSANFGGTLSTSICFDGSPSTGAGFGGALNTSASFGSVLNTSTGFGGAMSTSADFGGTLSTSVCFGGSPGTSVSFGSALNTNAGYGSAVSTNTDFGGTLSTSVCFGGSPSTSAGFGGALNTNASFGCAVSTSASFSGAVSTSACFSGAPITNPGFGGAFSTSAGFGGALSTVADFGGTPSNSIGFGAAPSTSVGFGGAHGTSLCFGGAPSTSLCFGSASNTNLCFGGPPSTSACFSGATSPSFCDGPSTSTGFSFGNGLSTNAGFGGGLNTSAGFGGGLGTSAGFSGGLSTSSGFDGGLGTSAGFGGGPGTSTGFGGGLGTSAGFSGGLGTSAGFGGGLVTSDGFGGGLGTNASFGSTLGTSAGFSGGLSTSDGFGSRPNASFDRGLSTIIGFGSGSNTSTGFTGEPSTSTGFSSGPSSIVGFSGGPSTGVGFCSGPSTSGFSGGPSTGAGFGGGPNTGAGFGGGPSTSAGFGSGAASLGACGFSYG

SEQ ID NO: 15791 - DNA, 4348 bp, Homo sapiens
  CDS (284)..(4222)
ccttctgaagaatgagcagtttttatcgcatctcctcttgttcctacacttggacagcggtgtccctcagggtgtcacacaacaggtcacccacaaggtggcacagcacctgacaggagccagccatggggacaacgtgaagcttctcaacagcatgatccaggcacacatatctgtaagcactcagcccaatgaagtgggccccgttgctgtgttggagttctgggttcaggctctcataagccagcatctctgataccgagaacaacctatcctcttcctcatggaccacttgtgtaaagcagcttttcagctgatgcaggaagactgcatacagaaattactctaccaacaacataagaatgccttgggttaccaccgtgaccggagtctgctctcatctttggtaagctggattgtggcaggcaacatcactccttcctttgtggagggcttggccacgcccactcaggtctggtttgcctggacagtgctcaacatggaatccatctttgaagaggactcccagctccggagagttattgaaggggaattggtgataaactctgctttcacccctgaccaagctctgaagaaagcccagacccagctgaagctccccatcgtgccatccctccagaggctgctgatttatcgctgggcccaccaggctctggtcacaccttctgatcaccccctcctgccactcatttggcagaagttcttccttctgtatcttcaccgtccgggaccacagtatgggttacccatagatggttgtattggaagaaggttttttcaaagtcctgctcatatcaatttgttgaaagaaatgaagagacgtttgaccgaggtggctgacttccaccatgctgcaagcaaggtcctccgtgttccagcagagggcagtgaagggctgccagagagccactctggcacccctggttacctgacttcaccagaactgcacaaggagctggtgaggctcttcaatgtatatatattatggctagaagatgagaattttcaaaaaggagatacctatatcccttctctaccaaagcattatgatattcacaggctagcaaaagtgatgcagaatcagcaggatctgtggatggagtatttgaacatggagcgcatctatcatgagtttcaggagactgttggtctgtggacacaggccaagcttgagtcccattccacaccctgcagtttgtccgtgcagctggacttcactgatcctttgctggctaaagaaagggttttaagtaacttgcggaagcatgaggctccccagcctccccttgctctgcacccgacgaagcctcctgtgccagttatttcctctgctgtgctattgagtcagaaggacgccacccagctggtgtgcacagacctgaatctgttgcaacagcaggccagaaccgcagctcttcgggaatctcagcaggttgctctggatggtgagctgttagacacaatgccaaagcagtatgtgaatcgtgaagaacagaccacactacatttggagtgcagaggcagcagcggtaagaaatgccaaggagccgcagttgtcacggttcagtttgaaggcatgcataagaatgaagccataagccaacagcttcatgttttacggaaggaagtgaagcagttgcaagcagaagctgctaaaccaccatcacttaatattgtggaagctgctgtacatgcagaaaacttgatcacggccttagtgaatgcctacaagttgcagcctacacctgggattcagaaagttggcattagccttttctttactattgtggattacgtcagcgatgagacgcagcgtcatcccccaacaaggcagttctttacttcatgtattgagatcttgggacaggtatttatcagtggcattaaaacagagtgcagaaaagtacttgaaaccattctgaagaacagcaggctctgctccctgctgtctcctttcttcactcccaatgctgcacctgcagagttcatacagctgtatgagcaagtggtgaagtttctaagtgaggacaacagtgatatgattttcatgctgctaaccaagttcgatcttaaacaatggttaagcgccactaaacctcctctgtctgatcgtaccaggcttctggagtccattcacttggcacttactgcctggggccttgaaccagatgaggatattttgatgccatttaatcttttctgtaagcactggacttatcttcttctctaccagtttcctgaccagtacagtgacattctcaggctgcttatgcaaagctccgcggagcagcttctgagccccgagtgttggaaggccactctgagagccctgggctgctgcgcccccagctgccagcagggggcagcgtccaccgagggcgccgtgcttcccagctcttctgatgctctcttgtcagacaagcaggtaatggagactatacagtggctttcagactttttttataagcttcggttatccaagatggactttaaaagctttggtttattctcaaaatggagtccttatatggctgatgtgaagacattcttgggctaccttgtgaaaaggctgattgacttagaaatgacctgtttggcccaagacccaactgccagcaggaaaacagtgctgaaatccctacattcagtaatcattcagctctttaagccatggatcctggttttagaggacaacgaaagcagccaacagcggcattacccctggctagagagtgatactgtggtggcctcaagcattgtgcagctgttcactgactgtattgactcactgcatgagagttttaaagataagctgttgccaggtgatgcaggagccctttggttgcacctgatgcattattgtgaagcatgtacagcacccaaaatgccagagttcattctgtacgctttccatagcacgtaccggaaactgccatggaaggacctgcaccctgaccagatgctcatggaggccttcttcaaagtggaacgaggaagccccaagagctgtttcttatttttggggtctgtactctgtgaagtcaactgggttagtgtgctctctgatgcctggaattccagtccccacccagaaacccgcagcatgattgtctgcctccttttcatgatgattttattagcaaaggaagttcaactggtagaccaaacagattcacctttacttagtctccttggacagacaagctcactttcatggcatcttgtggatattgtgtcgtaccagagtgtgctaagttatttcagcagccattacccgccgtccatcatcctggcaaaagaatcttatgctgaattaatcatgaagctcctaaaagtgtctgcgggcctttctattcctactgacagccagaagcatcttgatgcagttccaaaatgccaagcttttactcatcagatggttcaattcctcagcaccctggaacaaaatggaaaaatcaccttagcagtcctagaacaggagatgtctaagctcttagacgatatcattgtctttaacccgcccgacatggacagccagacccgccacatggccctcagcagcctctttatggaagtcctgatgatgatgaacaacgcgactattccaacagcagagttccttcggggcagtatccggacctcgattggccaaaaaatgcatgggctggtggtgctgccccttttaacagcagcctgccagagcctggcgtccgtccgccacatggctgagactacagaagcctgcatcactgcctacttcaaagaaagccctctcaatcagaattcaggatggggacccattctggtatcccttcaggttcccgagctcaccatggaagagttcctgcaggagtgcctcaccttgggcagttacttgactctttacgtctacttgcttcagtgtttaaacagcgaacagactttaaggaatgaaatgaaagtgctgctcatcttaagcaagtggctggaacaggtgtacccaagctccgtggaggaagaggcaaagctgtttttgtggtggcaccaagtccttcagctctccctcattcagacagagcagaatgactccgtcctgacagaatctgtcattcgaattctgctcttggttcagagcaggcagaacctcgtggctgaggagagactcagctctgggatcctgggggcaattgggtttggccggaagtcgcctttgtctaacaggtaaggaagcgcctttctaacactgttgttctaaataggcctcagacatctgtacctacttacaggttgtgatatacttcagtaggtttttcgacttaggatctaggttctccagaaagattaatgg

SEQ ID NO: 15792 - protein, 1313 aa, Homo sapiens
MDHLCKAAFQLMQEDCIQKLLYQQHKNALGYHRDRSLLSSLVSWIVAGNITPSFVEGLATPTQVWFAWTVLNMESIFEEDSQLRRVIEGELVINSAFTPDQALKKAQTQLKLPIVPSLQRLLIYRWAHQALVTPSDHPLLPLIWQKFFLLYLHRPGPQYGLPIDGCIGRRFFQSPAHINLLKEMKRRLTEVADFHHAASKVLRVPAEGSEGLPESHSGTPGYLTSPELHKELVRLFNVYILWLEDENFQKGDTYIPSLPKHYDIHRLAKVMQNQQDLWMEYLNMERIYHEFQETVGLWTQAKLESHSTPCSLSVQLDFTDPLLAKERVLSNLRKHEAPQPPLALHPTKPPVPVISSAVLLSQKDATQLVCTDLNLLQQQARTAALRESQQVALDGELLDTMPKQYVNREEQTTLHLECRGSSGKKCQGAAVVTVQFEGMHKNEAISQQLHVLRKEVKQLQAEAAKPPSLNIVEAAVHAENLITALVNAYKLQPTPGIQKVGISLFFTIVDYVSDETQRHPPTRQFFTSCIEILGQVFISGIKTECRKVLETILKNSRLCSLLSPFFTPNAAPAEFIQLYEQVVKFLSEDNSDMIFMLLTKFDLKQWLSATKPPLSDRTRLLESIHLALTAWGLEPDEDILMPFNLFCKHWTYLLLYQFPDQYSDILRLLMQSSAEQLLSPECWKATLRALGCCAPSCQQGAASTEGAVLPSSSDALLSDKQVMETIQWLSDFFYKLRLSKMDFKSFGLFSKWSPYMADVKTFLGYLVKRLIDLEMTCLAQDPTASRKTVLKSLHSVIIQLFKPWILVLEDNESSQQRHYPWLESDTVVASSIVQLFTDCIDSLHESFKDKLLPGDAGALWLHLMHYCEACTAPKMPEFILYAFHSTYRKLPWKDLHPDQMLMEAFFKVERGSPKSCFLFLGSVLCEVNWVSVLSDAWNSSPHPETRSMIVCLLFMMILLAKEVQLVDQTDSPLLSLLGQTSSLSWHLVDIVSYQSVLSYFSSHYPPSIILAKESYAELIMKLLKVSAGLSIPTDSQKHLDAVPKCQAFTHQMVQFLSTLEQNGKITLAVLEQEMSKLLDDIIVFNPPDMDSQTRHMALSSLFMEVLMMMNNATIPTAEFLRGSIRTSIGQKMHGLVVLPLLTAACQSLASVRHMAETTEACITAYFKESPLNQNSGWGPILVSLQVPELTMEEFLQECLTLGSYLTLYVYLLQCLNSEQTLRNEMKVLLILSKWLEQVYPSSVEEEAKLFLWWHQVLQLSLIQTEQNDSVLTESVIRILLLVQSRQNLVAEERLSSGILGAIGFGRKSPLSNR

SEQ ID NO: 15793 - DNA, 4183 bp, Homo sapiens
  CDS (1517)..(1888)
tccctgatatgatgtctgcaggtattcatgctcctgtatagttccctcccacactgaatagggttgccctgttgaaacgttggaatattctggaaatgaccatgtgtgacttccaaggcaaggtcataataaaaaacattgcagctcctaccttgtctctcagatcactagttcaggggaagccagctgccatgtcataaggatgctcaagcagtcctacagaaagttccatgtgaccaggagcagaggcctcctgccggcaaccagcactagtggcaggcatgtgagtgcgccatcttgcaagcagctcttccagccccagttgagccttcagatgactgcagccccagctgacatcttaactacaacctcatgacagaccttgagcagaccctctggctaagcttctcccaaatttatgactcccagaaacagtgcaagatgatacatatttattgttgttttaagctgctaagttttgaggaaatttgttacacagtgagaggtactcaatacactgagtcactcccctaacccatagcacaggctgagtccccaaacctgcactagaggcaacaaagagggagaagccctttccatggagctaactgtgcatctggggagaaagagtcatcctaagtccatctggggaccatgagggttggtgtgggatctggtgggggtggtctagggcctagagcaagtagccctggtataggacaccaggaaaacaactcagggcaggatacaggtagtccttgggcagggtcctagagctcctggggggcttggaaacactagggtgattaaaagagaaagcactgcaggtcaaggaagcaacacaatagtctgtgagccctctcagtaatataaccacgacacaactctattactgatactactaaccataatgacaatcagaagagctacctgccctctgaagcatgatgaacaagtacttctgcattgtctcttgcactcttatgtaaaacccagtgtacacgtgcttttattatatccattttacagatgagaaaactgagactctgggatgttaagaaagtggcttgccaaaacccacccagctaataagtgcagggccaggatttgaatctgaatagtctgactccacaggctctatacaagtggcctagaaagcagtgtgggtcctccatggggcctcctgttgcgcaccacagaagccctggctctgaggcccaccttatcccaaccccggagttagttgagtggctggagccatggctgcccagaggcctaaggctgcctcagcacccttctggcctgctcccttcctccttggctccctggctcctgcacctgctggatattctccttttcctaactctgggggcctctcaggctcactgtaggtgctgcaaggcaaggccctttctgtatgcccctgggcctgtccttctgcctgtgacccttaacctgaagcacaaaaggtctgcgtgggaatggaagcagggcatcagctgagggagctgtgtatatggtcagcccaacctggccttgtagtgaggagtttcaaagcttgaagcctccttctttgggagattctgcaaaggtgccaaccccttgcaaaggagccctggcatcagaaccctccccaggggtgtcccagggagtgggggtgccctgggccctgcagcccatactccttgagggcagcaggctatggggcaccctgggcattgctttgggaggcctgcaaaggatttctgtgctgggggcaggagataccccatggcgcggcagagcatccacaaagtccccacccatgacagggtctcctaggttgagagtgggctggggagtgggttgggcagccagggtgccaatgcaaagaggccccaccgaggtatgagacacaagcatcccgggcatgtcctgctgtactccctgtgagacctggggaacagcgccatgcctccctgtgcataaggtggcaggaagaagaatcgaccgtctgaccctagtgattggggaggagggcagggccagcacctcaccccacacaagcacaggaagaggggcggccccaccagccccggctgagctgaccccccgccctgtcagagggaggcactggtcttaaagccacctgcttcctccaccccaccttccatttcccagagaggccagaggcagaggggtgcagaagagagagcagagcccctttgcctgggcacatctgggctcactacatgggaaagggccccaggacaagggaagtcgagaagagacaggccaggcccaaggagggagaggacctgagatcgaagataggagagaggaagacaagaaggagaagcagaaatgagaaggttggagaaatccgaagaggcagctagggagagtgggaggtaggcagagggcaggcaggagaaaagaaatgattctttttgaacaggcccgcggctcctccagcacactgactcaaagatgtgggcagctgagcctgcctgctctgtgccgtggctttctcagttagtccaggaccactgggaggggagtggtggacacccagctagcgcctcccccatcaggagcacctacagtctgtgatgactgcccccagcaccctaagtcaatgtttaaccgtggcctgagcccaggaatgttctatctgggacatgcaattacagggggttgggttacagtcccaccactggcaagggcttggtggcaggagataagaaggtggcaccagaaagggttgtgtgtgtgctcaaccgtgggctcccagcacacccccggggccggctcacaaggctccattgttggggtctggctcccagcccatcgccagccagataggagctgctgttttgacaaggcgagaaaagcacaccccaagttcgtacagatcccgtaccccattcttatcaggtggaaggtagggagctagcaaagctaatgttgatttagagaaaaaaaaaaggaagaaatattagcaatcatgggcaaagtcagttccggcagctgaaggcagggttgggagtgtcaagggctggggaagaggccccacggttctggtgctatgctgggtactatggtgcgggagtggaaaccaggcatagccattctgcttcctaggacttgaagtctagttaggacaagaatagttcatttattcacctaaatatgcaggctctgtcgtaggtgctggggggattcaagttgctgaacttctagtggaatgtgcttaaaaatagagagctgtgaacatctgcacttagctggggggacagggcgagtgagacagagggaaggcggggatcactcttgggtagacaggcaaggccctgaaggctgaaggagaaatgcagattattaccaggaggctgggtgtgaatcccagctccttctccaccagcggattctgagagaggaattttgtctgactgagccgcaatctataaaatgaggaagacaggagaaactacttaaggtggttaaatagaggattggaggagagaagtcatgcaggtactgagcacaggtggcccctctggaaatcagtatcacaaatgggtaaatcacaggcagctggtcatccaagctgggagctaaagtgtggtaaacgtgggctagactccaagctggtgctgtaggctaggattgggctagttagcacagagcagggacggcagctctgggagagaaaggaggccagcctgctgtgagggtagggtcacgtcccctctttccccagcatgaggggccggcacaccacagacatagagggcagctgccatcaccactcaaaaactctgcggcaccagtttaaagtgtgctgtaaaatacagatttggaagaaatgagctgagtagatcactttaaggatgaaaaatccctataaaatgtcagtttgggccggacaaggtggctcacacctataatcccagcactttgggaggccgaggtgagtggatcacctgaggtcaggaattcaagaccagcctggccaacatggcgaaaccctatctctcctaaaaatacaaaaattagccgggcatggtggcaggtgcctgtaatcccaactactcaggaggctgcgacaggaaaattgcttgaactcaggaggcggaagtttctgtaaaccaagattgcactactgcactccagcctgggtgacagagtgagactcagtctc

SEQ ID NO: 15794 - protein, 124 aa, Homo sapiens
MVSPTWPCSEEFQSLKPPSLGDSAKVPTPCKGALASEPSPGVSQGVGVPWALQPILLEGSRLWGTLGIALGGLQRISVLGAGDTPWRGRASTKSPPMTGSPRLRVGWGVGWAARVPMQRGPTEV

SEQ ID NO: 15795 - DNA, 4159 bp, Homo sapiens
  CDS (2412)..(2987)
ttccagacatgtccttccaacccagagttcccctcctttttcagctacgcttcttgttccctgtctcatctccttttttcccatcactccccaagtccctgtggtctggctgacactgttctggtcacattctactggctaaatccaacagagttttttcagtctttattttgtttgacatgtaacctagctggctcttcatcccttcccaaaacttcccttttgacttctgtgtcctttaatctttgtgttttcctctgatctctctgaccgttcctttttagcctttttagctggttcctcttccctgcctattcatcagtgttgttccctgacgtctcattcttgatgctctcctcactctgctaagatttatcaggtctaacagctttagctattacctataaagcttctgcatctttttcatcttcagcactatcatctcctaaagtccagacatacagtaaactagaagcagttctaaaatttccactttatctttgcccccttgcctgacgtcatttgtccattctagatctgccccccctttcctcattcagaggcctgtgatgtctggagttcctccttttcctcacatctagtcactcaccagggcttgtcagtcccactttcaaaatacctcttggttccatctttccggccctggctctggccctcaccatgttttgcctcagttgctgcaatggtttcttaacctgtcttctcactgctagccactccccatcccacacttacccccacccccacatcactccatgttttacactgaagccagagtgatagctgtaaagcatgggtctgatcatgtctcttacctggaccgaaatccttcagctgccccctgttgctctcagaataaatggccaacccttagcctgacacagaagcctttcgtgatctgtctcctgcctgcctctccaaccctgcctcttgccattcctctgattgcatcctctgcccagccagtgagtggaggggtcctggtcacagcactgtcaggcatccctgtctctgtttgggttgcaccctcttccaggactgccttcccaccattcgttgactgtttcttcattgctcagtgtgtcagtccgtttgcattgctataaaggaattcctgagactgggtaatttataaagaaaataggtttattttggcttacggttctgcaggctgtacgggaagcatggtgccaatatctgcttctggtgagggcttcaggaagcttagaatcatggtggaaggcaaaggggagccagcgtgttacatggcaagagagggagagagagaaagaggaggagatagcaggctccttttaaacagccagttctcatgtgaactaacagcaagaactcactcattaccatggggagggcaccaaggccattcatgaggaatttgcccccataactcaatcacatcccgttagaccccacctccagcattggaaatcacatttcaacatgagatttggaggggacaaatatccaaactacatccctcagtaactcaactcaggcaccagcctccacacagcctttcctgccaccacaggccttaaagtacccatcctagctcttcctttgcccctataagagtaaaaatacaatatttaactctttttcctattttttgtgtttaacagacatttatggaggagatgactcgcaaacagcctgacgcggaccgggtcaccaagacatacaaaaggaaaaacatagagcctactcacgcgcctttcatagagaaatcccgcagcggaggcagtatgtttccagccccctgtgttaggatgcttcattcctgctaattgaggatgagtactttccgaatgcctatcaaaaaaattatattccattttcaaaaaccgtgttggttttgaaccaaaatctctcatttttgaaactcacttttcttacattgacagacagtagctgtactccatattctttggtatgattggtatgaaattacgaggtggttaagcttattttttaacagtgacctttccattgttttggttatcagccctagctgtttacatttggcttgtactaatttaatcaacacaacagcttctacagaatatgttgcttttttagttgagttaacgtgtcatcagctcactaaggtaggacagaattgcttggagatatgtaggcagcaggtaagtatgtgctgggaggatcagtacttttggagttagtacacctccgtatctaaatattgccaagtcccgtatttcttttctcagttattgactggatattattataaagatcttctaggtttatacatacagctatttctctttgtatactaaccagctgttctaatcttgtgattatttttccttttagggaaatccctaagtcagccaacccctcctcccatgccaatcctttcacagtctgaagcaaaaaacccacggatcaaccagctttctgcccgctggcagcaagtgtggctgttagcactggagcggcaaaggaaactgaatgatgccttggatcggctggaggagttgaaagaatttgccaactttgactttgatgtctggaggaaaaagtatatgcgttggatgaatcacaaaaagtctcgagtgatggatttcttccggcgcattgataaggaccaggatgggaagataacacgtcaggagtttatcgatggcattttagcatccaagttccccaccaccaagttagagatgactgctgtggctgacattttcgaccgagatggggatggttacattgattattatgaatttgtggctgctcttcatcccaacaaggatgcgcatcgaccaacaaccgatgcagataaaatcgaagatgaggttacaagacaagtggctcagtgcaaatgtgcaaaaaggtttcaggtggagcagatcggagagaataaataccgggtaaggaagagaaaaagcagtcctttgttgtggtggtttctcatatgtggctgatctcaccttttcctcctgatgcttagaggcccagagcccatcggacttgagatgtggtcactctctgacctcatctctatagatgccaagtgtcaggtaccctgttacatctgaaaactagtcccatatctacctagatagtagtagtttgtatttaagttttaagataggagatatttcagagctgtcacttcacatctgacaaagttcctagggggatgaaggtacctttggaaacaattatatctattgactgaccacttgcccacaaagagatggtcattgtgagcctgagtggctcccaggctagagaggcctggggaaactgtgttgaagccccaacagacactgtgcctgctctgagctgggctacaaatggggcccaggagcactgaggagacatcaggctcagtggtcttccctggaaagccatgctaggtgtggccataactgactgtgaactatacttgtgttttagcttcttttgggaccagggtcagggacatagaaggatctgaaacaggtctcctaaaatatatcaacagctcgtcaagattctctaaagtcctaagaaaaatctatgattggcaaataggatttagattgcactaagaaacacaggaaggtccatgtttcattagtatatccaaaatgtcctcaaagtacaccaaatctaccccatgctgcagtctcctgaggagtgctgggtgattctgctttgaatataacctagggcatttagttaataaagctccatataatcttatgcctgcttgttggattttgttttcttgttttttgtttttaattatctatgagagaaatgaattaacaagaacaacatagcatggagagttagttcatagtttataaaaccacatccctggccgggcgtggtggctcacacctgtaattccagaattttggaaggtagagaggcgagcgagcggatcacttgaggtcaggaattcgagaccaacctggccaacatggtgaaacaccctctctactaataacacaaaaattagctgggcttggtagcgcatgcctgtaatcccaactactagggaggctgaggcaggagaattgcttgaacgccggggtcggaggttgcagtgagccatgatcgcgccactgcactccagcctgggcaacagagcgagactctc

SEQ ID NO: 15796 - protein, 192 aa, Homo sapiens
MPILSQSEAKNPRINQLSARWQQVWLLALERQRKLNDALDRLEELKEFANFDFDVWRKKYMRWMNHKKSRVMDFFRRIDKDQDGKITRQEFIDGILASKFPTTKLEMTAVADIFDRDGDGYIDYYEFVAALHPNKDAHRPTTDADKIEDEVTRQVAQCKCAKRFQVEQIGENKYRVRKRKSSPLLWWFLICG

SEQ ID NO: 15797 - DNA, 4006 bp, Homo sapiens
  CDS (144)..(1865)
agatgtaggggagatggggcagaggagaggtctctgagcaccaggagaaggtcctggggtgggaggaggcatggtgtggtaaccgccgccctacctggtggcacccgaggagcttccccactcaggatgtggttttctccatcatggaaatgttttggatagtttctcagctgcatctgaagcctggaagcccaggccgatgggtcagagcaggagcctttggggagaggctatcagtggctctcagagcaaggaggggtctgggcagtgcctggtaccgggcgggagccaggctccctgggcccgtgactgagttctgcctgctcccctcttctcacaggtggtacaagctgcactccaagccaggcaagaaggagaaggaacgcggcgagattgaagtcaccatccagttcacgcgcaacaacctgagcgccagtatgtttgacctgtccatgaaggacaagccaaggtctcccttcagcaagatcagggacaagatgaagggcaagaagaagtatgatctggaatctgcctctgccatcctcccaagcagcgccatagaggatcctgacctgggcagcctgggcaagatgggcaaagccaaaggcttcttcctccgcaacaagctgcgcaagtcgtccctgacccagtccaacacctcgctgggctcggacagcaccctgtcctcagccagcgggagcttggcctaccagggacctggcgccgaactcctcacccgctcaccaagccgtagcagctggctgtccactgaagggggcagggactctgcacagtcccccaagctgttcacccataagaggacctacagcgatgaggccaaccagatgcgagtggctcctcctcgggcccttctggaccttcagggccacctggatgctgcctcccgctcttcgctctgtgtcaatgggagccacatttacaatgaggagccccagggccctgtgcggcaccgcagctccatctcgggctcgcttccatcctctggctccttgcaagctgtctcttcccggttctccgaggaggggcctcgttccacagatgacacctggcccagaggcagtcgtagcaacagcagctcagaggcagtgcttggacaggaggagctgagtgctcaggctaaagtcctggcccctggggctagccaccctggagaggaggagggggcccggctaccagagggcaagccagtccaggttgccacacccatagtggcctcctctgaggctgtggcagagaaggagggagcccggaaggaggaacgcaagccccggatgggtctcttccaccaccaccaaggcctaagtcggagcgagttgggtcgccgaagctctctgggggaaaaggggggtcccatcctgggggcctccccacatcactcatccagtggggaggaaaaggccaagagtagctggtttggcttgagagaagccaaggacccgactcagaaacccagtccccaccccgtgaagcccctcagtgccgcccctgtggagggcagccccgacaggaagcagtcccgctccagtctgagcatagccctgagcagtgggctggagaagctcaaaacagtcacatctgggagcattcagcctgtgacccaggccccccaggctggccagatggtggacactaaaaggctgaaggactcagctgtgctggaccagtcggccaagtactaccacctgacccacgatgagctcatcagcctgctcctgcagcgggagcgggagctgagccagcgggacgagcatgtgcaggagctggagagctacatcgaccggctgctggtgcggatcatggagacctcacccacgctgctgcagatccccccgggcccccccaaatagccttcctcaccctacccccaggagggttggcatggacctattgctgcctgccctctctcctcctgaactctctcatctgcagtggggcatcgtctgtcttgccttgtcactccttgctcctctccctcctgcctcaactggggctgctggaagggggccctctggattccctttggaggcatcaggttctgtgcacaacttgtgtgtctttgggagccctgggtctttcccacctgcctgttttcatatccctcagctttgggggccccagggaattggaactcttcccccaagacagagcaggggtgaactgtagcttgatgcagtaatctgggacaagactggttgctagcacatactttattatcccccaaggatggtcagccatttcttcccacagccaaagccccatccccttcatttccctccagtccctggaggggcttctagtattactgggacaatgaccacgctgcctgtttgtctgtgagttacgggcaaccagcctcttcagcctcacacccattcccctgagagcaagaagcctgtgtggtctgggccagtctctgccatgtcctgagtctgcttcagtctggagctgtttgtggggcgagtgccatgtggacagtggtggatgatgtgtgtgcttcaggctgctccctgacccctctgacctttccacgagtgtcacatgggaatgtgtggggcgcaggggcgggtgcggagagagcacctttttgcttttcgagctcttgaccacctccaatgtgtaggtccctccaggctggggcttgggactgcttatgatttggggatcaagcctccatgtctattcttgttgcctgtccagatgccaaaactctgtgttgctgcagggtttgaacttttggaaaccaattaaaatgtgcctttggtgggcggggtcaagagcccctggatgtcgacctctcccgctgtgtggcgtccccctcccacctgttgaatacatagggatggctctctcagggccctgggaatgggaatggacagcactgctgtgggctgttcccctcccctaaagttaatctcttggtctggccaagttgctgctccctcaaccttcctgctgtcttcccctccctcaaccccaataggaggatcccaggataaacactgctgggcaggcgggcaggcaggcctggggctgccctgctcactctcattgtctggcctcaggacttagccatactagaccagtcagcttgcctggaagagggaggtcccactatgcctttgggagacacctatacttaggaaaaagcctttgttgtcctcccatccatccattaagctgctatctcagcctgtcccttctgccccaggggcttgcctggcttggctgcagtgcactttgaaatgaagtatctgtcctttggcccagcccctggtttgcttgtagaaaacatggtaggcttccccaaggcatctgcagggaactttggcagcttggggcaccctgaattagcaaaaatggggggtgatgaggtgctgaagaaggatacttaacagcttagtgaggaggcaagagctcctctgggaccaccacttcttcaggagagggcctgtgggcttgcttttggaaggcctcaggcagacacgtgccctctgggtgatgtctgtctgctgccaggatggagcagaggagcgccacacatggaggaaagcccctgtaacgttacctaccttaaactccactcatcaaatctgagaaaagtatccactgttccccagggtttcagtcatgcttttgggggtcattgggtattagagaagtaagtatcttttctgagagagggggagtcaccccccctactggggattcctctgggctttattcactcccagccctggccctgacctttgtgggcctccctaatgcccagggcatggatggcttcagaggagtttttgaatcgaagcccagggtccttgttgatgtttcttctccgagccacacttggaggaaagttgcaggtgggttgggcagggtgcaggcatggttctgctttgctgtttgtcttcctagttaaggctctttataaagagcttcttcttcatgttttaagcactttatgaagaataaaacattcatgtactgt

SEQ ID NO: 15798 - protein, 574 aa, Homo sapiens
MEMFWIVSQLHLKPGSPGRWVRAGAFGERLSVALRARRGLGSAWYRAGARLPGPVTEFCLLPSSHRWYKLHSKPGKKEKERGEIEVTIQFTRNNLSASMFDLSMKDKPRSPFSKIRDKMKGKKKYDLESASAILPSSAIEDPDLGSLGKMGKAKGFFLRNKLRKSSLTQSNTSLGSDSTLSSASGSLAYQGPGAELLTRSPSRSSWLSTEGGRDSAQSPKLFTHKRTYSDEANQMRVAPPRALLDLQGHLDAASRSSLCVNGSHIYNEEPQGPVRHRSSISGSLPSSGSLQAVSSRFSEEGPRSTDDTWPRGSRSNSSSEAVLGQEELSAQAKVLAPGASHPGEEEGARLPEGKPVQVATPIVASSEAVAEKEGARKEERKPRMGLFHHHQGLSRSELGRRSSLGEKGGPILGASPHHSSSGEEKAKSSWFGLREAKDPTQKPSPHPVKPLSAAPVEGSPDRKQSRSSLSIALSSGLEKLKTVTSGSIQPVTQAPQAGQMVDTKRLKDSAVLDQSAKYYHLTHDELISLLLQRERELSQRDEHVQELESYIDRLLVRIMETSPTLLQIPPGPPK

SEQ ID NO: 15799 - DNA, 6701 bp, Homo sapiens
  CDS (2596)..(6384)
aatgagactcctgagtgtcttcatgtcccgcaccaaatctggatccaagtcttccatatgtgagtcatcttccctcatctccagtgccacagcagcagctctactgagctctggggctgtggactactgcctgcacgtgctcaaatcactgctggaatattggaagagccaacagaatgacgaggagcctgtggctaccagccagttgctgaaaccacatactacctcctccccacctgacatgagcccattctttctccgccagtatgtgaagggtcatgctgctgatgtgtttgaggcctatactcagcttctaacagaaatggtactgaggcttccttaccaaatcaaaaagattactgacaccaattctcgaatcccacctcctgtctttgaccactcgtggttttactttctctccgagtacctcatgatccagcagactccatttgtgcgccgtcaagtccgcaaacttctgctcttcatctgtggatccaaagagaagtaccgccagctccgggatttgcacaccctggactctcacgtgcgtgggatcaagaagctgctagaagagcaggggatattcctccgggcaagtgtggttacagccagctcaggctccgccttgcaatatgacacactcatcagcctgatggagcacctgaaagcctgtgcagagattgccgcccagcgaaccatcaactggcagaaattctgcatcaaagatgactccgtcctgtacttcctcctccaagtcagtttccttgtggatgagggcgtgtccccagtgctgctgcaactgctctcctgtgctctctgcggcagcaaggtgctcgctgcactggcagcctcttcgggatcctccagtgcttcttcctcctcagcccctgtggctgccagttctggacaagccacaacacagtccaagtcttccactaaaaagagcaagaaagaagaaaaagaaaaggagaaagatggtgagacctctggcagccaggaggaccagctgtgcacagctctggtgaaccagctgaacaaatttgccgataaggaaaccctgatccagttcctgcgttgtttcctgttagagtccaattcttcctcggtgcgctggcaggcccactgtctgacactgcacatctacagaaattccagcaaatctcaacaggagctcctgctagatctgatgtggtccatctggccagaactcccagcctatggtcgtaaggctgcccagtttgtggacctactaggatatttctccctgaaaactccacaaacagagaagaagttgaaggagtattcacagaaggctgtggagattctgcggactcaaaaccatattcttaccaaccaccccaactcgaacatttataacactttgtctggcttagtggagtttgatggctattacctggagagcgatccctgcctggtgtgtaataacccggaagtaccgttctgttatatcaagctgtcttccattaaagtggacacgcggtacaccaccacccagcaggttgtgaagctcattggcagtcacaccatcagcaaagtgacagtgaaaatcggggatctgaaacggaccaagatggtgcggaccatcaacctgtattataacaaccgaaccgtgcaggccatcgtggagttgaaaaacaagccagctcgctggcacaaagccaagaaggttcagctgacccctggacagacagaggtgaagattgacctgccgttgcccattgtggcctccaatctgatgattgagtttgcagacttctatgaaaactaccaggcctccacagagaccctgcagtgccctcgctgtagtgcctcggtccctgccaacccaggagtctgtggcaactgtggagagaatgtgtaccagtgtcacaaatgcagatccatcaactacgatgaaaaggatcccttcctctgcaatgcctgtggcttctgtaaatatgcccgcttcgacttcatgctctatgccaagccttgctgtgcagtggatcccattgagaatgagaagaccggaagaaggctgtatccaacatcaatacacttttggacaaagctgatcgagtgtatcatcagctgatgggacaccggccacagctggagaacctgctctgcaaagtgaatgaggcagctccagaaaagccacaggatgactcaggaacagcagggggcatcagctccacttctgccagtgtgaatcgttacatcctgcagttggctcaggagtattgtggagactgcaagaactcttttgatgaactctccaaaatcatccagaaagtctttgcttcgcgcaaagagttgttggaatatgacctacagcagagggaagcagccactaaatcatcccggacctccgtgtagcccacattcactgccagccagtaccgtgccttatccgtcctgggctgtggccacacatcctccaccaagtgctatggctgcgcctcggctgtcacagaacattgtatcacactacttcgggccctggccaccaacccagccttgaggcacatccttgtctcccagggccttatccgggagctctttgattataatcttcgccgaggggctgcggccatgcgggaggaggtccgccagctcatgtgcctcctaactcgagacaacccagaagccacccaacagatgaatgacctgattattggcaaggtctccacagccctgaagggccactgggccaaccccgatctggcaagtagcctgcagtatgaaatgctgctgctgacggattctatctccaaggaggacagctgctgggagctccggttacgctgtgctctcagccttttcctcatggctgtgaacattaagactcctgtggtggttgaaaacattaccctcatgtgcctgaggatcttgcagaagctgataaaaccacctgctcccactagcaagaagaacaaggatgtccccgtcgaggccctcaccacggtgaagccatactgcaatgagatccatgcccaggctcaactgtggctcaagagagaccccaaggcatcctatgatgcctggaagaagtgtcttcctatcagagggatagatggcaatgggaaagcccccagcaaatcagagctccgccatctctatttgactgagaagtatgtgtggaggtggaaacagttcctgagtcgtcgggggaagaggacctcccccttggatctcaaactggggcataacaactggctgcgacaagtgcttttcactccagcaacgcaggccgcacggcaggcagcctgtaccattgtggaagctctagccaccattcccagccgcaagcagcaggtcctggacctgcttaccagttacctggatgagctgagcatagctggggagtgtgcagctgagtacctggctctctaccagaagctcatcacttctgcgcactggaaagtctacttgacagctcggggagtcctaccctatgtgggcaacctcatcaccaaggaaatagctcgtctgctggccctggaggaggctaccctgagtaccgatctgcagcagggttatgcccttaaaagtctcacaggccttctctcctcctttgttgaggtggaatccatcaaaagacattttaaaagtcgcttggtgggtactgtgctgaatggatacctgtgcttgcggaagctggtggtgcagaggaccaagctgatcgatgagacgcaggacatgctgctggagatgctggaggacatgaccacaggtacagaatcagaaaccaaggccttcatggctgtgtgcattgagacagccaagcgctacaatctggatgactaccggaccccggtgttcatcttcgagaggctctgcagcatcatttatcctgaggagaatgaagtcactgagttctttgtgaccctggagaaggatccccaacaagaagacttcttacagggcaggatgcctgggaacccgtatagcagcaatgagccaggcatcgggccgctgatgagggatataaagaacaagatttgccaggactgtgacttagtggccctcctggaagatgacagtggcatggagcttctagtgaacaataaaatcattagtttggaccttcctgtggctgaagtttacaagaaagtctggtgtaccacgaatgagggagagcccatgaggattgtttatcgtatgcgggggctgctgggcgatgccacagaggagttcattgagtccctggactctactacagatgaagaagaagatgaagaagaagtgtataaaatggctggtgtgatggcccagtgtgggggcctggaatgcatgcttaacagactcgcagggatcagagatttcaagcagggacgccaccttctaacagtgctactgaaattgttcagttactgcgtgaaggtgaaagtcaaccggcagcaactggtcaaactggaaatgaacaccttgaacgtcatgctggggaccctaaacctggcccttgtagctgaacaagaaagcaaggacagtgggggtgcagctgtggctgagcaggtgcttagcatcatggagatcattctagatgagtccaatgctgagcccctgagtgaggacaagggcaacctcctcctgacaggtgacaaggatcaactggtgatgctcttggaccagatcaacagcacctttgttcgctctaaccccagtgtgctccagggcctgcttcgcatcatcccgtacctttcctttggagaggtggagaaaatgcagatcttggtggagcgattcaaaccatactgcaactttgataaatatgatgaagatcacagtggtgatgataaagtcttcctggactgcttctgtaaaatagctgctggcatcaagaacaacagcaatgggcaccagctgaaggatctgattctccagaaggggatcacccagaatgcacttgactacatgaaaaagcacatccctagcgccaagaatttggatgccgacatctggaaaaagtttttgtctcgcccagccttgccatttatcctaaggctgcttcggggcctggccatccagcaccctggcacccaggttctgattggaactgattccatcccgaacctgcataagctggagcaggtgtccagtgataagggcattgggaccttggcagagaacctgctggaagccctgcgggaacaccctgacgtaaacaagaagattgacgcagcccgcagggagacccgggcagagaagaaacgcatggccatggcaatgaggcagaaggccctgggcaccctgggcatgacgacaaatgaaaagggccaggtcgtgaccaagacagcactcctgaagcagatggaagagctgatcgaggagcctggcctcacgtgctgcatctgcagggagggatacaagttccagcccacaaaggtcctgggcatttataccttcacgaagcgggtagccttggaggagttggagaataagccccggaaacagcagggctacagcaccgtgtcccacttcaacattgtgcactacgactgccatctggctgccgtcaggttggctcgaggccgggaagagtgggagagtgccgccctgcagaatgccaacaccaagtgcaacgggctccttccggtctggggacctcatgtccctgaatcagcttttgccacttgcttggcaagacacaacacttacctccaggaatgtacaggccagcgggagcccacgtatcagctcaacatccacgacatcaaactgctcttcctgcgcttcgccatggagcagtcgttcagcgcagacactggcgggggcggccgggagagcaacatccacctgatcccgtacatcattcacactgtgctttacgtcctgaacacaacccgagcaacttcccgagaagagaagaacctccaaggctttctggaacagcccaaggagaagtgggtggagagtgcctttgaagtggacgggccctactatttcacagtcttggcccttcacatcctgccccctgagcagtggagagccacacgtgtggaaatcttgcggaggctgttggtgacctcgcaggctcgggcagtggctccaggtggagccaccaggctgacagataaggcagtgaaggactattccgcttaccgttcttcccttctcttttgggccctcgtcgatctcatttacaacatgtttaagaaggtgcctaccagtaacacagagggaggctggtcctgctctctcgctgagtacatccgccacaacgacatgcccatctacgaagctgccgacaaagccctgaaaaccttccaggaggagttcatgccagtggagaccttctcagagttcctcgatgtggccggtcttttatcagaaatcaccgatccagagagcttcctgaaggacctgttgaactcagtcccctgaccaccacacagcagctgcggcggcgaagacgaagctggcttgccttccaccctctgttctccctccttgtgcattaagttccctccgcgggatgctgcattgttaccccgccctcccctctctcatttttcttggtgtggcttggggtttttaggcttcctgttttatctcgtgtgtgtggtgcaccagctatgaggttgtctgtaacccaagccatcaaagggcctgtacatacctaggagccatgagttgtcccggccagcttcatacttgagtgtgcacatcttgagaaataaacaagtgacttaacacac

SEQ ID NO: 15800 - protein, 1263 aa, Homo sapiens
MREEVRQLMCLLTRDNPEATQQMNDLIIGKVSTALKGHWANPDLASSLQYEMLLLTDSISKEDSCWELRLRCALSLFLMAVNIKTPVVVENITLMCLRILQKLIKPPAPTSKKNKDVPVEALTTVKPYCNEIHAQAQLWLKRDPKASYDAWKKCLPIRGIDGNGKAPSKSELRHLYLTEKYVWRWKQFLSRRGKRTSPLDLKLGHNNWLRQVLFTPATQAARQAACTIVEALATIPSRKQQVLDLLTSYLDELSIAGECAAEYLALYQKLITSAHWKVYLTARGVLPYVGNLITKEIARLLALEEATLSTDLQQGYALKSLTGLLSSFVEVESIKRHFKSRLVGTVLNGYLCLRKLVVQRTKLIDETQDMLLEMLEDMTTGTESETKAFMAVCIETAKRYNLDDYRTPVFIFERLCSIIYPEENEVTEFFVTLEKDPQQEDFLQGRMPGNPYSSNEPGIGPLMRDIKNKICQDCDLVALLEDDSGMELLVNNKIISLDLPVAEVYKKVWCTTNEGEPMRIVYRMRGLLGDATEEFIESLDSTTDEEEDEEEVYKMAGVMAQCGGLECMLNRLAGIRDFKQGRHLLTVLLKLFSYCVKVKVNRQQLVKLEMNTLNVMLGTLNLALVAEQESKDSGGAAVAEQVLSIMEIILDESNAEPLSEDKGNLLLTGDKDQLVMLLDQINSTFVRSNPSVLQGLLRIIPYLSFGEVEKMQILVERFKPYCNFDKYDEDHSGDDKVFLDCFCKIAAGIKNNSNGHQLKDLILQKGITQNALDYMKKHIPSAKNLDADIWKKFLSRPALPFILRLLRGLAIQHPGTQVLIGTDSIPNLHKLEQVSSDKGIGTLAENLLEALREHPDVNKKIDAARRETRAEKKRMAMAMRQKALGTLGMTTNEKGQVVTKTALLKQMEELIEEPGLTCCICREGYKFQPTKVLGIYTFTKRVALEELENKPRKQQGYSTVSHFNIVHYDCHLAAVRLARGREEWESAALQNANTKCNGLLPVWGPHVPESAFATCLARHNTYLQECTGQREPTYQLNIHDIKLLFLRFAMEQSFSADTGGGGRESNIHLIPYIIHTVLYVLNTTRATSREEKNLQGFLEQPKEKWVESAFEVDGPYYFTVLALHILPPEQWRATRVEILRRLLVTSQARAVAPGGATRLTDKAVKDYSAYRSSLLFWALVDLIYNMFKKVPTSNTEGGWSCSLAEYIRHNDMPIYEAADKALKTFQEEFMPVETFSEFLDVAGLLSEITDPESFLKDLLNSVP

SEQ ID NO: 15801 - DNA, 4512 bp, Homo sapiens
taatgcttcattgttgaggctgttcgtgcattgtagactgttcagcagcattcctggcttctatctgctaggtgccaatagtgttttttatgacaaccagaaagtgtccagacactgccaaatgccgaggcaggggaagtgcagaatccttagttgagagtcactgctctagggtctggacccttccactaattaaatcttcttgcacctgcatacttagcttaccttggtatgcaggtgggtgaacacctgcctattagtagtgcccgtcgtcaaatcctgcatataaactggtaagaagtggtgctttctcttttcctggtacagatcctagcccagaggtgatgagcagtaaagctgcagattggaagggaggggctggtgaaaacagtggtgcggtgcagatggggagggattctagtagtaggcatcttagacttcagttggtgttggtggcaatggtatctgtacccctctaagaccgcatggcaagaatacaattttatatttaatagtgatcagcatggatgttggtgcgtcacaaacattgactcagcagtgtctaaacctgggcatttagaacaaggcctcacagaatcttctggaagtgcttcaaactcctttccaaacctagtcgtcagttgttttttgtaaccttcccatgttaggcctgggtggatcccctcttaaggctgtactttagggaaatattttttatcttcatatcactttatctgtcattcattctcctattccctgttggctgcatggggcagattaaaacagactctgattggactaattagaataattacttcaaggctaattgcttacttgctgctatctttaatcactgctacgtggtctgtggtgtggtggccacatgcccagagacccaggcctaggccagccgtctggaaatgactgtatcacccaggcacggggcatgcactggtgagctcagcctgtgactcttccagttaacggttggtattgggtggagtgggcacccctgtcagttctgggatagtctgatcttgttcagctggttgaaagcaaaatttagctttctggcttaaaatagttgggaaagtagggcagataggtcctgggccacatctcttgtgtggactcttctgattccactggagggggaggaaccacaggatgaagtcagggctgtgcaccgtcaggaggagctctgggccaggggggttggctgcccttgctgctgccagagcctgacaaggcagagggcagtaaaagaaaggaagctaacagtgaaccatggtgttaatcatgaagctcagagcaagcagagaataaataggccataaaaatttcagagctggccaggcttagtggctcatgcctgtaatgccagaactttgggtggccaaggtggacggatcatgaggtcaggagtttgagaccaacctggccaacatggtaaaaccccatctctactaaaaatacaaaaactagccgggcatggtagtgtgcacctctaatcccagctactcaggaggctgaggcaggagaatcacttgaacccgggaggcggaggttgcaatgagccgagatcgagcccttgcgctccagcctgtgctgtagagtgagactccgtctcaaaaaaaataataaaaaaaaaaatttcaaggccgggcgcggtggctcacgcctgtaatcccagcactttgggaggccgaggtgggtggatcacgaggtcaggacatcgagaccatcctggctagcatggtgaaaccctgtctctactaaaaatacaaaaaacaaaattagctgggtgtggtggcgggcgcctgtagtcccagctacttgggatgctgaggcggcagaatggcacgaacccgggaggcggagcttgcagtgaaccgagatcatgccactgaactccagcctggcagcctgggcgacagagcaagactccgtctcaaaaaaaagaaaaagaaaattcagagctgtctggccagttggtggatagccttcactgatacagtgctagctctctgggggatataggttcatctctgcaaatctctttcatggggctagtgggtgtacgtgtgccctttggtgaggccagcaaggccccctggacaggcttgctaccaggaaacacagatgggcttttcttcctaccgcctccacaacaaaatccagaaagtttgacagcagacttggttggagttacagcaccaccattttaactcgttgacttcggggaaattaagctttttgaggcctcagttttcctcatctgcaaaaccagtctaatgatgctatagagttgttatagaaagttgaatctttgtcatctattgaatgcttgaaatttagctaaaagtgtctcaggagatgggctaccttctgtgtttagtactgtctatcttggtgtgtacagaattgggacttggcaggttgaccttccctctggattcagaaagccccaggacttcttataaagttaggccatgggtggtcttggaggcttgggtctggtaaataattgagcctgagctcacaatcctgcccctgggtccaggtggctggtctgctgcccccaaaagcctgaccttcttggtcctgtgggtctgtcagtaaggcaggtagccatagctggagagagacagtcaccaggctgggatcttggacagtccctccatctctggttcatcctggcctaggcagggcatggagtagatggaaaatggtggccatcttggaaatgtgtcataacaactcagtttccaagaccgtcccctagaggagagatgtacagtcctgcatagtttctttaaagaatttttcagggccaggtgcggtggctcatgcctgtaatcccagcactttgggaggccagggcgggtggatcacctgaggtcaggaattcaagacaagaatggccaagatggtgaaagcccgtctctactaaaaatacaaaaattagccgggcgtggtggcaggcacctgtaatcccagctactcgggaggctgaggcagagaattgcttgaacccaggagctagaggttgcagtgagccaagattgcgccactgcattccagcctaggcaacagagtgggactctgtttccgaaaaaaaaaaaaaaaaaaaaatttcagacacctcatttaatttgcacctaatcttctgaggaggggcttgctgtgatctttgttttgcagaggcagaaacaggttctaagtggtagaatagttcagctcaacacacatttcatttagtgtccactgtgcagggatgagtaaggcctttgaagagctttgtcttgaagggaagacacaatttccacaaggccagatggaatagcaaagaggcatgagagggtgtggttgagcaatgtagggggaacccagcctgggcagtcagggaaaggcccccaaaagaggagatagacatgtcagctccttcgagagtcactctgaggtataggactagtgggtgacatttgcaacatatactggtcagtgcctctggggctggggctgggggctcagcccagagagggagcaggcaagccagatggcataaggttatttcctcttctcctttctctgtgaaaacaaaaaagcaggaggtcctggaacttttcatgccagcagtagggctggacccaagggcatattaagttgcaagctggccgactgagactttcagacaatttattttgtagcaagtaggttccttaatagtaaataataccctgtggtctctgctcgacattttgtgagattggccaggagagcttcccttaatcaggactttgagctcatgttgccagagcagccggatattctgaggaaagggtcagtgggctgtgtcatagctgctaggaagttctagaagaccagtactaataagccttccaggttgggtcagtgccaaagtcatttttgtgggcctgtgcagccctacctccatactagttcttccaaggcctgggctccgtggcaggaacctgacatggcttattgtttgttctagagccctttgggggatggggtcagggagcatgcgggcagtcaagctttgacaaacatctggatttgctccagaactgcattaagaaaagtggttccttgttggagatgggaagtcagggcccttggttatgcatatagccaagtcaaacagattgataacacttgtcaatggcagggaaggttgcctgtagccagcactgcagattcaggacttagaaacgtgcctctggggccgagcatggtggctcacacttgtaatcccagcactttgggaggccgaggtgggtggatcacgtgtgatcaggagatcgagaccagcctggccaacatggggaaacagtcttcactaaacatacaaaaattagcctgtagtcccagttacttgggggtctgaggtaggagaattgcttgaacctgggacgtggaggttacagtgagccaagatcatgccactgcactccagcctgggcaacagagtgagactctgtcttt

SEQ ID NO: 15802 - DNA, 5117 bp, Homo sapiens
  CDS (124)..(3534)
ggcatctacaattgtcagaagaccagcattgtgcgggtgggtggaaggagcaacagtgaaatcctgaagcagttcaccctaagggagctgaggaacaagcgggaattccgccgcaacctccccatgcacctccgaagggcctacatgagtatcatgacacagatgaaggagtcagagcaagagcttcatgaaggagccaagaccctggagtccaccatgcgtggtgtcctacgggaacagtacctgcagaagtacatctcaccccagcactgggaaagtctcatgaatggaccagtgcaggatagtgaatggatttgcttccagcactggaagcattccatgatgctggagtggctaggtcttggtgtcggttctttcacgcaaagtgtttctccagcaggacctgagaatacagcccaggcagaaggggatgaggaggaagaaggggaggaggagagttcgttgatagagatcgcagaggaagctgacctgattcaagcagaccgggtgattgaggaggaagaggtggtgaggccccagcggcggaagaaggaagagagtggagcagaccaggagttggctaaaatgcttctggccatgaggctagaccattgtggcactgggacagcagctggacaggagcaagccacaggagagtggcagacccagcacaaccagaaaaagaaaatgaaaaaaagagtgaaggatgagcttcgcaaactgaacaccatgactgcagccgaggccaacgagatcgaggatgtttggcacctggacctcagttctcgctggcagctttataggctctggctacagttgtaccaggctgacacccgccggaagatcctcagctatgaacgccagtaccgcacatcagcagaaagaatggccgagctgagactccaggaagacctgcacattcttaaagatgcccaggttgtaggaatgacaaccacaggtgctgccaaataccgccagatcctacagaaggtggagccgaggattgtcatagtggaagaagctgcggaagtccttgaggcccataccattgccacattgagcaaagcttgccagcacctcattttgattggggaccaccagcagctgcgccccagtgccaacgtgtatgatctggccaagaacttcaaccttgaggtgtccctttttgaacggctagtgaaagtaaacattccctttgtccgtctgaattaccagcaccgtatgtgccctgaaattgcccgccttttgaccccccacatttaccaggatctggagaatcatccatctgttcttaagtatgagaagattaagggggtgtcttccaaccttttctttgtagaacacaactttcctgaacaggaaatccaagagggcaaaagccatcagaaccagcatgaggctcactttgtggtagagctgtgcaagtacttcctgtgccaggaatacctgccttcccagatcaccatcctcactacctataccgggcagctcttctgcctacgcaaactgatgcctgccaagacatttgctggcgtcagggtccatgttgtggacaaataccaaggggaagagaatgacatcatcctcctctcgctagtgcggagcaaccaagaaggcaaggtgggttttctgcagatatccaaccgcatctgtgtggccttgtcccgagccaagaagggaatgtactgcatcggaaacatgcagatgctggccaaggtgcccctgtggagcaagatcattcatacacttcgagagaacaatcaaataggccccatgctccggctctgctgccagaaccaccctgaaacccacaccttagtatccaaagcttctgacttccaaaaagtacccgaaggaggctgcagcctgccctgcgagttccgcctgggctgtgggcatgtctgcacccgtgcctgccacccttatgactcttcacacaaggagttccaatgcatgaagccatgccagaaggtcatctgtcaggaagggcaccggtgtccccttgtttgcttccaggagtgtcagccttgtcaggtgaaggtgcccaaaatcattcctcggtgcggccatgaacaaatggtcccttgttccgtgcctgagtcagatttctgctgccaggagccttgctccaagtctctgagatgtgggcacagatgcagccacccatgtggtgaggactgtgtgcagttgtgttcagaaatggtcaccataaaactcaagtgtgggcacagtcaaccggtaaaatgtggtcatgtggaaggcctcctgtatggtggtctgctagtcaagtgtaccacaaagtgtggcactatcttggactgcgggcatccttgcccaggctcctgccacagctgcttcgaagggcgtttccatgaacgctgtcagcagccctgcaagcgcctgcttatctgctcacacaagtgccaggaaccatgcattggtgagtgcccaccctgccagcggacctgtcagaaccgctgtgtccacagccagtgcaagaagaaatgtggggagctgtgtagtccctgcgtggaaccctgtgtctggcgctgccagcactaccagtgcaccaaactctgctctgagccctgcaaccgacccccatgctatgtgccttgtactaagctgctagtttgtggccacccctgcattggtctctgtggggagccatgccccaagaaatgccggatctgccacatggatgaggtcacccaaatattctttggctttgaggatgagcctgatgcccgctttgtgcagctggaagactgcagccacatctttgaggtgcaagccctagaccgctacatgaatgaacagaaggatgatgaagtcgccatcagattgaaagtctgccctatctgccaggtgcccatccgcaaaaacctgaggtatggaactagcataaaacagcggctagaagagattgaaatcatcaaggaaaagatccagggctcagcaggggaaatagcaaccagccaggaacggcttaaggccctgctggagaggaagagcctcctccaccagctgcttcctgaagacttcctgatgttaaaggagaagctggcccagaaaaatctgtcagtgaaggacctgggtctggtcgagaattacatcagcttctatgaccacctggccagcccgtgggattccctgaaaaagatgcatgtcttagaagagaaaagagtgaggactcgactagaacaggtccatgagtggctggccaagaagcgcttgagcttcactagccaggaactaagtgacctccgaagtgaaatccagaggctcacatacctggtgaaccttctgacccgcaacaagatagcagagaagaaggtgaaagatagcatagcagtagaggtctatagtgtccagaatatccttgagaaaacatgtaagttcacccaagaggatgaacaacttgtgcaggaaaagatggaagctctaaaagccacccttccctgctctggcctgggcatctcagaggaagagcgagtgcagattgtcagtgccataggttatcctcgtggtcactgattcaagtgccgcaatggccatatctatgagattggcgattgtgggggagccatggagaggggcacgtgtcctgactgtaaggaagtgattggtggcacaaatcatactctggaaagaagcaaccagcttgcttctgaaatggatggagcccagcatgctgcctggtctgacacggccaacaacctgatgaactttgaggagatccaggggatgatgtaggaagatggtacaccactgccttttgccctcgccactgaatgactggggccagctccctaatgaaggaactgaagtttgttttttattatcatcctttttaggctgggcgcagtggcttacgcctgtaatcccagcactttgggaggccgaggcaggcggatcacgaggtcaggagttcgagaccagcctgaccaacatggcgaaaccccgtctctactaaaaatacaaaaattagctgggcgttatggcgggcgcctgtaatcccagctacttgggaggctgaggcagaagaatcgcttaaacccaggaggcggaggttgcagtgagctgagatcatgccattgcactccagtctgggcgacaggagcaagactctgtctcaaaaaaaaaaaatcattctttttagtcttagcacctacttaaggatccacttttagggctcacccacatttgtttctagatttacccctgcgctagagtaagcactttatctccagaactgagagcaaagttaacaaatctcaccccttctctcctgcaaattagtggacagactccctggaacatgtttggggcttccacctagggccacctagtggtatctctgggtctttacttggtcagatgtttattctacattgttccccaggaacagagtatgagctcattgatgcagaccgattctaattgccaggccctaatttgcagactaactctcataataaacagaggcccatagttgtttatgaactgcttatccttaaaggagcacaagaacccctccctgccctcctcgggcaccctgcctccaggagatggaggcacgtgataagacaaaagactgcaccaactcaccctgacacagttacatagtcactgagagtggggaagatgggacagcccacatgctgcataagatgggccttatgcagcaggcccaggtcgtcattaaggagtgacccctttcctgtaacctgcactttgggatggtagaagtttctttacctgctgacaggtttggtggcactgctggttacccctgggccctgaatggagctaaaatcacatttggtaccagcagcacctatcccaagtgtgatccttcatcccaacactccctcttggagctgttccctgggtagagctagcatgccagcagcttctgcaggctccaaacccaggccagaagccagacccaggcctgctgcctgcatctgcattccctccttccagtgttccttagaacagacatttaggtatctcaggtcctttctaagtgtccctttcctatgtatgcatttcctttttttgtctttactatgcactttagcttataaagccaattaaaaacgatgattgag

SEQ ID NO: 15803 - protein, 1137 aa, Homo sapiens [sequence omitted]

SEQ ID NO: 15804 - DNA, 4829 bp, Homo sapiens
  CDS (70)..(3402)
accgatcaaggatcaccagcctccaccccctctactacacggcccctcaactctgtggagcccgccaccatgcagccaattcccgaagcccacagcctctatgttaccctgattctctccgattccgtgatgaatatctttaaagacagaaactttgacagctgttgcatctgtgcctgcaacatgaacatcaaaggggcggatgtcgggctttacatccccgattcttccaatgaggaccagtaccgctgtacctgtgggtttagtgcgattatgaaccgcaaacttggctacaattcaggactcttccttgaagatgagttggatatttttgggaagaattctgatattggtcaggctgcagagaggcgcttaatgatgtgtcagtccaccttccttcctcaggtggaaggaaccaaaaaaccccaggagccacccataagccttctcctcctcctccagaatcaacacacacaaccttttgcttcactgaatttcctggactacatttcctctaacaatcgccaaactcttccctgtgtaagctggagttatgaccgggtgcaagcagataataatgattactggacggaatgctttaatgcgttggagcaggggcggcagtatgtggataaccccactggtggaaaagtggacgaagctctggtgagaagtgccactgtgcactcttggcctcacagcaatgtgctggacatcagcatgctctcctcccaggatgtggttcgtatgctgttgtccctgcagccctttctccaagatgccatccaaaagaagcgcacgggcaggacctgggagaacatccagcatgtgcagggaccactcacttggcagcagttccataaaatggcaggacggggaacctacggttcggaagaatctcctgagccgttgcccatccccactctgctggtaggctatgacaaggatttcctcaccatctcgccattctccttgccgttttgggagaggctcttgttggacccatatgggggccaccgtgatgttgcctatattgtggtgtgtccagaaaatgaggccttgctcgaaggagccaaaactttcttcagggacttgagtgctgtatacgagatgtgtaggcttgggcagcacaagctcatctgcaaagtgctacgtgacgggatcatgcgcgtgggaaaaactgtggcacagaagctgacagatgagcttgtgagtgagtggtttaaccagccttggagcggcgaggagaatgacaatcattccagactcaaactttatgcgcaagtttgccgccatcacctagcaccttatttagccactctgcagcttgatagcagcctattgataccacctaaataccagaccccaccagcagcagcacagggacaagctacgccagggaatgctgggcccttagctccaaatggatcagcagctcccccagctggcagtgcatttaatcccacctcgaatagtagttctacaaatcctgcagcaagtaattctgcatctggttcctctgtgccaccggtctcatcgtctgcctctgctcctggtattagccagataagcactacctcttcttcaggattcagtggtagtgttggagggcagaaccccagcactgggggcatttctgcggatagaacgcaagggaacataggctgtggtggagacactgaccctgggcagagctcttctcagccctcacaggatggacaagagagtgttacagaaagggagagaataggaattcccacggagcctgactctgcagacagccatgcccaccctccagctgttgtcatttacatggtggacccgttcacgtatgctgcagaggaggactccacttctgggaacttttggctgttgagcatgatgcgctgctacacagaaatgctggataatttacctgagcatatgagaaattctttcattctccagattgtgccttgccagtacatgctgcagacaatgaaggatgagcaagttttctacattcaatacttgaagtccatggcattttcagtgtactgccagtgcaggcgaccactgcctacacagatccacattaaatccctcacgggatttgggcctgcagccagcattgagatgaccctcaagaaccctgagcggcccagcccaatccagctttactcccctccctttatattggccccaatcaaagacaagcagacagagctgggagagacgtttggtgaggcgagccagaaatacaatgtgctcttcgtgggctattgtctgtctcacgaccagcgctggcttttggcttcctgcactgacctccatggggaattattagagacctgcgttgtaaatattgctttaccaaacaggtcacggaggagtaaagtatctgcacgtaaaattggactacagaagttatgggagtggtgcatagggattgtccaaatgacatctctaccctggagagttgtaatcgggcgacttgggcgtcttggccatggggagcttaaagattggagtatcctccttggagaatgttcactacagacaatcagcaaaaagctcaaggatgtgtgccggatgtgtggaatctctgccgcagactctccttctatccttagtgcctgcctggttgccatggagccccaggggtcctttgtagtgatgccagatgctgtcacaatgggctctttttttggccgaagtactgcactgaacatgcagtcatctcagctcaacacccctcaagatgcttcttgtacacacatcttggtgttcccaacatcatcaaccatccaggtggctccagccaactaccccaatgaagatgggtttagccccaacaatgatgatatgtttgttgaccttccattcccagatgatatggacaatgatattggcatattaatgactgggaacctccattcctctcccaactcttccccagtaccctccccaggctctccttctggaattggtgtgggctctcacttccagcatagtcggagccagggtgagcgtcttctttctagagaagcaccagaggagctaaagcagcagcccctggcccttgggtattttgtatcaactgccaaagctgagaatcttccccagtggttttggtcatcgtgtccccaggctcaaaaccagtgccctctcttcttaaaggcttcgctgcatcaccacatttcagtagcacagacagacgaacttctgcctgccaggaattctcagcgggttccacaccctcttgactccaaaaccacgtcggatgttttaaggtttgttttggagcagtacaacgctctgtcctggctcacgtgcaatccggccacccaggaccgtacttcctgccttcccgcccactttgtggtgctcactcagttgtacaatgccatcatgaatatactttaattggaaaagcacttgttctctctggctcagttctttctccctgcaacctctgtccaaggaacctgctacactctgcaaataacccacatccttttcttcagaccactctccacagtcctgcactgtgattccttctcagcaggcacatgtcaattctgcagtgttcattaccagagtgactccttgacacttctctcatggacctggaaacttccataagtggtgactttcagccagtgcggtggtgtgtgtagccccaaccactggtccccaggaagtggtggtggttgatggcttttcagcgggaaacagaagagacagtgtccttttgcacaagagtctgtgttttcagcccctgtatacaattgagggcagtctagccctttggatgaaatcctcttagttactggtgtatggcctgtgggttacctgaactccataatctgggactttttaaaaataagaaccagctcaagtacatggtttcatactggggtttctgtctccctagtgttcccatccagattagcatgagtgctttggttgacttcaaacctgtgtgtcaatgcagaaggtctggagacagcttcattttgtttatttattttaatttgttttgtcatatggtttttgtgaccttatttttttaattcacaaggaccaggtacagtagctgaaacccaattcagatccaccataggattctttgactacatacctctgtcctagaagccggaaaaggagtaaaaacacattggggagatcatgcctaaaagtaatatattcaaaaccacccagcagtaggttttgttaacaacaaactggattttaaaagttctgccatgttaagtggccagcatttcatgaaggataacatttttatacagaaggcagtcaagctcaactcagagccatggaggcaagtaccttaattagttttatatagtcacaacggaaatatattttctagtgaattcttattggaagccaggtctctcctctcattagatcaaaagggacttatgtacatacaacaattgaaagtgtttgctcatgaaatcagttataaatatggtgaattttttctggaccataggaatattatttcaaagaaatattacaacttaaccattaaattagtacttgaagttgagcctttgtggtgggactttttaaaaaaatgcctttttaaagcattaatggctaattgaagtattttatgactcctcattcctggcccagagggttgtctttgaaaccctgtttctaacccttgtgttgtgtgtttctgtctgaggacagtgggtgtgtactggcctcccgggagccactgtgaccaggcctttgagctcttgtcatctgtggagagaatcatgcaaattttaaaagttcttccaagagacttccatgtcctggttattaac

SEQ ID NO: 15805 - protein, 1111 aa, Homo sapiens [sequence omitted]

SEQ ID NO: 15806 - DNA, 4959 bp, Homo sapiens
  CDS (225)..(2693)
tgcgcttttccctctgcagtgataatctggaaggaatatctgaaggtccttcaaatcgctccaattcagtgtcctccctagacctagaaggagagtctgtgtcagaacttggagcaggaccttctggcagtaatggagttgaagctctacagctgttagaacatgagcaagctacaacacaggataaccttgatgataagctaaggaagtttgaaattcgtgacatgatgggattaacagatgatagggacatatcagaaacagtgagtgagacctggagtacagacgtcttgggaagtgactttgaccctaatattgatgaagatcgcttgcaagaaattgcaggtgctgcagcagagaacatgttaggcagtttgctgtgcctcccaggttcagggtcagtgcttcttgacccgtgcactggttctaccatatcagagacaacaagtgaagcttggagtgtagaggtattgccaagtgactcagaggccccagacctaaagcaggaggagcgtctgcaagaactggagagctgttctggactgggtagcacatctgatgatacggatgtcagggaggtcagttcccgccccagcacaccaggcctcagtgttgtgtccggcataagtgcaacctctgaggatattcccaataagattgaagacctgagatctgagtgcagctctgattttgggggtaaagattctgtcactagtccagacatggatgaaataactcacggtgcccaccagctgacctctcctccttctcagtcagagtctctgctggccatgtttgatccactgtcttcacatgaaggggcttctgctgtggtaaggccaaaggttcactatgctaggccatcgcatccaccaccagatcccccaatcctggaaggagctgtgggaggaaatgaggccaggttgccaaactttggttcccatgttttaactccagctgaaatggaggcattcaagcaaaggcattcttaccctgagagactagttcgaagcaggagctctgatatagtatcttctgtccggagacccataagtgaccccagctggaaccggcgtccaggaaatgaagagcgagaactccctccagctgcagccattggtgctacttctttggtggctgcacctcattcatcatcttcatccccgagtaaggactcctcaagaggagagactgaagaacgcaaagatagcgatgatgagaaatcagacaggaacagaccttggtggagaaaacgttttgtttcagccatgcctaaagctcctataccatttagaaagaaagaaaaacaagaaaaagacaaagatgatctggggcctgacagattctcaacactcacagatgatcccagccctagactcagtgcacaagctcaggtggctgaggatattctggacaaatacaggaatgccattaaacggaccagccccagtgatggagcaatggcaaactatgaaagtacagaggttatgggtgatggtgaaagtgcacatgattctccccgtgacgaagcactgcagaacatctcggctgatgatctcccagactctgcaagccaagcagcccacccgcaggattcagctttctcttacagagatgcaaaaaagaaactgaggcttgctctttgctctgcggactctgttgccttcccagtgctgacccattcaacaaggaatggtttaccagaccacacagacccagaagacaatgaaattgtatgcttcttaaaagttcaaatagctgaagcaattaatttacaagataagaatctaatggctcaacttcaagaaacaatgcgctgtgtgtgccgttttgataataggacttgtaggaaactgctggcttcgattgctgaggactacagaaaaagagccccatatattgcttatctcactcgttgtcgacaaggactacagaccacacaggctcacctggaaaggctattgcaaagagttttgcgggacaaagaagtggccaatcgatactttaccactgtctgtgtgagattactgcttgagagcaaagaaaagaagatcagggaattcattcaagactttcagaaactcaccgcagctgacgataaaactgctcaggtagaagattttctgcagtttctttatggtgcaatggcccaggatgtcatatggcaaaacgcgagtgaagaacagcttcaagatgcacagctggccattgagcgaagcgtgatgaaccggattttcaagctcgccttctaccctaatcaagatggggacatacttcgcgaccaggttcttcatgaacatatccagagattgtctaaagtagtgactgcaaatcacagagctcttcagataccagaggtttatcttcgagaagcaccatggccatctgcacaatcagaaatcaggacaataagtgcttataaaaccccccgggacaaagtgcagtgcatcctgagaatgtgctctacgattatgaacctcctgagcctggccaatgaggactccgtccctggagcggatgactttgttcctgtgttggtgtttgtgttgataaaggcaaatccaccctgtttgctgtctactgtgcagtatatcagtagcttttatgctagctgtctgtctggagaggagtcctattggtggatgcagttcacagcagcagtagaattcattaaaaccatcgatgaccgaaagtgaccaagaccaaggcccaccaaggcagcagactgttaatcagacaaacagatctctgagaaggtgcatcagctgtttgaaggctgaagattgttttgtatgatactgcacagcatcaggcattttaaagcagatctttactaaacaggttaatgagctaacaagcaggttctctcgtctttgggctctttcctttctgagttgcatattctattttcttgtccccaagtagagactagtactacaaaaagggaccacatttttcaagtatttctaagtataaaaaacaaaacaaaaatctcttaggaaatgtctagacctccattcttggattccctttctttccttttattttaaaaaagaacagtacccctcttttaagatgctgtcttacattaatgagcatctaatggaaagaaggtatgagttgcactgaggattagaatagtggtgcgttagtggcattatctataaatacactcacctaaattgaaagctaagaaggaaatgtaaatataatatatatttatatttgatgtaatatggacatctgcagattctaataaacaaggactattgctgatagtaggctgtgacatactgtcttgtgaaatggtttccttgacaaaatttaagctgagcttaaaagcaaaaaacaaaaagtacacagaaatatttattaaaatgtaatacagtttattgaactttctaggtatggagtttgatggacagggctgcctttaatgagtgtgaaggtcactaagtcacttagacatctcaccgtggaagtttgtgagcctgcattaggagatagactgattaccatacatgacataaaaaggaacagtggatagctcatactttatggtggttcttctcctccgaaataatatactgcagaaatcccagacagagctccttacaaacctttaattgtaatatatttttgatgattattcacattgaatgcacagaccaagaattcagtgaatgtcattttttaaaaaactaatttgtattgtctgctctagtgatacaagttttactagtgataaactattttaatcaaccatactattcttatggaaaaaaatatctattttggcaagtttctgtgcctttatttccctcttctgaaaaaaagtctgtgttttcatagtttggtttgcattgtatatcaataattaatcaggaatgggttttggtgcctgaaaaattggccatggaggcacaccaaagcttcaagcacaagtcttgtacatgggccatcactgtctggtttcacttcgtgtgtttcctaaacacatttagctgcttttttaacaaactcagccccatacttgagtcccttgttgttgggagcatttccaggcatcttttaagggaactgtgacaaacagcctcgggcagatgaacacggaggctctctgttgtctgtctctgagatctttgtgtctgggaatgcctaaagattttatttttttttctttgtttttattttattttattttatttctttgagacagagtctcaccctgttgcccaggctggagtgcaatggtgcgatcttggctcactgcaacctccacctcccagttcaagtgattcccctgcctcagcctcccgagtagctaggactacaggcgcatgtcaccaagcccggctaatttttgtatttttagtagaaacggggtttcaccatgttggccaggatgatcctcaatctcctgacctcgtgatccacccgccttggcctcccaaagtgcgggattacaagcgtgaaccaccctgcccagccagaaactagattttctttatgcctccaccccttcttattcatttactttacaataccaaaataacaaattgcataggagtgtgggatgtggtttctgccttctagagagagatcagaattaaactagtactatgaaatgtccttttgaatgttaggtcaagaaatccatgtacagagtcgtgcacttcattggctgtaactgtcaaacttgccttgtattagaagttaaatcccatcgtaaatacatcacgaggccagctgtgtgatttctgagacctagatgagagtccatttacttcagcctttgattcagtaaatgttaagcagcagaagacttcgaatggttgaaattcattgttacaggatttaactcataaaccaatgagagatttttttttttctctgcaatggttgctaagtctattccatgttaacactgtggaaataaatatgaagatgtggacattg

SEQ ID NO: 15807 - protein, 823 aa, Homo sapiens [sequence omitted]

SEQ ID NO: 15808 - DNA, 6304 bp, Homo sapiens
  CDS (4377)..(5381)
tgaagaacatttatgaatctcttgatgaagttactataaaagacactttggaaggtgataacatgtatacttgttctcattgtgggaagaaagtacgagctgaaaaaagggcatgttttaagaaattgcctcgcattttgagtttcaatactatgagatacacatttaatatggtcacgatgatgaaagagaaagtgaatacacacttttccttcccattacgtttggacatgacgccctatacagaagattttcttatgggaaagagtgagaggaaagaaggttttaaagaagtcagtgatcattcaaaagactcagagagctatgaatatgacttgataggagtgactgttcacacaggaacggcagatggtggacactattatagctttatcagagatatagtaaatccccatgcttataaaaacaataaatggtatctttttaatgatgctgaggtaaaaccttttgattctgctcaacttgcatctgaatgttttggtggagagatgacgaccaagacctatgattctgttacagataaatttatggacttctcttttgaaaagacacacagtgcatatatgctgttttacaaacgcatggaaccagaggaagaaaatggcagagaatacaaatttgatgtttcgtcagagttactagagtggatttggcatgataacatgcagtttcttcaagacaaaaacatttttgaacatacatattttgggtaagtttggtaaatttcatagtagatattttacacattttaaaaaaatcttacgtgtgaattttaaatgattatttttaaattctagatttatgtggcaattgtgtagttgtattcccagtacataaccagatcctaaagctgtgtccttaatgacagcaaaggtaataaatatatgaacttaaaataattctgtcaaaatttactactttaaaatgattgaagcttttttgctttatcttttcttacagttaagcacttcctttgtcctagagacatttattcattctaaagaaaagcccacgatgcttcagtggattgaactgttgacgaaacagtttaataatagtcaggcagcttgtgagtggtttttagatcgtatggctgatgacgactggtggccaatgcagatactaattaagtgccctaatcaaattgtgagacagatgtttcagcgtttgtgtatccatgtgattcagaggctgagacctgtgcatgctcatctctatttgcagccaggaatggaagatgggtcagatgatatggatatctcagtagaagatattggtggtcgttcatgtgtcactcgctttgtgagaaccctgttattaattatggaacatggtgtaaaacctcacagtaacatcttacagagtattttgccttcctttacgaatttgcaaaaatgggtgaagaagagagccaatttttgctttcattgcaagctatatctacaatggtacatttttacatgggaacaaaaggatctgaaaatcctcaagttgaagtgttatcagaggaagaaggggaagaagaagaggaggaagaagatatcctctctctggcagaagaaaaatacaggccagctgcccttgaaaagatgatagctttagttgctcttttggttgaacagtctcgatcagaaaggcatttgacattatcacagactgacatggcagcattaacaggaggaaagggatttcccttcttgtttcaacatattcatgatggcatcaatataagacaaacttgtaatctgattttcagcctgtgtcgatacaataatcgacttgcagaacatattgtatctatgcttttcacatcaatagcaaagttgactcctgaggcagccaatcctttctttaagttgttgactatgctaatggagtttgctggtggacctccaggaatgcctccctttgcatcttatattctgcagaggatatgggaggtgattgaatacaatccttctcagtgtctagattggttggcagtgcagacaccccgaaataaactggcacacagctgggtcttacagaatatggaaaactgggtcgagcggtttcttttggctcacaattatcctagagtgaggacttgcagtagaagaactgtttaacctgatgcagctgtttatagctcagaggccagatatgagagaagaagaattagaagatattaaacagttcaagaaaacaaccataagttgttacttacgttgcttagatggccgctcctgctggactactttaataagtgccttcagaatactattagaatctgatgaagacagacttcttgttgtatttaatcgaggattgattctaatgacagaggtaaatattctattgcattttactgtggatattatctcattttaatgttctcaccaagacttactttatagacatttagagtttatggtaaactgttttacaggtggcaaggttttaattatatagatcagtaaacctgaatttatatcccaagaataattaggtcataatttttagggtgctgttcctttttccatagtaattccatacttttcccattattttgtatctagaacagccatttgaaatagactagttttattcatttgtagggacaaaaatgagatacatgtgatttcattaagggcacacataatttcccaaaagcctacttatttgacagtatagaaactgaggttaccattgtgaacccggaaaatctgagacaggtctcagttaatttagaaagtttattttgccaaggttgaggacgcgcccgtgacacagcctcaggaagtcctgatggcacgtgcccaaggtggttgggacacagcttgattttatacattttagggagacatgagacatcaatctgtatgtaggaagtacattagctctgtccagaaaggcagagacaacccaaagcaaggcctctccttcctctggggccttcctggtcacaggtatgtgagagacagatggttgcgttcttttgagtttctgataagtctttccaaaggaggcaatcagaatatgcatctatctgggtgagcagagggatgactttgaatagtatgagaggccgatttgccctgagcggttcccagcttgaaggggcccaagatattttcctttcacaccatcctcagaggaaaccagaaggactattacagggttaaaatcagctgtttatgcttcctataattcttgaacatccacaagtatgagatggctgcagagtcaccagaggtacgtgagccctttagtctgataaacatgccaagagtaccataagaattcacaggtaggatgttttttcagttaatgataataaaaaataagagaacaggtttgcactttgaagaatgtggatttgcaaaggtaagggggaatacatttagataaatgacaataagcactgaggcaaagaaatattggttatgtttgaggaaggctaagtattaaaaaaaaggtaggtgaagaggagtagtaagaatttcattctttaaaatgcaacagatgtttatgctgctttggttgtatttttagaaaaaaaaaatttttttttaatgcaacagatgtttaaatgtctacctctgtgccaagcactgtggtaggtactagggacacagcagtgaacaagacatactggtttctgtccccacagcttacaagttacatactgtacaagtacattgttcatattaggtactgctgcaggttctgggctaagaattttaacatttgaactgtgggtattacagtgtgtaagctgtagtgaactggtggaagaggattcaaagaagggtgctgtatagtaaaataggaaaaaaactaaggtcttaattaagctaatacagttaaaggaattaaaagatttaacaagccaatataaaggaaatgaattcctaccttttgcagctctttttacctctttcaggcctactcttttgagtatggctgacagtcactttaccattgtctttggacagagaccctggaaagttggttaaagcagttgcctattctccctaatcttttgtgacctactgctttgtaattttgaagacttaacaatcttagagcaagtacttttttaaaaaaatgtgattaaactatttcttcagactagaatatacacacaaaatagcagagctctgaaggtgaggaatgtttaaaagagcttaatgagagtttaacttcaggatagaaagcaaatacgtttgctttgcacacatgtgcacacacagtctgagtctgaaaacatccatcgtagaggacgagtactaccattttgtggctcagtaagcaaaaatgaaattaagttttcaattttttcaaaacatttgtagtctttcaacactttgcacatgatgtatcacgaagctacagcttgccatgtgactggagatttagtagaacttctgtcaatatttctttcggttttgaagtctacacgcccttatcttcagagaaaagatgtgaaacaagcattaatccagtggcaggagcgaattgaatttgcccataaactgttaactcttcttaattcctatagtcctccagaacttagaaatgcctgtatagatgtcctcaaggaacttgtacttttgagtccccatgattttcttcatactctggttccctttctacaacacaaccattgtacttaccatcacagtaatataccaatgtctcttggaccttatttcccttgtcgagaaaatatcaagctaataggagggaaaagcaatattcggcctccgcgccctgaactcaatatgtgcctcttgcccacaatggtggaaaccagtaagggcaaagatgacgtttatgatcgtatgctgctagactacttcttttcttatcatcagttcatccatctattatgccgagttgcaatcaactgtgaaaaatttactgaaacattagttaagctgagtgtcctagttgcctatgaaggtttgccacttcatcttgcactgttccccaaactttggactgagctatgccagactcagtctgctatgtcaaaaaactgcatcaagcttttgtgtgaagatcctgttttcgcagaatatattaaatgtatcctaatggatgaaagaacttttttaaacaacaacattgtctacacgttcatgacacatttccttctaaaggttcaaagtcaagtgttttctgaagcaaactgtgccaatttgatcagcactcttattacagacttgataagccagtatcagaacctacagtctgatttctccaaccgagttgaaatttccaaagcaagtgcttctttaaatggggtaagaactatgcagaggcggcggcacacacttttaaactgtccttcagttaactgtgtggccttcatatgattttactctcgtaactttaacttactgattcaaactcttaagccatgtgcgacaaaaaaacaagttttaaatacacgtttactatgccttgtatgtacacagcacactctatcaccttggaagctacaagctggtatcattaaatgctgaaaggtaataaagggaacatcttagtggtcttatctctacttgggtatatttttggaaacaatacttgtgatgtttctattactgcctatggctcctatgtaactgaaacaattaatgatctactgatttaaaaaaggcagttaaatctagagcattagttgccttgtgcagactcccatgacagccatgtcctagaataatggaacactctggaaatgggctagaatgttgagcagcagcctcccaaatcacagtatgcataaaagccaaaacagatgacagagctcagtaaggaagaccttactatttgtgacatccatcagaattttaacttgagaaactgatttcaaggtttgtttttaaaattcttatatttccttttccatttttcagaaaacactatttcaggctttggtctgacttactggttcgtgggcataaaataatgctattagtgactttaagaactaatgaggctgggcacggtggctcatgcctgcaatccaagcattttgggaggtcgaggccggtggataacgaggtcaggagattgagaccatcctggccaacatggtgaaaccctgtctctactaaaatagaaaaaattaagccaggcgtggtggcgggcgcctgtagtcccagctacttgggaggctgagggaggggaatcgcttgaacccgggtggtggaggttgcagcgagccgagattacaccactgcactccagccttgccaaagaacaagactccatctcaaaaaaaaacaaaaac

SEQ ID NO: 15809 - protein, 335 aa, Homo sapiens
MMYHEATACHVTGDLVELLSIFLSVLKSTRPYLQRKDVKQALIQWQERIEFAHKLLTLLNSYSPPELRNACIDVLKELVLLSPHDFLHTLVPFLQHNHCTYHHSNIPMSLGPYFPCRENIKLIGGKSNIRPPRPELNMCLLPTMVETSKGKDDVYDRMLLDYFFSYHQFIHLLCRVAINCEKFTETLVKLSVLVAYEGLPLHLALFPKLWTELCQTQSAMSKNCIKLLCEDPVFAEYIKCILMDERTFLNNNIVYTFMTHFLLKVQSQVFSEANCANLISTLITDLISQYQNLQSDFSNRVEISKASASLNGVRTMQRRRHTLLNCPSVNCVAFI

SEQ ID NO: 15810 - DNA, 5124 bp, Homo sapiens
  CDS (119)..(4066)
cactgatggatattccaatgggggagaccctagaccaattgcagcgtcactgcgagattcaggagtggagatcttcacttttggcatatggcaagggaacattcgagagctgaatgacatggcttccaccccaaaggaggagcactgttacctgctacacagttttgaagaatttgaggctttagctcgccgggcattgcatgaagatctaccttctgggagttttattcaagatgatatggtccactgctcatatctttgtgatgaaggcaaggactgctgtgaccgaatgggaagctgcaaatgtgggacacacacaggccattttgagtgcatctgtgaaaaggggtattacgggaaaggtctgcagtatgaatgcacagcttgcccatcggggacatacaaacctgaaggctcaccaggaggaatcagcagttgcattccatgtcctgatgaaaatcacacctctccacctggaagcacatcccctgaagactgtgtctgcagagagggatacagggcatctggccagacctgtgaacttgtccactgccctgccctgaagcctcccgaaaatggttactttatccaaaacacttgcaacaaccacttcaatgcagcctgtggggtccgatgtcaccctggatttgatcttgtgggaagcagcatcatcttatgtctacccaatggtttgtggtccggtttagagagctactgcagagtaagaacatgtcctcatctccgccagccgaaacatggccacatcagctgttctacaagggaaatgttatataagacaacatgtttggttgcctgtgatgaagggtacagactagaaggcagtgataagcttacttgtcaaggaaacagccagtgggatgggccagaaccccggtgtgtggagcgccactgttccacctttcagatgcccaaagatgtcatcatatccccccacaactgtggcaagcagccagccaaatttgggacgatctgctatgtaagttgccgccaagggttcattttatctggagtcaaagaaatgctgagatgtaccacttctggaaaatggaatgtcggagttcaggcagctgtgtgtaaagacgtggaggctcctcaaatcaactgtcctaaggacatagaggctaagactctggaacagcaagattctgccaatgttacctggcagattccaacagctaaagacaactctggtgaaaaggtgtcagtccacgttcatccagctttcaccccaccttaccttttcccaattggagatgttgctatcgtatacacggcaactgacctatccggcaaccaggccagctgcattttccatatcaaggttattgatgcagaaccacctgtcatagactggtgcagatctccacctcccgtccaggtctcggagaaggtacatgccgcaagctgggatgagcctcagttctcagacaactcaggggctgaattggtcattaccagaagtcatacacaaggagaccttttccctcaaggggagactatagtacagtatacggccactgacccctcaggcaataacaggacatgtgatatccatattgtcataaaaggttctccctgtgaaattccattcacacctgtaaatggggattttatatgcactccagataatactggagtcaactgtacattaacttgcttggagggctatgatttcacagaagggtctactgacaagtattattgtgcttatgaagatggcgtctggaaaccaacatataccactgaatggccagactgtgccaaaaaacgttttgcaaaccacgggttcaagtcctttgagatgttctacaaagcagctcgttgtgatgacacagatctgatgaagaagttttctgaagcatttgagacgaccctgggaaaaatggtcccatcattttgtagtgatgcagaggacattgactggagactggaggagaacctgaccaaaaaatattgcctagaatataattatgactatgaaaatggctttgcaattggaccaggtggctggggtgcagctaataggctggattactcttacgatgacttcctggacactgtgcaagaaacagccacaagcatcggcaatgccaagtcctcacggattaaaagaagtgccccattatctgactataaaattaagttaatttttaacatcacagctagtgtgccattacccgatgaaagaaatgatacccttgaatgggaaaatcagcaacgactccttcagacattggaaactatcacaaataaactgaaaaggactctcaacaaagaccccatgtattcctttcagcttgcatcagaaatacttatagccgacagcaattcattaggaacaaaaaaggcttcccccttctgcagaccaggctcagtgctgagagggcgtatgtgtgtcaattgccctttgggaacctattataatctggaacatttcacctgtgaaagctgccggatcggatcctatcaagatgaagaagggcaacttgagtgcaagctttgcccctctgggatgtacacggaatatatccattcaagaaacatctctgattgtaaagctcagtgtaaacaaggcacctactcatgcagtggacttgagacttgtgaatcgtgtccactgggcacttatcagccaaaatttggttcccggagctgcctctcgtgtccagaaaacacctcaactgtgaaaagaggagccgtgaacatttctgcatgtggagttccttgtccagaaggaaaattctcgcgttctgggttaatgccctgtcacccatgtcctcgtgactattaccaacctaatgcagggaaggccttctgcctggcctgtcccttttatggaactaccccattcgctggttccagatccatcacagaatgttcaagttttagttcaactttctcagcggcagaggaaagtgtggtgccccctgcctctcttggacatattaaaaagaggcatgaaatcagcagtcaggttttccatgaatgcttctttaacccttgccacaatagtggaacctgccagcaacttgggcgtggttatgtttgtctctgtccacttggatatacaggcttaaagtgtgaaacagacatcgatgagtgcagcccactgccttgcctcaacaatggagtttgtaaagacctagttggggaattcatttgtgagtgcccatcaggttacacaggtcagcggtgtgaagaaaatataaatgagtgtagctccagtccttgtttaaataaaggaatctgtgttgatggtgtggctggctatcgttgcacatgtgtgaaaggatttgtaggcctgcattgtgaaacagaagtcaatgaatgccagtcaaacccatgcttaaataatgcagtctgtgaagaccaggttgggggattcttgtgcaaatgcccacctggatttttgggtacccgatgtggaaagaacgtcgatgagtgtctcagtcagccatgcaaaaatggagctacctgtaaagacggtgccaatagcttcagatgcctgtgtgcagctggcttcacaggatcacactgtgaattgaacatcaatgaatgtcagtctaatccatgtagaaatcaggccacctgtgtggatgaattaaattcatacagttgtaaatgtcagccaggattttcaggcaaaaggtgtgaaacagaacagtctacaggctttaacctggattttgaagtttctggcatctatggatatgtcatgctagttggcatgctcccatctctccatgctctaacctgtaccttctggatgaaatcctctgacgacatgaactatggaacaccaatctcctatgcagttgataacggcagcgacaataccttgctcctgactgattataacggctgggttctttatgtgaatggcagggaaaagataacaaactgtccctcggtgaatgatggcagatggcatcatattgcaatcacttggacaagtgccaatggcatctggaaagtctatatcgatgggaaattatctgacggtggtgctggcctctctgttggtttgcccatacctggtatgttttaacaaaatgagtataattctgttggactctagaggtgatgctgcttaaatggacatcaggtttgctagcattgttgttcttggtttcaaacaaagattaacagctatctctctcatttcctactccctgattatcctaactgtgggttattagaagcttttttcctaagtaagctgtttgcctctctgtgtgagaaatgcctttgaagatctacattaagactaccaagaagcatgctgaactagcagctggttgctaaactgtcttctaaggagattaattactggtattttttgtttattttaaggattgttttgttttgtaatcagtatataagcaggaccactgctatccatcttttatggcccttttcaaatagatcttggcttgtcttctaaaaaatactttttaataaatatcccaggagttttagtttgaagaattgcaaactaaatttcattaggtgacccaggttctcagcattgtacatggcaataagcttgttctatctggatacatctatagaagtatatgcatatgacattattttttactttgctcatttgtttcaggtatactaaaagaaaattaaatagacaaaaatgaattaaagtattagaaactgactaatacattctagaagtaagttgtatgaaactaggatacgtatactaataaatatagcacaaaaatactaaacttcataaaaatgcggtgagatgacccttgcgaagcctcaaatacaatacttattttatttattagaaattattggccaggtacggtggctcacgcctgtaatcccagcactttggaaggctgaggagggtggatcacgaggtcaggagttggagaccgccctggacaatatggtgaagccctatctctactaaaaacgcacagaaaaattagccaggcatggtggtagatgcctgtaattccagctactcaggaggctgaggcaggagaatcgcttgaacccaggaggcgaagattgccgtgagccgagatcatgccactgcactccagcctgggcaatggagagaggctctgtctc

SEQ ID NO: 15811 - protein, 1316 aa, Homo sapiens
MASTPKEEHCYLLHSFEEFEALARRALHEDLPSGSFIQDDMVHCSYLCDEGKDCCDRMGSCKCGTHTGHFECICEKGYYGKGLQYECTACPSGTYKPEGSPGGISSCIPCPDENHTSPPGSTSPEDCVCREGYRASGQTCELVHCPALKPPENGYFIQNTCNNHFNAACGVRCHPGFDLVGSSIILCLPNGLWSGLESYCRVRTCPHLRQPKHGHISCSTREMLYKTTCLVACDEGYRLEGSDKLTCQGNSQWDGPEPRCVERHCSTFQMPKDVIISPHNCGKQPAKFGTICYVSCRQGFILSGVKEMLRCTTSGKWNVGVQAAVCKDVEAPQINCPKDIEAKTLEQQDSANVTWQIPTAKDNSGEKVSVHVHPAFTPPYLFPIGDVAIVYTATDLSGNQASCIFHIKVIDAEPPVIDWCRSPPPVQVSEKVHAASWDEPQFSDNSGAELVITRSHTQGDLFPQGETIVQYTATDPSGNNRTCDIHIVIKGSPCEIPFTPVNGDFICTPDNTGVNCTLTCLEGYDFTEGSTDKYYCAYEDGVWKPTYTTEWPDCAKKRFANHGFKSFEMFYKAARCDDTDLMKKFSEAFETTLGKMVPSFCSDAEDIDWRLEENLTKKYCLEYNYDYENGFAIGPGGWGAANRLDYSYDDFLDTVQETATSIGNAKSSRIKRSAPLSDYKIKLIFNITASVPLPDERNDTLEWENQQRLLQTLETITNKLKRTLNKDPMYSFQLASEILIADSNSLGTKKASPFCRPGSVLRGRMCVNCPLGTYYNLEHFTCESCRIGSYQDEEGQLECKLCPSGMYTEYIHSRNISDCKAQCKQGTYSCSGLETCESCPLGTYQPKFGSRSCLSCPENTSTVKRGAVNISACGVPCPEGKFSRSGLMPCHPCPRDYYQPNAGKAFCLACPFYGTTPFAGSRSITECSSFSSTFSAAEESVVPPASLGHIKKRHEISSQVFHECFFNPCHNSGTCQQLGRGYVCLCPLGYTGLKCETDIDECSPLPCLNNGVCKDLVGEFICECPSGYTGQRCEENINECSSSPCLNKGICVDGVAGYRCTCVKGFVGLHCETEVNECQSNPCLNNAVCEDQVGGFLCKCPPGFLGTRCGKNVDECLSQPCKNGATCKDGANSFRCLCAAGFTGSHCELNINECQSNPCRNQATCVDELNSYSCKCQPGFSGKRCETEQSTGFNLDFEVSGIYGYVMLVGMLPSLHALTCTFWMKSSDDMNYGTPISYAVDNGSDNTLLLTDYNGWVLYVNGREKITNCPSVNDGRWHHIAITWTSANGIWKVYIDGKLSDGGAGLSVGLPIPGMF

SEQ ID NO: 15812 - DNA, 5524 bp, Homo sapiens
  CDS (163)..(480)
ctttatcgctttcagatttggaggccaatcactgccaccttttatttccctgtgggtccaggaactggatttctttatttggtcaatttatatttcttatatcagtattctacgcgacttgaaacaggagcttttgatgggaggccagcagactatttattcatgctcctctttaactggatttgcatcgtgattactggcttagcaatggatatgcagttgctgatgattcctctgatcatgtcagtactttatgtctgggcccagctgaacagagacatgattgtatcattttggtttggaacacgatttaaggcctgctatttaccctgggttatccttggattcaactatatcatcggaggctcggtaatcaatgagcttattggaaatctggttggacatctttattttttcctaatgttcagatacccaatggacttgggaggaagaaattttctatccacacctcagtttttgtaagtgtttttgtcctgtctcatctaacattttactgcctgtgttcttagtgcatcctaatgagagctccatgaggagtatgatttacccctatgccccatctgctggagaaacctgaggcaacaagtgacttaccctagtcacacagtcacaggaagttagggattaaagcttaggctcagttgccttcctgttactcttttagccagggaccactgacaactagattccaacattacaggaggcatctcagctctctgagcctgctgagggacctgatgcaactccagagtgcgaaacagtaggctggtgaatgggcagagtcacaggttagtggggtgtcttttcttggcccatcagtttttacccatgattttgcccaaggaagggtaagttagcgtgttggtcagcaattttaaacatttttatattaaatactatggagtagacattttacaggactgttcagagttaaaatgagagacttgaggtttgtataggcccaaccccctgggagtttgtgctctttatctgcttttagggtttactgaagtgggctggtaagggcaacagctttgatttttgagacaaacttggatttgaatcccagtcccctcagatagcagtttttatactgggaaagttacttaatcaaacctccaagcttcagtttgcaagcctgtaaattgtgggagaagcccctgtctcacaggactgcatgagctaagatacactgttgggaagcacagtagcgggttctcggtaagtaaagctagctgccatattcctaaaggtgggggtaggagagcaggattttgacgatctgagaggagacgcgcacacacccagaagcatgtaatagtcgtgtgaccgttctgtctgtgaggcaaaaggctgtcgaagaacgggccagttaaatcaccatctgggtgtcacagcctgcctgacaatcatgcctaatctcatatcagggatatgcagtaatagcttgcatttgaaagctttaaaaaaacaaacaaaccaaacccttccacatcttgctaattttaatgttttgcagttctgtcattcctctaagggatcagtgagggcagtaaaacttgagcaggcctcctctttctccccttccttttatagggtaggggtatgtttttcaaagacttttcaaattgtgaactgtaatatacagagatataccatattggtggttgtggtgtgtgtgtttttctttaagagaataaaaagaaacttgtttctcttctgagccttgaattgccttcaggctaaaaaaacaaatgaccaatctggtttctaattatcaaaggacataataacagcaggtttggctttctgatctaggtttatcaagtaggatggcagatgcatcaattaaaaaaagcttggtgcttttggggggcagccaacagttactttactttaaatggccatattctaacttaacggcttgtagctacttctcagttgtgggcaacacaggatacaagattctagtggcaaaatcagcgagccctggagcctgccttccacttgaactttctctgttgggggaagtccttctgctaaattttgcataaagatcagatgacaaaatacagctccttgcaaaagcagtaactgctttgaaattaccataaatttttgttgattatgtataattgggtatctttttatactaattatttgcatttaatttcactatctacttaagcagtggagatggcttccatattgtcttagagtgagtagcaaagcaagacagccctagcattttctccagcaagtgttctattttattatgtactttggaggaatattattgtaccagaaggcatggatgttgagaaaccagcacttggaaaatacatttgatttaatggtaaagctgtatttgtttaaaatggaggaggtgagtataggaaggtataacagcttttctaaatggaatgctgatacatttgtatcaccattttccattccatttagagtagttatatcttctctgtacacactaaattttgtgtttaaaaggggtttttggccaggcgtggttgctcacgtcggtaatcccagcattttgggaggccgacgggtggatcacgaggtcaggagatcgagaccatcctggctaacatggtgaaaccctggctccactaaaaatacaaaaattagctggacatggtagcgggcgcctgttgtcccagctactcgggaggctgaggcaggagaattgcttgaacccgggaggtggaggttgcagtgagctgagatcatgctactgcactccagcctggtgacagagtgagactccgtctcaaaaaaaaacaaaaaaacaaaaacccgagttgttgtctgttttgggaagaggcatgaaggtatcgagtatgatgtaaacagactccagtcactgactgctgtcccttcccaggcaggatgcatgtagtataacaagtagtgcagggcgcaggctctggaaccaggctgactaggttggaatcctgtcactttcgaagcgcttcactcagtgttggctcaattttcttgtttataaaacaggagtaatagtaatgcctacctcatggggttattgtgaagatcagatgaatttataagcaggcagcacctagtgtaaggcaataatcactgagtaaattcacatagtaactgctctagtataaggtcaagtataaagcctgtcctcttcagggtttctgctgtggacaagtcacctgtcatgacttactcttgctgccaagaagggtttaagcggaggtatcagatcatgctctctgccttcaagcaaaattttaaacattaggatctgctaagtggaataggtttaaacacattctcagtttactaataaaagagtcaaagatgggaaatagttggaaaatactattgagagtgtaggcttgggtttaagttctcttagttgttctgtgaactcttagtttattaattttaaggtgggaaatcatctaaccgtctggggccccagctctcccaccatctgtgagaagggaagaatgtacctggaaggcagattctgaataaattttaaaacatacccatacttccaacatagaaagccttcttcccctgtctccttggatgggctcagctgagagccttttagaaatgctgtgcaaggctcaaacatgcaggctgtggatttggcctttgaaagtgaatgtattttgtatcctttgatccagtttgagccatatttagatataccaagatgctatcagtcattctttggttgctgggcttgtgggtgtaatatttttgtttccatactgttctgcatggattacttttataagcagagaaaaaaacgttcagagtgtgaatttagctgaaatctgaatacatttaagaaacatgaaaaacgaatgccgtctgtggtcaggtcatggggctgagtacagaaaagacaaagttaaataagacgtccctcgctgccttcaacatgacaagtgccatgggaacagcaggagagggaggtgttctcggaggtcagataactatgtggaagtgactttgttctcttctctccgtttgtgtccccgtctttctgcaccaggtaccgctggctgcccagtaggagaggaggagtatcaggatttggtgtgccccctgctagcatgaggcgagctgctgatcagaatggcggaggcgggagacacaactggggccagggctttcgacttggagaccagtgaaggggcggcctcgggcagccgcccctctcaagccacatttcctcccagtgctgggtgcgcttaacaactgcgttctggctaacactgttggacctgacccacactgaatgtagtctttcagtacgagacaaagtttcttaaatcccgaagaaaaatataagtgttccacaagtttcacgattctcattcaagtccttactgctgtgaagaacaaataccaactgtgcaaattgcaaaactgactacattttttggtgtcttctcttctcccctttccgtctgaataatgggttttagcgggtcctagtctgctggcattgagctggggctgggtcaccaaacccttcccaaaaggacccttatctctttcttgcacacatgcctctctcccacttttcccaacccccacatttgcaactagaagaggttgcccataaaattgctctgcccttgacaggttctgttatttattgacttttgccaaggcttggtcacaacaatcatattcacgtaattttccccctttggtggcagaactgtagcaatagggggagaagacaagcagcggatgaagcgttttctcagcttttggaattgcttcgacctgacatccgttgtaaccgtttgccacttcttcagatatttttataaaaaagtaccactgagtcagtgagggccacagattggtattaatgagatacgagggttgttgctgggtgtttgtttcctgagctaagtgatcaagactgtagtggagttgcagctaacatgggttaggtttaaaccatgggggatgcaacccctttgcgtttcatatgtaggcctactggctttgtgtagctggagtagttgggttgctttgtgttaggaggatccagatcatgttggctacagggagatgctctctttgagaggctcctgggcattgattccatttcaatctcattctggatatgtgttcattgagtaaaggaggagagaccctcatacgctatttaaatgtcacttttttgcctatcccccgttttttggtcatgtttcaattaattgtgaggaaggcgcagctcctctctgcacgtagatcattttttaaagctaatgtaagcacatctaagggaataacatgatttaaggttgaaatggctttagaatcatttgggtttgagggtgtgttattttgagtcatgaatgtacaagctctgtgaatcagaccagcttaaatacccacacctttttttcgtaggtgggcttttcctatcagagcttggctcataaccaaataaagttttttgaaggcc

SEQ ID NO: 15813 - protein, 106 aa, Homo sapiens
MLLFNWICIVITGLAMDMQLLMIPLIMSVLYVWAQLNRDMIVSFWFGTRFKACYLPWVILGFNYIIGGSVINELIGNLVGHLYFFLMFRYPMDLGGRNFLSTPQFL

SEQ ID NO: 15814 - DNA, 5124 bp, Homo sapiens
  CDS (2504)..(2836)
tactcaccagctcaaaacctgactcatctcccgtcaccccacccacagacccagccgatgactcctcttcctttgaccccgtggattttctccctcctcgacagcatcatgatcctccaccagagcatcatgatcctccaccgtatgtccctgctccggctctacccctctcccccactctctccaaccaacccacttctgactctgagacctctctgcctcctcccctcacccgctctcgggcccaatgtgctcagcaaccagctcccttgcttcctctccgggaagtagcgggagttgaggggatcgtccatgtccacgtccctttctccttctacgatctcttacagattgaagaacgtctcgggtccttctcctccgatcctgatacttacatcaaagaatttaaatatcttactcaatcttatgaactcacttggcatgatctctactttatcctctcttctaccctccttccagaagagaaggaaagagtgtggctcgcagcacaggcatatgccgacgaccttcatcagcaggatcctactaagcccgtaggagctgctgctgttccctgggaagagccttcctgggaataccaacccacagaacctggccaagtgtactgtagccatatgattacttgcctcattgcaggccttaacaaagctgcccataggctgtaaattttgaaaaacttaaagacatttcccaaaaggcagatgaaaatcctgcccaatctctttcccgccttacagaagctctccaaaaatatacccgcatcgaccctgcctcctgagaaggaactattgttctttctttaaaaaattttatttattttttaattattattatactttaagttttagggtacatgtgcacaatgtgcaggtttgttacatatgtaggaactattgttcttaatacccattttatttcccaatctgcccctgacatccggcacaaacttaaaaaggctgaagatggctctcaaaccccacaacaagacctccttaacctggctttcaaagtctttaataacagggacgagcaaaataaattagataaagcccaaagagatcgtgctaaataccagcttccagcagtggctatctgtcagtctagccatagtacccaagggcacaaaagacctgatagcagcaaacctcctgggccttgttttaagtgcggcaaagaaggccactggacgggggcatgtccccacccatgagtgccgaagagcccttgcctagtctgccagcagatgggcactggaagtctgactgtcctctcaacagatgggcagacaagcatgctcctcagagccaccatcccttcaacaagacaaaaagtgaagaatcacttgcactcccatagctccttggcctagccactgaagactgatgaagccagggcccctgggccccggctcccggcccccactgccatcactgcatcggagcccagggtaactctactagtagcaggtaagctgatctcttttttaattgatagtggggccacctactcagctttgcctgagttctcaggacccactcatccctctcaagtctcagttgtgggggttgacggactcatctcttgtccgcttgccaccagacctcttacttgttccctgtttgatgccattttctcacactctttccttatcatgcctcattgccccacccccattctaggctgagaccttttagccaaagtcaaagcttctatcaccttttcttgcccccttcaaccagagtcccctcctgctcctctccgctagtccggcccctgacccctttccccagtacccacttcctgcctctctcattaacccttccgtagctgctcaccatgaccccatcagaatccagttaaaagactcttccaaatttcccagcgttcctcaataccccatctctctaacccaccaaaagggcctacagcccatcgtaaacaagctctgctcatgcagtcttcttagaccaacacactctccatataacacccctatcctccctgttaaaaagtctgatggctcataccgactcgttcacaacctccaagccatcagtcaagctgtcctccctattcatcccatagtccataacccctatccacttctctctctcgtcgctaccaacaccaccctctacactgcaattgacctgaaggatgccttctttaccatttccctacaccctgattcccaaaacctatttgctttcacctggactgaccctgacaccctccagtcacaacaactcacatggactgtcctccctcagggcttcagggatagcccttctttggacaagctctagcccgaaacctcacttccttaaacctgtctcccagtcatcttcaatatgtggacgaccttcttctttgcagcccctctctaaaagactctcaaactcacacggccactgctctcttaaactttctcgctatcaaagggtatagggtctccccctccaaggcccaactctccatctccatgatgacttacttaggaattcaactttcccctggggcccaggctatgactccagccagggcagcattaatagaaaatctacccccaccctcctccaaaagcgaaatcctttccttcccagggctagcaggcttctttagaatatggatttccaactttgccctcctagctcatcccctctatgaagtggccaaaggccctcccaatgaacccctaaacccctcacataacatactccccagcttccacaaactccaaactgctcttgtcactgcgtcagctccgtccttacctgatatctcccaacctttcactctctatactgctgaaagctgaggaatagccctcggtgtcttaggacaacagaaaggaaatcctccttcctttgcccctgtagcttacctctctaaacaactagataacacagtcaaagggtggccagcctgctttaaagcactagaagtggtagccagcttagctctagaaagcaggaaactaactttcagccagaataccaccgtccacagttctcataatctacaagatctcctctcctcccaagcagtaagctcccttcctccttccaggattcaattactccatgccctctttataaaaaatcccaaattcagtcttaccagaagtgcttccctcaacccagcatccttactccccgtatcctcttcccttcctactcattcttccactgatatcctggaccacgtacagccacatttcccaaacacttcctccgagcctctcaccaaccccaatgatcaactattcatagatggctcctcttccaggcccaccagctaccccccagattgctggatatgcagttgtttcccttgaccaagtaattgaagccaggatcctcctcccaaaaagcagaactcatagctctcaccagggccctaaatctttccaaaggcaaacgagtcaacatttatacagactccaaatatgcctatcacattcctcgttcccacgctgctatctggcaaaagagaggactccttactgccaaaggaacccctatcactaatggccaccttatttactaactccttcaggccacacacctcccagctaaagcaggagttatacactgttgaggacatcgaacaggttcagatgaaatctcgaggcaacagaaaggccgatgaggcagcaaaagaagcctccctttcttctgcctctgcccctctccttcctgttatcccagcaatcctacccaagaactctcccaccgagaaagctttgctatacagcaaggagcctcctttcaaggggactggatagtcaaaaatcaaaagctcgtcctcccctaagagcagaccaaagaaattctgacatctcttcaccaatccttccatatcagtgtgcgcccccatacctactccttcaccctatttctcctccccccatctattcacctcactaagagacataacctcaaactgtcctatatgctctgttacttcctcccaaggggccctccactctccctccatccctacacatcccctcagaggaacactcccaggggaggactggcaaatagacttcacccacattcatcccgtcaagaggacaaaatttattcttactcttatagacaccttctctaggtgggtagaagcatttcctacctcttcagaaaaggccgcagaagtctcccaaattcttgtaacagaaatcatccctacatttggtctccctggctccatacaatcagacaatggcccctagcttcatctcccaaatcactcaacaggtttctcagtcccttggcatccagtggcgtctccatatcccatgctggccccagacatccggaaaagtcgaaagggcaaatgggatccttaaggctcagttgaccaaactcactcttgaagtccaaaaaccatggacctcccttttgcccatagcactggagagcattagagccagtccaaaagcaccctccttcctcagtccatttgagttaatatacggacgccctttcctcttacaaaacaggcccccttctaactctcagctaggagaatacctcccaacagtctccctcatgagctatctcctctgccaacaagccgaccaggccctcccaaaaccccacgaaggggtctccaatcccaaatagacttgctctccaattccaaaagactctttaagcagcagtgacacttcaaaaccatcgaggtttagatctcctcactgccgagaaaggcggcctgtgtatctttttagaagaggagtgctgtctctatactaaccagtcaggactagtacaagatgctgctggacgaataaatgaaaaagcttctggccgggtgcagtggctcacgcctgtaatcccagatctttgggaggctgaggcgggcggatcacgaggtcaggagatcgagaccatcttggctaacacggtgaaaccccgtctctactaaaaatagaaaaaattagccgggcgtggtggccggcagctgtactcccagctactcaggaggctgaggcaggagaatggcgtgtggggtgaacccgggaggcggagcttgcagtgaacagagatgatgccactgcactccagcctgggcgacagagcaagactccatctc

SEQ ID NO: 15815 - protein, 111 aa, Homo sapiens
MMTYLGIQLSPGAQAMTPARAALIENLPPPSSKSEILSFPGLAGFFRIWISNFALLAHPLYEVAKGPPNEPLNPSHNILPSFHKLQTALVTASAPSLPDISQPFTLYTAES

SEQ ID NO: 15816 - DNA, 5266 bp, Homo sapiens
  CDS (65)..(688)
catagcataccatttatcgggctcggcgcaggcccgcggggagcgcagcccggcggagagactgatggagaggcagaaacggaaggcggacatcgagaaagggctgcagttcattcagtcgacactacccctaaagcaagaagaatatgaggcctttctgctcaagctggtgcagaatctgtttgctgagggcaatgatctgttccgggagaaggactataagcaggctctggtgcagtacatggaagggctgaacgtggccgactacgctgcctctgaccaggtggccctgccccgggagctgctgtgcaagctgcatgtcaatagggccgcctgctacttcaccatgggcctgtatgagaaggcgctggaggacagcgagaaggcgctgggcctggacagtgagagtatccgggcgttgttccgcaaggcacgcgctctcaatgaactgggacgccacaaggaggcctacgagtgcagcagccggtgttccctcgccctgccccacgatgaaagcgtgactcagcttggtcaggagctggcccagaaactggggctgcgagttcgcaaggcgtataagaggccccaggaattggaaaccttttctctgctcagtaacggcactgcggctggcgtggcagatcaggtaggatcggggctgaaccaacctgtctcagtttatccgttatgagaggtttggattcactctctccgggtataaatgacctcaggcagtgggtccaggggcctccgcctccctaggaggtacctcccgtgtccacgggggcaggatgtggggacaggccatggctgctgttggcagggagtggtcattgccggggagccgccgggggcagcctcactcttgaaccctggccaggacacagtctgggcagcctggtcccacacgccttccttctgcctcctgccccacatttcctgctgtgttgccttttttctcaccagcctttctgcaggttcaggcccctgggcctcaaatgtcttcctcttccccaccctgcctttctctgtcttttcgcttttcaaagcccagctcaagggcatgcccctgccgtaacccatcctgctctccctggctcagtgactctgcttgggaggggcagccgagactgaggactctgacaaggaagagcccaactgggccctgcagccttggacaggtccttcagtttctgcattctgaaatgcggaccatccctcaacgggaacaagggaggaaagtgcttgataacctggcacacacgacccagcaggaaatgcagtgggcagtcactgtggatagctgctgtgctgtcctgagttggggactcctcccaagggccaagacacttgtgcaccccagtcaggcctggctcatcccagggggggtgaggcagggcctggcacacgactgagacccctgcccgctgctcaggtagactttgaggctttctggaaagtgagagatgggctataagagcactgatggagcctggggtcctgccaccttgtacattaagggaaactgaggcacagagtggggaggggacggggccagtgtcacacagcgaggcagcagcaggcctccctcctccagagctttgcagcactttctttcattcattccataaggaggcccacaaaacactctcggccctgggcctgagagagctgcgtccttgccctcagggacctcccagcctgcaaagtaggcagttgatgatctgcctttgtagcactcatggtttataatcagaaattataggtcaggcatggtggctcatgcctgtaatcccagcaatttgggaggccgaggtgggtgatcacttaatttcgggagttaaagaccagcctggccaacataatgaaaccccatccctgccaaaaatacaaaaattagccgggcatggtggcatgtgcctgtagttccagctacttgggaggctgaggcaggagaatcacttgaacccaggaggcacagtttgcagtgagccgagatcgcgccattacactccagcctgagagacagaatgagactccatctgaaaaataaaagaaattattaggcctggcacataccaggtgctccaacgagaaaacattaaatgaatgaaaggtgatttgtctaagtttacccagtatgggccaagcactgagcttggggttgggtatgtgataaacaaaacaaatctgtttcctgccctcaaagagctcacagtctaggatggacattaggacattaggcagatcatttctggtttcaaactgtgatgagggctgtgaaggcagagtatggggagacctgggccattgagactgggagccctgatttagacaggattcagtgacatttaagctgagaccggaaggttgaagagttaggggcagggtgtgcaggtgaaacagcattccagaccaggtggaaggtatgtgcaaaggccctgaggcctggaggagctcagagtgtgggaggaaccaacaccaaggcagagctgggggtcctggaacaggagatagaagccagaccgcttgacccctgataagaagctcagtcttagcattgggaaggcattgaggggaggcagcattaattctattcatttattcggaaggtatttattgagcactgctttgtacccagtgtcagttcagacactgggaatagagcaccaaggtagcgtctcatcacagcaagtggagctgggctgggcaggcacagcagatgctcaaaaaatatttgttgaatgattgaatgactgcggccagggggccacagcaaatatgggctgaatgcccagctctccagggccaaggccgcaaagccttgcttagtctgcagccagatgaccacagatggtgccatacctggcaccaggccccccccagtccctgccaggctgttcacccatccctgcaatcttgctgggctcctcctgcacattcatagaggtcaggaggggcatggttagggagggctctaagaagcccacagtggagaggaccagttcagaccctgcctcatgaactcagtttgcccaacatggtacagcacacatgtgagcacacacatgtgcacatgcacaaacggagtgccctaggacacatgagggcagggtggtgtcccagccagagcccctggccttccgtgagttgtgcacagacacaagtaaatgcaggctgcaggggtccctgtaggttctccaccatgagcaccatattcattcagccggctggtcatttcacatgtgcacctggaagtggggatggaccaggctgtgcccacagggagcttcttatgacctaggagccaggcagaggccctgcaagacagtgtctgtgcaagagctgtccctggcatcgtggggaacaagatgcaaggagggctgtgagttccaggaacagagagcccaaggcagccttggttggaaagggcttcagcgagccagggaagcaagactaagaggaagggagagctggagagggggaaatggcactcatgaccaggagcacagcctgcacaaaggctaagcagcaaaagagacagacaccccagatcacaagaccagttcctcctatggggctcggaatagcctgggctctgcagtggaacgtgcgttggatcagatcctgagcacgctccttatctacgcaggccactccacccctcagagccttggcttccttctcttttgcaggggtccggtacctgccattttgtgggggttatagaattacaatgggtcaatgtgaaagctcccagcagggcgtctgcagaagagatagagctccatagacctttgttgccaaacagatgtcaccagaaggagtgccatgcagaagggcaggaacagtgagcctggcaggctggggtgatggcatgggcaggagggctgagaaggtgactttgtcctgcgtggcctgggagccatgggcaggatctagcagggagaatcaccgctttccctagagatgttcatctggtacctctctttccctcaaagactttatgtacttaccatgaggatagcagctctgtgatccagcgtggcggccttggtttggcagccaatctatggtgggcagacactccggagactgaagtgcacacatttgccatgtgctctatggcaggctcaggtgtgggaaggaggtgcagggtgttggtgcaggtatggatgggggagtgtacagttccaggggacagagtcaggacaggctcttgggtcagacagccctgctctgatctgtgcatagcagctttctgggctgacatttccatgccgtgggatgatacctcgcagggcgcctggaccgagggctaaaccccacagtgggtgtgagatgctggcctgggctggcgtgaggcaggatgctggatgagtctagctgctggtcctgtggctgctggtcctgagaaaggaaggctagtggtggagtctggtcctccatccggctctccgtggggacacagaaagggtggggccacccagggcctcaccagggaagcaggacttgagctggactgtgaaggactcagagaaaaaggggagggtgttcaggacagggaaggatgcaccacagcctggaggttggagtgtgggaactgttgaacgaaacagcagctctcccagcccaacttccagaaactgtgcatctaatcaacacaggccgggcacggtggctcacgccagtaatcccagcacattgggaggccaaggcgggtggatcatttgaagtcaggagtttgagatcaacctggctaacatggtgaaaccccatctctactaaaaaattcaaaaattagctgggcgcggtggctcacacctataatcccagcactctgggaggccgaggcgggtggatcacgaggtcaggatatcgagaccatcctggctaacacggtgaaaccccatctctactaaaaatacaaaaaattagccaggcgtggtggcgggtgcctgtagtcccagctagtctggaggctgaggcaggagaatggcatgaacccaggaggcggagcttacagtgagctgagatcgtgccactgcactccagcctgggctacagagtgagactccatctcaaagaaaaaaaatatatatatatatattcaaaaattagctgggcatggtggcatgcttctgtaatcccagctactcaggaggccgagattagagaatcacttgaatgtgggagtcggaggttgtaatgagctgagatcacaccattgcactgcagcctgggtgaccaaacgagactccatctc

SEQ ID NO: 15817 - protein, 208 aa, Homo sapiens
MERQKRKADIEKGLQFIQSTLPLKQEEYEAFLLKLVQNLFAEGNDLFREKDYKQALVQYMEGLNVADYAASDQVALPRELLCKLHVNRAACYFTMGLYEKALEDSEKALGLDSESIRALFRKARALNELGRHKEAYECSSRCSLALPHDESVTQLGQELAQKLGLRVRKAYKRPQELETFSLLSNGTAAGVADQVGSGLNQPVSVYPL

SEQ ID NO: 15818 - DNA, 2380 bp, Homo sapiens
atgcaaaaattagctgggtgtggtggcagcttcctgtaatcccagttactcaggaggctgaggcaggagaatcacttgaacccgtgaggcagaggctgcagtaagctgagatcgcaccgctgcacattccagcctgagtgacagagcaagactccatctagaaagaaagaaagaaaaagaaagaaagaaagaaagaaaggaaggaagggggagagagagagagacagagagagagagaaagaaagaaaggaaggaaggaaggaaggaaggaaggaaggaaggaaggaaggaaggaagaagagagagagagaaagaaagaaagagagaaagaaagaaggaaaagaaagaaggattccctagaagctcaatacatagaatagatgaaagggactagctgcctggggctgggggctcagctcagcatctcatccctctactactcttgacagtatacctcaatcctggggcatcataaagcatcacttgaaaagtagcaactcaacactctcacaggacaagggaaaggctcagagagggcaagcaatctgctcaaggtcacacattaagtttggatgaatgcatggctccctgcccagcactccatgccctgcaggaggggcaatgcccatctatctgtcaaccaggctgcagacctgacccacatgtccaggagcctgtatgctggccccctctacccttgagtgcccaggaggggatctcatacactctcaggctaacagagaggctgggctttatgctaagaccagaagaggatggaggtgtcctagtgtacattttaaggtcattttaagatatcatggaaagaagccagatttgaggcctgtcaatgctggggcaagttttaattccattctttattaagtcactagaccactctttctgctgtttttgtttttgtctttaatgaacatagtcatatgtgccttcctgggtgttctcatggaaggattggcaagaggaggtgttgagggctgtgcacaccctgcagtctccgtggctcaccaccacactgacgcaaggggctcagtgacccagacgtgtcagtacagtgagtgggcgtcttatgaagagctgtctggcatacggaggcgggcagcagaagccattcctgacgtggctttgatagttcatggaaataaaaagagcccatttctttctttctagatagactttctgtacacagaggcccccaacacagggatggtgaggtggggcaccacccagtcagactgtggctctgttggaccagaacaaatttgctgacaaaaccaggctataaatggggtttggcctaggccaggtcctggatacctctagatcatataagcaggctggcctagcaaacattggcaatgaagaaagagtggtaaagacaattattttaatcctagccattacatagaatggggaaacagtgactaggaaacaggccttttcttttcatttcaagtgtggatacttgagaaaggcaggtttcatcacagaaggtggaggtagatggaaactttcatgaacatcctaaaggtcacccaggcttctaggcacagggactataaagtccgtgatttctttattgcatcgtatttcccagcaagagttacttttcctttttattcgtacatgtgaatcacagcattactcataaacttatcaagcaagatgggaatcagcatttcacctgacacagcatttgccagtgacctgatctgggatctcccctcactgtcagtcacttgtccagggacatggaccccagaaccccacactctacagctcccaggcatttggtctaatggggcttggtctctctaaagagatctccatgatgtttttaatttgctattaatgtgctcctccttagctcctgttccctccttagctcctcaggaaagccaattgccttagggtgggtcacaattcgacggtcatttgtgtgactgagtggtgagtgaccgtctcccctactggactataagtgccttgagagcagccagcaggtttgtttctactctcggctggggctcagtagatgctccatagggaaataaaagggaacagttagaaacagaagaaaaaggccaggtgtggtggctcatgcctataatcccagcactttaggaggctgaggcaggcggatcatttgaggtcaggagttcaagaccagcccggccaacatggcaaaaatctcatcttgactaaaaatacaaaaatcagctgggcgtggtggcaggtgctgaaatcccagctacttgggaggctgaggcaggagaaatgcttgaacccaggagatggaggttgcagtgagccgagattgtgccactgaacttcagtctgggtgacagagcaaggctccagctcc

SEQ ID NO: 15819 - DNA, 2757 bp, Homo sapiens
gcacacttctatttgtttggatgtggagagagaaaagaagaaatccacgtggtgggtaaagcacctgggtccacagccgaaaaatcccgggtttagtctgtttcactatacaaaattgggccatttacctgagttccaggctccacatataaaacacagacataatattactcacccatgtcactgggctgctgggggactctactaggacaacagaggcaaagctctgatataagctctttgcaaatgtaagaagtggtccttatgtcacccagtttagggcagtggttgagagcagacacattctgatccctcgaatctgaatcctatctttggcccatctggaagtgggacaagtttcttaaacctttgtgcctgggtttcctatctggggaagaataaattaacagatgcaaggaccctgaacagtccggttggagactgctccagtccttggcaccgtcctgcattctgtgggtcccaacagtgtggtgaaaccaggaagccgaccagccatccaaccagggtgtggtcctctggctgagactctctatcccacgtctgggcacccatgccaccagctggccttgaattccagggatgcgggaggacaatgagcatgaacgaaacgtgccgagtggagttgagaacgtaaaggaagaagggggagatgaggacctctcctggggagatgagggctgccaagtcctaagacacaggctcagggtctgcaggaaggtcggcttgttggatcgtctctgtgcgctgacttctctttgctccccagggcctctacccgctgcccttgctcaacagcaccctggacgacgggaaggccaccctgaccccttccaacacgccactggggcgcaacctctcgactcaccagacctaccccgtggtggcagatcctcactcacccttcgccataaagcaggaaacccccgaggtgtccagttctagctccaccccttcctctttatctagctccgcctttttggatctgcagcaagtcggctccggggtcccgcccttcaatgcctttccccatgctgcctccgtgtacgggcagttcacgggccaggccctcctctcagggcgagagatggtggggcccacgctgcccggatacccaccccacatccccaccagcggacagggcagctatgcctcctccgccatcgcaggcatggtggcaggtaaggagagggccggcaggaaggggagcactgcaaagaggaagtattggagcaaggtgggacacaaggagcaagaggcatactgtgccctattcatagacttcccaaagggcattgaaggatggaccaaagagggcatctccttgtaaatgcctggagacgatgtcccagtgcagtcctgactccctatttaacttgccccagctcggcctccttcttcccaggcctgctacattaccctccatgatgaaaagggaggggctgagacaggtctgtgttcaaatccaagctccaccacttcttccagtgaatcagtgagcataaatggagagcactctaagggccccaaaacactgtgagtggaagatgaaccctaccctcaagcagtgctggtctcccagtgatttaactctgatgaatcccagtttacccgttctgtaaaatctgaatctgaagggtattgatgatgatgatgatgatgatgacgatgacgatgatgatgatgaaatatatgcttcacatctctctctcaagcctgcatggataggacccgggttctaggtactctaagagtactatagaggatgaaatgagcctggagtagctctccatcctcatttggactgttctggaacctgcctgccagtcatttgggtttctttgtctgccagtcatcatccaatgatgattcaagatgataaggtctggacaaatgaagataatgggagtttccttgggcaagtctcaattttttaggagccatgtagggaagactttgggatggatgagacataattgagccattgtcactggtcaaaaaggcctgggacctggagtttctggaaagagctctgaacacaaggcatctgtgacccccatgccagccctaggccagcctctctggctgtgaccccagagacttggcgtatttacctaggcctgcttcccttccttgccggcaggagttaatctttgccagccacccactctgggcaccctatgcagaggcaggtgggctgggatctcctgggcagagggaagggagggagagaaagagggagggagaaatgctctgtgctccctgggaacctgctgagctggcacttgttgctgcctggttaccgtggcgatgtgcttaatgcagcgttgaaaatacagaatactgactcctctgtccctcctggccccggactccctccctccctcccttcctcttctggagcgtgaaatgagattggtcaagataaaaaaggaaaagattcggttatttttttaagagtgtggataatggggcctctcaatcaaaatcccagtctccagtcggttccccccattccccttccaacccctccaccttcccctgccgcctgcttagaggaggaggaagaaacataaagcacaaggcttttctcttaattatgaatcattccctgagggcaggcccagggcaaggggttcctggggcccagagtctgacctgtgaggtagctagaaggcttgagcctctcatcaaagtcccccaggttgtttccagaaagaatcctgagtgggttctgtg

SEQ ID NO: 15820 - DNA, 2171 bp, Homo sapiens
gtaacatggctactggtcactcagtgtctgtgagaccctgagggccagaggcaaggctggcggggtggagctgctgtgtgagcccaggcaaagcccttccttctttggactttggcccctggcagaagaaaatgattctcagcccctgggatccttagagatggtgggtcatgattcccctcctccctccactcactcagcttggtattgaggcctcactgctagaagaagaggaacagatgacctgttctgggaactgaggcttcacaagaagaacaaagctccagagattgagccatagtccctgacaggaagcctcgggggtgctggctgctccctgctggccgggatgccagtggtgtctgaaaccaggggtagagtttacaggaggccgggctgctcaggagagctagaatgaagttctctgtcctcatggtctcagatctgagctcttccccaaagggtggtgacttccatcaccctgcttctttggggtcacagtctggtctgggtaatgtgaaccccccaggctttggacctgggactaagaggctctaggaggctccagcctcatctgcctcctatcccctgccttgttcagaggcccagagctggggccggaagtgatcatgaagatggaaactgtggtctggctcatgatggtgcatcactgctgtgtctgtttgcagtcgttgtgcactctgtgccccacacccccacaccctcctgtctggaggagggctgaaaaaaagctgagtttgcagctggtggaggaggagccaaaagaagcttccctgcccccaagactcaggctggggaggagaggggacggtgggatcaaccttgcttctattagcccagatgcccctcagtaatcaagcatagtcatctcctctgagacctgaggtttaggattattgtcccatttcatgggtgagaaacctgagattcaaagataggaagtcacttgcctatggtacccattaggtggagctgggactagaactcagggctttgggtcccagaccttctgctggagggacgaagccctgtctcttacattctggttaggaaactaagacccagagtgggcaaaggcacagcccaagttgcactccgggtgctggcctcctccccgctgcctctctgcctgtctcccacagtgatgtttgcttcgtggttggtcaagaacggcaggaggtatttgcccatcggtgcttgttggcctgtagatgcaacttcttccagcgacttctgggcacagagccaggccccggggtgcccagtcctgtggtgctaagcactgtgccaactgaggccttcctggcagtgctggagttcctatataccaacagtgtcaagctgtaccgccactctgtgagcctgctgaccaggggcctgggtgggagaggtggggggtgccagaggcaggagtttgcccattacactgtgggcacagggcaggggaaactcccttccactcccccaaccacccactctacaggtgctggaagtgctgacagcggctgtggagtatgggctggaggaactgagagaggtgggtttttgtgccaggtccctgtctcatttcccttgcttctcacgggctcacttcccgccctgcctcacacacactctggcctggagaggaacgtgtgcccacacagagagaagtatgtatatctctcccaagtaagtagggcatgtatgtgtgcctgtgtgcaaaaggatccatgcatgcctgccctgtgtgtgctgtgggaagagggggtgattatggctggtgctgtagatacaaagatatcagccttgatccgtgttctccagagagggagaggagacagacacatgaaaatgcttacctgggtggcataagaagtgtgatagaggccgggcgcagtggctcacgcctgtaatcccagcactttgggaagctgaagcaggtggatcacttgagcccagaagttccagaccagcctgggcaacatggtgacaccccatctctactaaaagcacaaaaattagccaggcatggtggcacacacctgttaattgcagctacttgagaggctgaggcacaagaatcgcttgaacctgggaggcagaggttgcagtgagctgaaatcgtgccactgcattccagcctgggtgacagagcaagacttgccctc

SEQ ID NO: 15821 - DNA, 2049 bp, Homo sapiens
  CDS (1450)..(1857)
cctgttccttccatctaactgtatgttttgaaccattaaccaacctctctccataccccgcctcccagcctctggtgaccatcatatggttctctactccgttagatcaactttttttttttagctaccacatttgagtaaaaacatgcgatatttgcctatctgtaggaccttcttaagactgtgaaactgtacctaggaatccaacttacaagggatgtgaaggacctcttcaaggagaattaaaaaccactgctcaaggaaataagagaggacacaaacaaatggaaaaacattccgtgctcatggataggaagaatcagtatcgtgaaaatggccatactgcccaaagtaatttatagattcaatgctgtccccatcaagctaccatcagctttcttcacagaattagaaaaaactactttaaatttcatatggaaccagaaaagagcctatataacgaagacagtcctaagcaaaaacaacaaagctggaggcatcatgctgacttcaaactatactacaaggctacggtaaccaaaacagcatgattctggtaccaaaacagatacatagaccaatggaacagatcagaggcctcaaaaataacaccacacatctccaaccatcttatctttgacaaacctgacaaaaacaagcaatggggaaaggattccctatttaataaatggtttgggaaaactggctagccatatgcagaatactgaaactggaccccttccttacaccttatacaaaaactaactcaaggtggattaaagacttaaacataagacctaaaaccataaaaaccctagaagaaaatctaggcagtaccattcaggacatagaattgggcaaagacttcatgactaaaacaacaaaagcaatggcaacaaaagccaaaattgacaaataggatgtaattaaactaaagagcttctgcacagcaaaagaaactaccatcagagtgaacaggcagtctgcagaatgggagaaaatttttgcaatctatccatctgacaaagggctaatatccagaatctacaaataaacaaatttacaagaaactaacaacaccatccaaaggtgggtgaaggatatgaatagagacttctcaaaagaagacatttatgcggccaacaaacatgaaaagcagctcatcatcactggtcattagagaaatgcaaatcaaaaccacaatgagataccatctcacaccacttagaatgatgatcattaaaaagtcaggaaacaacatgctggagaggatgtggagaaataggaaagcttttacactgttggtgggagtgtaaattagttcaaccattgtggaagacagtgtggtgattcctcaaggatctagaaccagaaatatcatttgacccagcaatcccattacttgggtatatacccaaaggattataaatcattctgctataaagacacatgtacacatatgcatactgcagcactattcacaatagcaaagacttggaaccaacccaaaagcccatcagtgatagacgggataaagaaaatacggcacgtatataccatggaatactatgcagacataaaaaaggatcagttcatgtcctttgcagggaaatggatgaagctggaaactatcattctcagcaaactatcacaaggacagaaaaccaaacaccacatgttctcactcatcagtgggaattgaacagtgagaacacatggacacagggaggggaacatcacacaccagggcctgtcagggaatgggagactaggggagggatagcattaggagaaatacccaatgtagatgacaggtcgatgggtgcagcaaacaaccttagcacatgtatacctatgtaacctgcacgttctgcacatgtattccagaacttaaattataataataataataataatagactgaaactggccaggtggggtggcttatgcttgtaattccagcattttgggaggctgaggcaggagaattgcttgaagccaggagttggagaccagtctgggaagtatagtgagaccttgtccctattt

SEQ ID NO: 15822 - protein, 136 aa, Homo sapiens [sequence omitted]

SEQ ID NO: 15823 - DNA, 2225 bp, Homo sapiens
  CDS (1160)..(1633)
cacttcagaaacccatattcacacacatgtgcacgtgttcacatgaaaagacccccttgcactcaggcccccagagccgaggcattgtgcagccccacagcagccaccttcacagctgctaacagcccctgtgccatgcctgctgcaggcactgtctgctctaggaggggctcttgttttcatggaacccagtggtgaagagacaccccactggcccttctcttccccaattcctgtttcttcattccccatcatttacctgctctttctgtctggtcaagaaagcatgtctcagccaggcccagtggctcagccaggcacagtggctcacaccttctaaccagcactttgggagtctgaagtaggaggattgcttgagcccaggagtttgtgaccagcctgggcaacatagggagatcccatctctacaaataataataataaagagtagctgggagtggtggtacacacccgcggtcccagctacatgggaggctggggtgggaggattgcttgagcctgggaggtcaagggtgcagagagcaatgattgcaccactgcactgtgacctggatgacagagcaaaaccctgtctccagaaaaagaaagaaagaaagaaagcaggtctcaaaagcaatggatgagtattctttaactacaatgtagcagactctttattaaaaatgaaatttgatgtttatttttaatcatgttcaacccactttattctcagatatagtcttcctgtgaataactttcttttcagaatggaggaaccaatctctgtgctgtggatgactccaacgaccatgtgctctctgtatgggactggcagaaagaagaaaaactagcagatgtgaagtgctctaatgaagctgtgtttgctgtggatttccaccccacggacaccaacatcatagttacttgtggaaaatcacatctctacttttggacactagaaggaagctcccttaataagaagcaaggattattcgagaaacaagaaaagccaaagtttgtcctctgtgtgactttctctgaaaacggtgacaccattactggagattcaagtggcaacatcttagtatggggaaaaggtacaaatcgaataagctatgcagttcagggggcccatgagggtggcatttttgcactttgtatgttaagagatggcacactggtgtcgggaggtgggaaagaccgaaagctcatttcttggagcggaaactatcaaaaacttcgtaaaacggagattccagaacagtttggtccaatacggacagtggccgaggggaagggcgatgtgatcttgattggcacaactcgaaactttgtcctgcagggcactctgtcaggggacttcacacccattactcagggtcacactgatgagctctggggactggccatccatgcctcaaaacctcagttcttgacctgtgggcatgacaagcatgccactctctgggacgctgtgggtcaccgtcccgtctgggacaaaataatagaggtaaacatgcacattacatttccatttttcttacagaaattcatctggaacatgtttatttattttttgcatgaaatcaacagtgatacaaagttgtcccaaagcaaatgttatttatctatttagagttgccttaacattgcaattgcatttaacagtgttacttttaacattgcctcgtggcctcagccatgtaattttgaagtttactgttgaaattttctgacaagaagttgttctttctgagttcattgtcagattttctgagtacagtctctcaaccatcctaagagctgaaaaatacttgttatgagcctgcattctatttacagtgtaccctttgaatgggaatttacaagctgtactaaacacacgattgaatatatctctacattttgagtttgatggtaaagtgaactttcgtttgaaagtcagctgggcacggtggctcatgcctgtaatcccagcactttgggaggccaaggcaggcagatcacctgaggttgggagctcgagaccagcctgaccaacatggagaaaccccgtctctactaaaaacacaaaattagccgggcatggtggtgcatgcctatactcccagctccttggaaggctgaggcaggagaattgcttgaacccggaaggtggaggttgcagtgagccaagatcacgccattgcactccagcctgggcaacaagagcaaaattctgtctc

SEQ ID NO: 15824 - protein, 158 aa, Homo sapiens
MLRDGTLVSGGGKDRKLISWSGNYQKLRKTEIPEQFGPIRTVAEGKGDVILIGTTRNFVLQGTLSGDFTPITQGHTDELWGLAIHASKPQFLTCGHDKHATLWDAVGHRPVWDKIIEVNMHITFPFFLQKFIWNMFIYFLHEINSDTKLSQSKCYLSI

SEQ ID NO: 15825 - DNA, 2693 bp, Homo sapiens
  CDS (293)..(601)
aatatctagtcctgtagcaaatttggaaaataaagaaaggtataaggaagaaaattaaaatcactcctgagtctatcccacgttcatagccaccactgaggctgtagtcctttgagcataaatgtatattcagcaacattaagctcattctctatgattatgaatctgcatttttccaagtgaaaagagatgtcatgaattgaaaagatccttccaaagcaccattgctaatggctcttccagttgtcacagatgtgtgacatttgtcgcctgttccccccacttctgacttatgatactgcagttgttcgcatgtttccctcttgtgaataacgcttcaggaacggcctcatcatctcaaagctttgctcttgtctttaggacgctgccctgtgagccgctcgcccagctactttgcacagcaagacatcaccttgtagctgttcttgagcggtgcactggcatccaggccagtagtgtggttgcctcacccccagctcctcctacaagttctagaaggcctctctctggttcagctcttggcagctcagtaaagataagacctgcccacagccctggggatgggcggagactgggggattagaggagccagaggtcacctccaactgccatttagctcttagtgggctcttcagctggatctggaaaccagattgacagcaggcagattaataagaatagcataccaattgtattggttttacatatacatggggatcttctgcaagagagcgaaatgcaaagaagtgacccaagcaagacgcttttgtactttttgacaaagaatgataaatttgaaaagaaacgacagggcaaagaaaatctggctaggacagtaaattttctagtggagtccctaggacatatacaggtggtgtaaagcagtggaagatgagggctactccattatgtatgtttactcaggcccactgcagcctccagtgcccagcctctggtgacaagggccattttcttgccctggtgcagagaggggaccccttccagaggcatctctatcactggctgcatgtaggaagcgacaggtcagctcaccctttctgaaactatagtttctccaatgtttcaacatgatatagtcagtataatcaggcatatgtgaggatggcctgtccttcactctttcagaggcatggaataatatactttttttttttttgagacagagtcttgctctgttgcccaggctggagtgcagtggtgtgatcttggctcgctgcaacctctgccccctgggttcaagcgattctcctgcctcagcctcccgagtggctgggattacaggcgcgcgccaccacccccagctaatttttgtatttttcttggagatgggatttcaccatgttggccaggctggtctcaaactcctgacctcaagtgatccacctgcctcagcctcccaaagtgctaggatttcaggcgtgaggcaccacaccaatacacttctcaaactaggggggcttgtacccactgttacacgggccccatgcttgtgtaatgttctgctgtcagcacccggagactctgaatcattttaaacaaggggctctttgtcattttgcccggggtctcacagcttacacagtgggttccactgacttgagccgtcctcatccttagagaccttcaccttttagacctcagagctttgctgcctttaaacaaagacaccttgtggtgaaaacccccaggcccagttgcgatttcctggcttcctcaccttgatggcacagaccaggggcagattctggagtcctggcagctcaactgggaacggggatttggctccaggaagtgttcattatttatgaacctccaaatcctaaatccatcagtggccgtgtgtggccacagtggggcaggctggccggcagcccagctgctcctggaatgagcttagagtcacccctcccggtggaggcagaagctcgctgggcccccagcgcggctccacgcccctcctccaggtggcttgggtgagagcctctgtcctgtgaagtaactgccaaaaactgccagatcccctggagccatcgtccgacccgatggatacccacccactccacccagcccagctgctcccttcacctttttaaccctgagaatgtgctcagaaggttccagcactgcagtcctcatgcaggaagatgagctgccactgggtatctccatccagatgccactgccctgggatgggccccacctgggtcaggcgcccagggacccagctgcctccaccacttctgtgtgctggtcacttgtgcatgtggtcacaaggtgcctggccctccatgtctctgaaagagcccgtcactccttcgcgatggtgtgctgagatggcaagaagccgtcttttatagaaactgtctctgggccgaaggccgtgggtcatgcctgtaatcccagcactttcagaggctgagaagggtggatcacctgagctcaggagttcaagaccagcctgggcaacatggtgagaactcatctctaccaaaaatacaaaaaaattggccaggtgtaatggcgcatgcctgtggtcccagctactcgggaggctgaggtgggtgtatcgcttgagcctgggaggcggaggttgcagtggaccaggattgcaccactgcattccaacctgggtgacagagtgagaccctgtc

SEQ ID NO: 15826 - protein, 103 aa, Homo sapiens
MILQLFACFPLVNNASGTASSSQSFALVFRTLPCEPLAQLLCTARHHLVAVLERCTGIQASSVVASPPAPPTSSRRPLSGSALGSSVKIRPAHSPGDGRRLGD

SEQ ID NO: 15827 - DNA, 1751 bp, Homo sapiens
  CDS (86)..(1354)
atgcgcttccgcaggaagaaggaagcggcgccgccatcgcctcccggcgctccctccccgactcctaagtccttcggccgccaccatgtccgcctcggctgtcttcattctggacgttaagggcaagccattgatcagccgcaactacaagggcgatgtggccatgagcaagattgagcacttcatgcctttgctggtacagcgggaggaggaaggcgccctggccccgctgctgagccacggccaggtccacttcctatggaccaaacacagcaacctctacttggtggccaccacatcgaagaatgccaatgcctccctggtgtactccttcctgtataagacaatagaggtattctgcgaatacttcaaggagctggaggaggagagcatccgggacaactttgtcatcgtctacgagttgctggacgagctcatggactttggcttcccgcagaccaccgacagcaagatcctgcaggagtacatcactcagcagagcaacaagctggagacgggcaagtcacgggtgccacccactgtcaccaacgctgtgtcctggcgctccgagggtatcaagtataagaagaacgaggtcttcattgatgtcatagagtctgtcaacctgctggtcaatgccaacggcagcgtccttctgagcgaaatcgtcggtaccatcaagctcaaggtgtttctgtcgggaatgccagagctgcggctgggcctcaatgaccgcgtgctcttcgagctcactggccgcagcaagaacaaatcagtagagctggaggatgtaaaattccaccagtgcgtgcggctctctcgctttgacaacgaccgcaccatctccttcatcccgcctgatggtgactttgagctcatgtcataccgcctcagcacccaggtcaagccactgatctggattgagtctgtcattgagaagttctcccacagccgcgtggagatcacggtcaaggccaaggggcagtttaagaaacagtcagtggccaacggtgtggagatatctgtgcctgtacccagcgatgccgactcccccagattcaagaccagtgtgggcagcgccaagtatgtgccggagagaaacgtcgtgatttggagtattaagtctttcccggggggcaaggagtacttgatgcgagcccactttggcctccccagtgtggaaaaggaagaggtggagggccggccccccatcggggtcaagtttgagatcccctacttcaccgtctctgggatccaggtccgatacatgaagatcattgagaaaagtggttaccaggccctgccctgggttcgctacatcacccagagtggtgattaccaacttcgtaccagctagaagggagaagagatgggggcttgaacacggggcttccttacagccccggatgcagattttagagggagggcaggtgcgggctgtgtgtgtctgtgtgagggcaggtcctggacttggcagtttcttgctcccagcacccaccccttcctcacctcttccttattccataggctgggagagaaactctctctgcttccctcgcccttggagctttccccatccccctgattttatatgaagaaatagaagaggggcttgaagtccccctcgcgagtgccttcttgcaattacctgccttagcgggtgttgcgggtccctccttcacagccgctgagcccagaggtcccgctggcccctcctctgaattttaggatgtcattaaaaagatgaatct

SEQ ID NO: 15828 - protein, 423 aa, Homo sapiens [sequence omitted]

SEQ ID NO: 15829 - DNA, 2348 bp, Homo sapiens
taatagcaacttatattattttactatttacagagagtgtccacatatgttaacttccttgatcctcacaaacaccctatcccttgggtattttctaccagccccatgaggctcagagagatttacatgactttttgagggtttgaacccaactctttggtctcaaaaacatctcattccagtacacctcattgcctcccaagccctgtatccaggaagacctgactcaccagcatgctttctgtgcgaaaggacaccagagctgagaagtaaatcgacaccacccccaatccctgcaacttcctcttctctgtcctgtcattgagaacaccagcctaagggcacgtttttctccttccacgttctattaaagctcagtagtctaactcctactattgaaaatgagagaaacaggaaggaaagtctcaaattccaactttggaaaccacgttgaaagaaggtgctctcatctggacatgatggttcacgcctgtaatcccagcactttgggaggccgaggctggcagatcacgaggtcaagagattgagaccatcctggctaacatggtgaaaccttgtctctactaaaaatacaaaaattagccaggtgtggtggcacgtgcctgtagacccagctacttgggagtctgaggcaggagaattgcttgaatccaggaggcagatgttgcagtgagccaacatcatgccactacacgccagcctggcaacagagcaagactctgtctcaaaaaaaaaaaaaaaaaaaaaaaagaagaagaagaaggtgctctctcatcattcttctgtacattcatttgttcattagacagatatgtatagagaatctgctgtgtcccaagcactgttctaggtgctgcggttatagtggtagacagaaaggtaaagttcctgccctctcgaagctcacatcctactttcagggggtaatgagcaagtagatgatgaacaaatgttttatatagttctagggctataaggagtgtagagaaggctgatgagatgcagtgtaactggcaggaggggagtgagaactacttgggtagatgatcaggagatactctgcaagaggaaacatacagaaggagcctgacatgagaaaactggggcagcagttttccaggaagagggaccagcacaggtccaagttgaaactcagaatggaattttaggaaattatattcttcatgatggttagatcctgtgggctatcatcactgcagttcaacaatgtggtgcctagtaggaagagttctcccaggaaccctccacgtgtgctatgggatttctgagaaaaccagttctgagttctaggcagtggactcacagttgaacttggagggaaccaagaattgcttccatcatagccttactaagaaatgaccatggcatggcctgagtgcttcggcatggaggaccagaaggggaagccctaatttgccagttgcagactcttgagccttgtgactctaatgacgacaaaaattaggagattttctaggactccacgtttgcgattttgagagtagtgctgctggggttcctggtttgggttctattgattgtttcattgtttctgtgtgcaagttaccctctctaagcttagtttaattaatattatattaagtgaggtagttagattatatgaaccctaaggctccttttattcttaaccttaaaataaaaacattttgtaaacagtttttctttgtgtgtgtggtggccttttctgtgcctctgctttggatgaggttacagggctgagtgcgagtgagtcattagtggttcctttgatataagacaggtgatactattgaacactgttggtggtagaccagtggttctcaaagtgtggtctctggaccagcaatagctgggcttgggaacttgttagaaactctagctgtcagcctccaccccagacctactgattaaaaaaccgtaggagtgtaaccaaaactctgtgttttaacaaagtctacaaatgattctgatgcatgctaaagtttaggaaccactagagtagagtatgtgctttaagatttgggtctaccggccaggcgtggtgtctcatgcctgtaatcccagcactttaggaggccaaggtgggtggatcccaaggtcaggagtttgagaccagcctggccaacatggtgaaaccccatgtctactaaaaatacaaaaattagctgggcatggtggtacatgcctgtagtcccagatactcgggagggtgaggcaggagaattgcttgaacccaggaggcagaggttgcagtgagccgagattgcgccattgcactccagcctgggcgacagggcaagacttgg

SEQ ID NO: 15830 - DNA, 2274 bp, Homo sapiens
gaatacttagctttatgtaacagatgcatattcactgaatttttctaaactgaatcatattttaacctcatagaaggatcttaacttacttatgaaaggaacctgatgaagaatcagcttataaaccttcaacttaactttttaaaaatgtgactttccctatgacaaaccaacagtttatcatagttttaaagagtagctattattcacctgactctgaggtagatgctggggttattaaccaaaggaagacagttctcacgtggaaggattcactgataatagattgggaggttattctaaattccacaagctaagagggagtagcaaacagcattgaatagttatgttctagatgggagtattcaaaccaagaagactcaggggagggggtcttccctacgatctagtggaagaagtgcgatcaagccaggctttgaaaggtagagaggatttggacaggatttgggaatagcagctgggtttggtagccacagaattcagtcttgattgagtttcacttttcctgaaaacaaaggacagttcctctgagccaccttaaacctggtttccactaagactctgatacaacattcaggaacacaaagacccgattgcaatcctattaagatttctttcatgcttgtttaattatgacatacagaacagcaataatattaagtcgagtttaattatttttaggtgagcctttatttttcaatatatcttttcctctttaaaaatttcatctctacacaattctacccatcccccaccctttggcatttcctgccaggcctgggaagccaaattctggagggctttgctgcaaaggaaacaaagggtgaactagagaatctcccttagccaatctcccttgctgccctagggaaaacgcagcatggaaacatccttacaaagcaacgggagacgtttttcaaatgcgtttgaatcatctgtgtgagcacggggagaagtgagaaaaggagtgttaacaacgtaggagcaaaagtgtcatttcaaggaactcaactctgaagaacagaaacactaaaccaaaaaaaaaaaaaaaaaaaaacgaagtaaaaattaggccattggtagattttgttctaaagagacagctatgtcagattaaatctaaacgagctgacagagccgttgaggatgggtctctttcctgctagaccatactgtctacctgaggcaccactactactccgaaggagttggagagtgtgtgagcaggtttggtgagtgcttttcgagaagagattgagatgctcaacacaatgagttggtttgtgggtcaggcagccacctgggaatcaatatgctcgccagtaacagattacaagcagagatagcctcagtaatttgcaatggattttagagaaatgagatccgtggtagaggttacaggcttagtgttggcagaatcagttattaatagaatcagactccagggaagtccatctctttacttctgaagaccatctttgcttgatagtgggctggacagcaatgccatttattctaatcagccaattaacacatctttagtgagcacctatggtgtgcaaatcactgcaagatgtgacaagacttttatggcaggacctttggtcaaactagttgaggggtaagctctactctcttgtgaaggaatgcacgggtgtatgtgtgtggtggcgtgtgtctgtgtagatgagctggcggttctctggccggtcagagaaagatcgtcactggtttccacgatcaagcaaggcttcatggagcaagacaacttcacccaggtcttgaagcataacaggattcattctgtgtgataaaggaaaagttgtggagtttgttaatgctcatgtgtcccaggggcagagaaggatgtgttggctcttaatctaactgctgcagcttcgtgtaacctctttgcatataaggaaaccttacatttgaataggacctttgcttttaaaagtgccctgactggctaggtgcagtggctcatgcctgtaaccccagcactttgggaggccgaggcaggtggatcacctgaggtcaggaattcgagaccagcctgaccaatttgatgataccccatctttactaaaaatacaaaaattatccggacacggtggcgggcacctgtaatcccagctactcaggaggctaaggcaggagaatcgcttgaacccaggaggcagaggttgcagtgagccgagatcgtcccactgcactccagcctggggcaatagagctagactctgtctc

SEQ ID NO: 15831 - DNA, 2191 bp, Homo sapiens
attttttaatccattctgtggcttgttccatgcctgagaacttttgacatcctgtgcccagacttaaactcaccccttcagtgtgtgggtttagggggagaagtgaaggttgacacattcatatcaacaacatagtctactttaccatccaacgatgtattttgatatcagccaagtatttctctctacaactgtgagcaatgctaatccactccagccttcttacactgtaatgataccttttctttgtcctctctggaagtttctagtagcatatctccaaataattattgaatttgaaagcctcagctggacaagtcttctctgtggttgaattgtgacaatgtctgtgttccttaaaaaaataaaaaataacataaaaccaagtaaggttagacaaaacagttgaaagtttaaaatcccttggcctcatctagttcagtggagacaaactttctaaatgggaggagggccatgtaatgagaggagaggagaggagagaagtatttgatgcactcatggcctcagggtcagggagacctggaggagcagtggagatggtggagagccagagaacaggtgccacctcccaagaggcagcctttactcacctctggctgattggcggggttggggatgtgggtacaggcatatcagacctttagatttttttttcaagaaaagccagaaatctggatcttttttttttcctttaagagatgtcatctcactatgttgcccaggctggtcttgatactcctgagctcaagcaatcctcctatctcggccccccaaagtgctgggattacaagtgtgagccaccgtgcccagcctggatttttttttttatgttaaatatctcgattttttttctagcattggctgacttcacatgtataaccaccacttgcagacaaagcgaaccaccacgtctccaggccaaattccagctgccagcatgcagcctctgatctgattctcttgtagaagccattctatgaaaagaagggaggctatctggaatgttattggatgccctctatctgccagttactttgcaggggtcagcttttactagtttgccttttttttttttcagatgaggaaactcatgcctacagagtggttaaatgtgaagtgacttgtcaaatcacacagctagtaagaggaccagtccaagcacctgcatctcaaaggcacagatgttttgtcctacaccttactacgtagggatttcgaatctgagtgtatactcaagattctgaatcataactcaaggttgacaccagtaacaaaaccgtctggttggatgagttcaccagatgggcctcttatgggaccatcccaaaatgacaacatacatactcactatgaaattcattggcaggaattttgtagggcatgtagggtaggaagatgggagggtgggggaaacctacaaacctagtattttgtggggtatcatcacagctctggactgcttcagttggcaaaaaaatggatgtattgccaaataactatcccacttaggtttagggtaattaattaaaggctagagtgttgccagcacctttgatatggggaaccggatgcattattagctcagatctttgggtgtggtgactcatgcctgtaatcccagcactttgggaggcagaggtgagcagatcacctgaggtcaggagttcgagaccagcctggacaacatagtgaaaccctgtctctactaaaaatacaaaaattagggccaggcgcagtggctcacgtctgtaatcccagcactttgggaggctgaggtgggtggatcacctgaggtcaggagtttgagaccagcctgaccaacatggagaaaccccgtttctactaaaaatacaaaaaagttagctgggcatggtggcacatgcctgtaatatcagctactcaggagactgaggcaggagaattgcttgaacccgggaggcagaggttgcagtgagccaagatcacgtcattgcatcccagcctgggcaacaagagtgaaactcagtctcattaaaaaaaaaatagccaggtgtggtggcaggcacctgtaatcccagctactcaggaggctgcggcaggagaatcgcttgaacccaggaggtggaggttgcagtgagctgagattgtgccactgcactccagcctgggtgacagagcaagactctgtgtc

SEQ ID NO: 15832 - DNA, 2638 bp, Homo sapiens
ttcacagaaaacaaaatttactcatatccaatgtacatttcctgaagataaaactgttcatctcagggtctgagtgggccctggagcctgagctggccttgctcactgcatccgcaaggagacaattagcacagcctgctgcctgtagctgagctgtgcagagccagggaacaggagtgctccaaaagcgagaagggtttccggttgccctttcaacctcagaagtcaggacttgactcacagtcttctggatttttgacaaacaaaatcctatgcctatgcctagatccataggcacacaaatggaagacctaaataaatcaaagtgggggagtgaggctgctggactcctagagattcatggctctgccttgattagtcaccattcttttagcacatacgtccagatatcctacagaaaagaatgcagtcaccattcaggcatgctttgttttgaagcaatgatcatgaacttaatattctctgctggcataaagaggaaaaaaatataacacctggcagcttgtgggtaagtccatcacgggagccggtcctaaaattcttcaaaataccaactttctgaggttggaagcagaccctgagatgagattttggtgcaagtgatttattaaggaagggatcccaggaaaggcagtaagggagtaggggaaacaagttagggatggggaagaatccaagcaaaggttcaacttcaaaagttctggcctcagtctaatcccgagtgtaaattaggcctcagagtttgttctacctccaggcaaggaagcaggactgtcatattcttatatgagtcagtcatcggctaagagctactctggagaagtaaactccaaggcatctctagctttaggcaaagcggctccaatagccaaaagtgaaaaccattggtcaggatgagatactccaaatgagagcccagagggatgaggaatagggcctccacagagcagtcccaaagctcatctctctcttatcttgagataaggttacaggaagtcctcatgcataacaacaaattatctaaatgtatgtccatcaggaccttgaaagagagagaacaacacttcccccatcatgactgtaggggagaaaaagaaaaccatctctctctcctaaccagttgtcactttgtagtttaatatcataatgtacttttctgcctaatgcttgaaaatgcctacttgagtcacaggaaatattgctcccatctcccagtatcaccaatatcagagaaatttcaaagaattttagtgggggatgactgccaccttcgaatatttaggtttctctcatatgacctggtgctttctctgtggtcctagagggtgagctaggctcgaggggtagatgtcataagaagatcagtttttgactcaagaaaatcatctggagtaaagtggtccacatgctggactggaacaacatttccaaaactgaccttccaggggatggatttttaatgtaaactctttagcgagtatagtatatagaaagaaattcattaggtgtggctccatgacattttaactaaatgaacagacccatgtagccagcacccaaatcaagaaacagacgatttatgtgccctgttgctcagcagtgcaagagattcctccatgttcctgtatgtagttataggtcgttcattctcattgttgaatatcattccattgtataaatggatatttggattgtttccatttggggctactatgagtgatattgttaggaacattcttgtacatgccttttggtgaacatacagatacatttctgttgagcgtctactagggagtcaaaatgttgggtcattaatatacatatgtgcaattctagtagatatcgtcaaatagtttcctgaagtgggtgtacccattgaccctaccttgagcagtatatgagaattacagttgccccacatccttgccaaaatgtggtattattagtcttctatattttagcattcttatggatgtgcagtggagtcatattatagttttaatttgcacttccctcatagctagtgaaattgagcacactgggtaaagttttttaaaaaatacattcccaagcctcacccaagcctcatagaatacaaatccctagggatgggtggcccaggaacctgacttttcaatgcctgttccccgggaatacttaagctgccagcctgtcgctgatctgtgaactagggtgtgaggatgatcaataaggcaatagctctgtgaatctatgactctgggtgcagagtgtgggtagctggcttctgcctctgattaggtgttggtattcagtcaagatttaatgtttctgcatgaaacaacgaatccaaataataacagagacaagggtttatttctctgtcatgtgaaagaaaatacagagataaggaacccagggctggtttagggtaccggggtaccattgtgaatcagggaatccagctctttctagctttctgctcctttgctctgccactttcatgttctctagacgtgctggaactccagccaccatgtttacatttcaggcaggaaaaggagaagcacaaagggcaaaaaaataaataaataaacaaataaaagagagagagagaaggagagagagaaagaaagag

SEQ ID NO: 15833 - DNA, 2239 bp, Homo sapiens
  CDS (67)..(897)
tatttggcaacatctggttatccatggccagcctggtcatctttatgcagctgcgttacctgtttcatgaggtgcaacgtcgaattcgtcggcacaagaactatctacgtgtggttggaaacatggaggccaggtttgcagttgcaactccagaggagctggctgtcaacaatgacgactgtgccatctgttgggactccatgcaggctgcgcggaaactgccctgtggacatcttttccacaaggtctcggattgcgagctggctgccgagtttttcggttgaagtgatgcacaccaccaacattcttggcattacgcaggccagcaactcccagctcaatgcaatggctcatcagattcaagagatgtttccccaggttccataccatctggtactgcaggacctccagctgacacgctcagttgaaataacaacagacaatattttagaaggacggattcaagtaccttttcctacacagcggtcagatagcatcagacctgcattgaacagtcctgtggaaaggccaagcagtgaccaggaagagggagaaacttctgctcagaccgagcgtgtgccactggacctcagtcctcgcctggaggagacgctggacttcggcgaggtggaagtggagcccagtgaggtggaagacttcgaggctcgtgggagccgcttctccaagtctgctgatgagagacagcgcatgctggtgcagcgtaaggacgaactcctccagcaagctcgcaaacgtttcttgaacaaaagttctgaagatgatgcggcctcagagagcttcctcccctcggaaggtgcgtcctctgaccccgtgaccctgcgtcgaaggatgctggctgccgccgcggaacggaggcttcagaagcagcagacctcctagcgctcccttgccttcctcagctgcctcctgcgccctgtgcccgactgactggaggaggcctgtcccaattctgaccgctccatggaaaagcgggcttgactgcattgccgctgtataaagcatgtggtcttatagtgtttggacagctgataaatttaatccttctttgtaatactttctatgtgacatttctcttccccttagaaacactgcaaattttaactgtaggtatgatctcttctggtgttgactggactgcttggggtgggggacgatcaggaggaagtgagcagtcgcctgcctgcagcaggcagcttctactcctgcctcatacatacgtcccacaaatgcaggtgtcctgagcaccacacccagtgggaagagtgtgggggaggcgcacagtgtgagcccgcccccacgtcgtggggtaacatctgttatcaaactgctgtcgttgttgtggaagcatgtagactgtgccagaggccagacccacgggctcatgcacccctgagccagcagggcatcttggaaaaggaactcttggttcgatacctggagcagaggaggggaaagtccagggctatagggtgtgatgaagtcacccctttctgtcccactacatctgggactgactttccgagcctccagtccaaagccggcttgatttccgtgaactctggtgctcctgcatctcatgagtgtgccccatgggtcccctcccctctcagcatttccttgtcccgtctggacctggggagtggttaggcagcaagctttggtttatggttttcattcattggtgaagtaaattaggcagtgctaaagcctgtgggtttggtccttgaacaagatgtgggccttgcaagatgggagagtaaaccttgaagggctttattaaagaaataaaaaagaacttttgtatcttttatcctgggagcactgcgttttcctagctgtgttattcctggtttaattcagcagagaaggtaaggtgtgaacctacctgccttggagagggcccaggtcccaaatctcttcaaattcttcacatgtttaactttaaggatttgaaccatgaagtcataggttacagacctcagttttatgccccattggattactttttttttttttttttttttactctttgaaagctttgttttgtggtagtccttttgggaagaatccagtattatctacaattattggcaaagtttaaatgtattttacataacggaaagtttttagaatgttgaaaagtaattgaaaaaggtgacaggtaaatttttaggcaaagataatttatttcaataaatctttcaaaagccttaccttg

SEQ ID NO: 15834 - protein, 277 aa, Homo sapiens
MRCNVEFVGTRTIYVWLETWRPGLQLQLQRSWLSTMTTVPSVGTPCRLRGNCPVDIFSTRSRIASWLPSFSVEVMHTTNILGITQASNSQLNAMAHQIQEMFPQVPYHLVLQDLQLTRSVEITTDNILEGRIQVPFPTQRSDSIRPALNSPVERPSSDQEEGETSAQTERVPLDLSPRLEETLDFGEVEVEPSEVEDFEARGSRFSKSADERQRMLVQRKDELLQQARKRFLNKSSEDDAASESFLPSEGASSDPVTLRRRMLAAAAERRLQKQQTS

SEQ ID NO: 15835 - DNA, 2270 bp, Homo sapiens
ctaggtaggaagggggcctgctggttggttggggcttcatgatacttgcagtggtggaggcagctgttgggggttcttagaaatagagtcctccagccagctctaagggcttcctgccctggcctcagccttagcaggccagagtgagcagtgggcagaaaccttgacctcacttaatatggccttcgtccaggtgaagcagaaagagctgtgtctgcccttcgcttgggtccgtgtgagagcaaggcctttggcaagcctgtgtcgtgcctgtaccactggggctgcctcccacaccctcccctgcacacccctagtgccgcagtaagcacgcccaccattaaagcagaccaggagttactaacctgcctgccttcctcagaggctcagtgttgagttggaagagaggggttttacagtgggccagtccttaaggtggtgtgggtgctgggctgtggttgtggccttaggtctgctggcgggtgtgctgcacctccttggcctcccctctcctgggctcaaggaagtaaacaagtcctctgtatgatggggaggccaggacctctcgtccctttaaggcagcttggtgcctgccagtcacctcagcgggcggcagtcagtgggcttgtgtgcatctgtaaactcagcactttgggaggctgaggcaggaggattgctggagcccaggagttcaagaacagcccaggcaatgtagtgagaacccatctctacaaaaaaataaactaggctgggtgcggtgggctcacgcctgtaatcccagcattttgggagacggaggcaggcggatgacctgaggtcaggagctcaagaccagcctgggcaacatggtgaaaccccgtctctactaaaaatacaaaaattagccgggggtggtggcgggcgcctgtaatcccagctgctcgggaggctgaggcaggagaagcgcttgaactggggaggcagggttgcagtgagccgagatcgtgccattgcactccagcctgggtgacaagagcgaaactccgtctcaaaaaaaataaattagccgggcctggtggtgcacacctgtggtcccagctactcaggaggatggcttgaacccaggacatcaaggctgtgcagtgagctgtgatctgggcaacagagtgagaccccatctcaaaagggaagctcgagggctctgctttgtgtgctggtgacagtgttctcaagccagttctgcccaagagccaacagctctcgggaccccacggctccaggacagggctccttccctagaatgtgctctatctcaggaatcctctttcgaggatctgtgacgggatctaggtcagggaatgtcccccctgtctctggcaagccaggctccccttggccagccaggtctcatctgacacgttttcttttcctgcccccacaggccttagcagtaggaggactaggctccattataagagttcttacagcaagaaagactgtttaaaaaaaataaaaagactcatgttaccttgagaagaattctggatgcccaggctggtgaagaagggattgacaatggaccatcttcctaggaactcccaagtaaactatttcaggacatgtatctgctgaaatgtattttattttcaaggtggaggggaaaatcgtctgtttcctaaatcctgtttaggatctgatagtctatgcctttgtctccgagtactgcagaactgacattttgacggtctaccagcgtggcggctggtgttggtcagatgtacctgtgtgcactgggggagggatggtttgggcaggtgcagatccaagggctgtggtaaacgggagagcttgtgtttttgaagtggaaaaaaacccaagagtttgtacagacatcctgtcttcccagagaaggtggacactcttgggctcattgtaaagtgcctgctgcatcaataaagctcttggcttattagtctatacattgcggtgtgtttcgtgtatgtaaaaaaaaatggtaatgaatgggatggtaatgaatgagagttcagttgttgttccggaaacccgatgtggaaggagtagacctgtgtccctgttgagccacccctgggagcgagcatggcaatccacaggccctctgccacaggacgccagcctcggcctcagagctgccggctgctgcagagaggtgtttgctgaataaactatttattgtttcttattcctttgatttgtatgtaattaattttggagcttatttaattaataaagtgccaaacatttaataattg

SEQ ID NO: 15836 - DNA, 3227 bp, Homo sapiens
cgttatttttttaatctgccagaacatacatttttcttacctgtcattattattattattatttgaggtggagtcctgctgtatcaccaggctggagtgcagtggtgcaatctcggctcactgcagtccctgcctcctgagttcaagcaattcttgtgcctcagcctccctagtagctgagattacaggcgtgtggcaccacgcccagctaatttttctatttctagtagatatggggtttcaccatgttggccaggctggtctcgaactcctatcctcaagcaatctgcctgccttggcctcccaaagtgctgggattagaggcgtgagtcacctcgcccagcctcttacctgtcattcttgaggagcccagtgtaggagggaagggctgtgtatctgtgagtgcgggtaaagcacacggaagctggccatgttcgtcatcttggtttcatactgacaagcaggagtcagtgtgccccatggcgtgggggccctggaaggaagcctctgcagctgcagaaagacagaccccacttggaaaataaaacagcagcataaggacttgggctctaattacagagttgtcaggttgaagagaagtggttgtgggataacaggaagagaaaatattttggttcttctcagcataatgaattttcatcagtacgcctatttccttgtttagctttttgcgcaaatgtggacctttcgcctcctcctgtgtgctcttccttaaaaccctatttctccaattgttttatagatcagctttgtcagagcttgggcgtcagaggtcattgctgttcttgtattgacttgttcatttgttctttatccattcacttgttccctgcatattttgaaagtgttttgcattgcattgaactggagacaggggatacaaaagacaagccctgcttttgtcactcagtcctgtggcccagtttcctttcgcgcttttctcttccaatggtggggagaaggatccagagctccctaggtgcactgtccagaaaaatggaaaagtgaagtcaccatgagaacacgaagttcagcgtgagagtaccagcaggtaacagttattgagtacttactccaggccccggcattgtcctgtgccctgtacgtaaattaaggtcttcggatctcatgatgccaggaaaccccagccccacccactagtcttctctgttctgcctctggtctttctgtttctcccctctgttcccagtgtcctcacccgaatccacatctgtgaatgtccctctgaaccattgccgaaactttctagctagtctcctttcagcctcttctcctgtccagttctcacgtctttgtaaatttccatgtcacttttttgcttaaaaccatcaggaacaatgcccttttaacagtagactttcaagagagcgtctggctttatcttccttctttattgtgaatctcatgagggcaacaagttataaatacttggcttcccaacaagcgtaggatagtgcctggcacacagcggccatccttgatgttgagtggatgcatttccttgcagttcccaccatgcagtcagcagcgccaacccatgtaggggacctttgatcattccccagttctctcagcctcttctgactcagttccctgtccccataaaagtttgttcctcccctgctgttttggctgtgagagaatgctgacaacaccagcaaaccaccacgcggcgagtgcttcagtatggggccgtggcctgtgcattccataaccctgctgcctggcccagtgtgtagcacctgatgtttgcaatcatgttcgtgcagagttcacatatttgctctgttacttttttatttaattgaggtgaaattcaaagaacagaattaaccgttttaaagtgacccgtgcagtagcatgaagcactttccctgcatgtgcggtccccacctctgcctagcaccagccttcccatccctccactctgttgtttaccagctctgtgacattgtcagctgcttcctctgtaagacgtgactgcgaattctgacctgccaggtttgaggcacaggacttgcacacggccagtgcagaagtcccataagaacataacctacccaaggccagctcacctctctgttacatatgctcatgagattagtgctatagactcagtgtgccacttccctgcacatgcgagggacgacagtgtcctgacacagcagtgaacccagtgtggtgccaaggagaaagttgtttttttggggccagccagcacacatggggtggcttgtccaataccctcaccggtccagatatttaatactcaaaaactgtcttctccaaagctgtcttctccactgtccatcaagttggggtcatgaagcatttttcttaaaggggaatgagtagaaattgcttagctatattctactccatccagtcttgctcaaggagaggtctgctgcaagcaagagacggcggctacacccctactggaagtgcttgacctgcaggaggcacagctgccctagagttaaccttgaggggtacattatttttgatctctgaagcccactgtggtttctgctgccttggtggagaaggcagtgcaggtacaggagactcacatccagcccagctcgccctgctgctgggggcctcaggcggtggggatgcaggagaggctggcgggctgccattgcacactgctgccggcctggcctctggacacatggccagtgtgcagggtgctgtcccggggatggtgatggttgcacttcattcattccatccacaggtgtctgtggagggcccacgacgtgtcagttgtggtgcgttgtggtgtgcaggacagggaaggtacctatgcctcatgcagcagtggtatagtcatgtgagagtgactagtcatttctgaagcatcttcaacatcacattaaaaaaaacttaaattaggccgggcatggttgctcatgctggtaatcccagcactctgggaggccgagtcgggctgatctcctgagctcaggagttcgagaccaccctgggcaacatggtgaaaccccgtctctactaaaataaaaaaatatatatatattagctggacatggtagcacaagcctgtagtcccagctacttgggaggctgaggcatgagaatcgcttgagccccagagacagaggttgcagtgagccacaccactgtactccagcttgggctacacagtgagactccgtctc

SEQ ID NO: 15837 - DNA, 3107 bp, Homo sapiens
  CDS (2311)..(2628)
atcgcttgaacccaggaggcggaggttgcagtgagccaagatcacgccactgcactccagcctggccgacagagtgagaacccgtctcaaaaataaattaaaaaataataaaaaataaaacaaagtaggccatagatctaaatgttagagctgaaactacaaaacacttgaagtaaatacaggagtaaatcttcatgacctgagttaagcaaagccttcttagatgcaagaccaaaagcacaagtagcaaaagaaaaaagtagacaaactggacttcatcggagattaagatttgtgcttcaaaggacaccatcaaggaagtaaaaagacaaaccacagaatggagaaaatatgctgctgggactcgccacctcctgccgtgctggtgggggaagcgccaggctgtaggtggggtctggcctggtctctgcccagcaaactggctgtgctggcccgggcaatccctctcctcctgggtctgtttctggggctatggagttgagggtggagccagcagcaaggggacagggctcgctgggggacccgcctgcctgtgctgctgccaggagctctggaactcccaatacctggcagcttctttgcctctcagagttgcagcccttgggtgatgttgcagctcacatttccccatttctgattactgcttgccccacttcctcctgtgtcccctgcacccactggatgggacttggttagtcagctgcagcctgtctcctcacccagggggcgttgcccgaggtcggggcctgatctgcttcccctccacaggcaacccttccattctagttccttcccttcctcctccatgcaggcctcaggtgaacctgttcagccttgcccctccaggagctcagggtctgaaaaggaggtctacagactgtagagccagagagtgggcctggggccctaaagtgcgaggctttggcctggttgagggggtagggccttttggggcactctggttttgttggctccgttcctgaggtgacacccggatcaccccacgtgttaaaccccgagcgcgggctgccctgtgctggatattgcctacatccagcagccctctgagggatggtttctggcctgcctccgttgccagggtcctcactggtgtgaccaaccatctggcttttaacactaaaaagccccacatcctgaggaatcccaggacacagaaagtcctgggttttgtcagtgatgcagaaggttgggtggaaagtatgaaacccacacagagggatgacagcaccatttgtagcatcggatggaaatggcgtggatgatctgcctcgagtggtcactgtcgccatgttgcctgacgtggatgctggcatcaggacttgtgattcaccatggatcacatcactcaggctgcaactccgcacgctgcagtcatgcatgttagcagcacttgcctaggagtctgctgcagattcagtgttgggctttttgtctagacggtgctggtttcagtcttgacatcatgaatattgtgactgtatttcctaagagttcagatgatgaaaatgagaacggtgacaatgacagcaccagcgtgacccaggcatcactgggaaagaaggttaaatgaccatgttactttaatgacagatgcaaggacacacacaactggattagggaggaaagaacccaaacagaatgtactgcgcggtgtgcagaaaagaatgtgagaaatggcatatggagaaggggaggtggaggcacattggacattgagtctctcaagtctgaggcatatctttctaaatcaaggtttttttgacctccaaagagacagcagttctcagtcaaaaacagtggtcgcagaattagcttgggcgcactccttgaatggacgccattatcatcttgttcccttgattgcacggcaaaccaagaaggttacatttcctgattcggaggttacaaactaaaagtcctgtgtgtgaaccaaaggacgagggactttcagtaacagatgcattgcccctttacagtagtgctgaccctgtctgatccttccagcattcgtgcttccgagtgcgtcaagggctgcctgaagtcatggctacaggtttccgctagctcttaggtatgttgatttgaaaactggagtttcagatcgtcttctcgatttctgtgaagattttagtgaagccactgaagacgtaagagattgttgttctcttgtccaaatacaacctagactttgctcatttatctacatatttggcagacagtacacagttaatttgagcaaatttcatttagtccataagcttcttaccaatgaaaatgaaaacatcttacctgctaaatgttcacacctcgtacccgacactgtcacaaaggggtgtaatttgcttacctgtgataccagctttcataatgaaagttttgggtcacctttcggtttcctcaaaacatgccaaagcacttaatgagatctttgactttatagacaggagaatgcctcagacacgtttccacaagatgactatcattgctggccatagaaaagatgttaaaatgttggcttgccatgaaaactgctattttttaaagtgtgagacaagaaggatgtccttctctaatttggaaatgcattgagatgagaatggaaaaaggaattacaataaaatacaggccaggcacgttggcttacgcctgtaacccgagcactttgggaggccaaggtgggaggatcacttaaagccacaaattcaagaccaacctgggtaacaaagcaagacatcctcaccatctctgcaacaaaaaaataaaaataaaaaatacataggctgggcgcggtgactcacacctgtaatcccagcactttaggaggccgaggtgatcagatcacttggggtccgtcgggagttaaagaccagcctggcaaacatagtaaaacaccatatctactaaaaaatacaaacattagctaggtgtggtggtacatgtctgtagtcccagccactcgggaggctgaggcaggagaatcgcttgagcctgggaggtggaggttgcagtgagccgagatcacaccactgcactccagcctgggtgacagaatgagactccgtttc

SEQ ID NO: 15838 - protein, 106 aa, Homo sapiens [sequence omitted]

SEQ ID NO: 15839 - DNA, 2013 bp, Homo sapiens
  CDS (863)..(1585)
accaattaaggaaaaaaataacccacaaaagaatggctgggaattatctctcatggcctttattttcttcatattagatctccagaaatctatttgaattaattttgttatcatttgctaaatcactggaggccatgtctacactgccaagagaaaaaagttcaaaaactcatttcaaacagcttcctaccaaaccagtcggggatattctatacagtataccaatataaaaaatacagaagaattatttgttctgatcctattccaaattatataagttgataaccaaatgttaccattggaaaacgtcttggaactatttaagtctttctattgcactttttcttccaactttaaaagacaaaattttaaaatctgaccccagcccttgtgattgttcagtatataatcaatggtatcttacaaggactattttatttggaatcaatcaaatttgtttcctgccaacaataagttagattgttttttgcagttctcaagtaacaaatatgaggaccgaactctcattcaacatccaagcccttgcagtttgtgcaaatatatgtttagcaacaaaggacagacagaatccatcattagtatggctttttactggaatgttttgcatttattcattgttctttgcttggagagcaaatttagatatttcaaaaccacttttcatgggtgtggtggaacgattctggatgcagagcaatgcagtagtggccgtcctcgctggcattggtttggctgcagttgtgtctgagactaaccgagtgctgaatagcaatgggcttcagtgtctggaatggctttctgcaactctttttgtagtttaccaaatatattctaattacagatgatgacttacgagtggtatttacccaagatggcaaagcacttgccaggtgtcaactttcctgggaaccggtggaatcctgtggaaggaatattacctagtggaatggtcacatttaatctttatcattttcttgaagtaaataaacaaaaagaaacatttgtttgcataggaattcatgaaggcgacccaacctggaaaaagaactattcactttggccatgggggtcttgtgacaaattagttcctttggagattgtattcaaccctgaggaatggattaaacttacaaaaagtatctataactggaccgaagaatatggaaggtttgatccatcttcttgggaatctgtggccaatgaagaaatgtggcaagcgaggatgaaaacaccgttcttcatctttaacctggcagaaactgctcacatgccttcaaaagtgaaagctcaactctacgctcaagcatatgacctttataaggagattgtctatttacaaaaggagcacccagtgaattggcacaagaactatgccatcgcctgtgagcggatgctgcgtcttcaggcaagagatgcagatcctgaagtgctgttatcggaaaccatcagacatttccgtctgtactctcagaaagcaccgaatgacccacagcaagctgatattttaggtgctctaaagcacctaagaaaagaactgcaaagtctgagaaataggaaaaatgtctgagacagcaaaatatgaaaaacctgctcatcgttcagcttccaaaattctgaagtctggaagtttttccttcaagaaaagaaactgcataaaaaatttaaaactaagtcatctcccagatataagtatcatggtccagcagtactgtttaatggggtattcagtgactaaggtctgctatttatgcaaaattctgtttatcccgtgttaccaaattaccatttcagtgagaagcttttgaaaagtcttctgacttccagtctttcaccagatgactgcactggattagattctagaagagaatgaaccattttcatataactaaatattggtcatgaactgtgtaagggccatgcttattgggatcagttttaaagttaaattcttttgatattaataccagaccaaagacattttctgtttcctgg

SEQ ID NO: 15840 - protein, 241 aa, Homo sapiens
MMTYEWYLPKMAKHLPGVNFPGNRWNPVEGILPSGMVTFNLYHFLEVNKQKETFVCIGIHEGDPTWKKNYSLWPWGSCDKLVPLEIVFNPEEWIKLTKSIYNWTEEYGRFDPSSWESVANEEMWQARMKTPFFIFNLAETAHMPSKVKAQLYAQAYDLYKEIVYLQKEHPVNWHKNYAIACERMLRLQARDADPEVLLSETIRHFRLYSQKAPNDPQQADILGALKHLRKELQSLRNRKNV

SEQ ID NO: 15841 - DNA, 2255 bp, Homo sapiens
  CDS (306)..(2126)
atccctccctgcccaggccgcgagaatgaccactccacttgcaggcgaagcccctggccgctgtgctgaaggaggtgtgcgacgcgtggagcctgacgcactctgagcgttacgccctgcagtttgcggatgggcaccggagatacatcaccgagaataaccgcgcggagatcaagaatggcagcatcctgtgcctcagcacggccccagaccttgaggctgagcagctcttgggtgggctgcagagtaacagtcctgaagggcgccgggaagccctgaggcgccttgttccgctggcctcggacatgatctttgccagggaggtcatcagccgtaatgggctccagatactaggcaccatcattgaagatggggacgacctaggagaggtgctggccctcagcctgagggccttctcagagctcatggagcacggcgtggtgtcctgggagactctgagcatcccctttgtgaggaaggtggtgtgctacgtgaacatgaacctcatggatgcctccgtgcctcccctggcccttgggctgctggagagtgtgaccttgagcagcccagccctgggccaactggtcaagagcgaggtgcccctggataggctgctggtgcacctacaggtgatgaaccagcagctgcaaaccaaggccatggccctgctgacagccttgctgcagggggccagccctgtggaacgcaagcacatgcttgactatctttggcagaggaaccttcgccagttcatctataagaacatcatccacagtgcagcaccaatgggcgacgagatggctcatcacctgtacgtactgcaggctctcatgctggggctgctggagccgcgcatgcggacgcccctggacccctacagccaggagcagcgggagcagctgcaggtcctacgccaggctgccttcgaggtggagggggagtcctcgggtgccgggctaagtgctgaccgtcgccgttccctctgtgcccgagagttccgcaaactgggcttttctaacagcaacccagcacaggacctggagcgcgtgccccccggtctgctggccctggacaacatgttgtacttctccagaaacgcgcccagcgcgtacagccggtttgtgttggagaacagcagccgcgaggacaagcacgagtgcccctttgcccggggcagcatccagctgacggtgctgctgtgtgagctgctccgtgttggggagccctgctctgagacagcccaggacttctcacccatgttcttcggccaagaccagagcttccacgagctcttctgtgtgggcatccagctgttgaataagacctggaaggagatgcgggctacacaggaggacttcgacaaggtcatgcaggtggtgcgggagcagctggcccgcactctggccctgaagcccacttccctggagctcttccgaaccaaggtgaatgcgctcacttatggggaggtgctgcggctgcggcagactgaacggctgcaccaggagggcacactggctccccctatactggagctgcgggagaagctgaagccagagctcatgggcctgatccgccagcagcgcttgctccgcctctgtgaggggacgctcttccgcaagatcagcagccggcggcgccaggataagctgtggttctgctgcctgtcccccaaccacaagctgctgcagtacggagacatggaggagggcgccagcccgcctaccctggagagtctgcccgagcaactccctgtggccgacatgagggcactcctgacaggcaaggactgcccccatgtccgggagaagggctccgggaagcagaacaaggacctctatgagttggccttctcaatcagctatgaccgtggggaggaggaagcgtacctcaacttcattgccccctccaagcgggagttctacctgtggacagatgggctcagtgccttgctgggcagtcccatgggcagcgagcagacacggctggacctggagcagctgctgaccatggagaccaagctgcgtctgctggagctggagaacgtgcccatccccgagcggccaccccctgtgcccccaccccccaccaacttcaacttctgctatgactgcagcatcgctgaaccttgacagtgtggctggccatgggccacagctgcggccactgcagcagccatgaagggcagtgggtagaggagtgcaggcaccctgaccagcagagattgctgcagaaataaagtctgcttggctcttggg

SEQ ID NO: 15842 - protein, 607 aa, Homo sapiens
MIFAREVISRNGLQILGTIIEDGDDLGEVLALSLRAFSELMEHGVVSWETLSIPFVRKVVCYVNMNLMDASVPPLALGLLESVTLSSPALGQLVKSEVPLDRLLVHLQVMNQQLQTKAMALLTALLQGASPVERKHMLDYLWQRNLRQFIYKNIIHSAAPMGDEMAHHLYVLQALMLGLLEPRMRTPLDPYSQEQREQLQVLRQAAFEVEGESSGAGLSADRRRSLCAREFRKLGFSNSNPAQDLERVPPGLLALDNMLYFSRNAPSAYSRFVLENSSREDKHECPFARGSIQLTVLLCELLRVGEPCSETAQDFSPMFFGQDQSFHELFCVGIQLLNKTWKEMRATQEDFDKVMQVVREQLARTLALKPTSLELFRTKVNALTYGEVLRLRQTERLHQEGTLAPPILELREKLKPELMGLIRQQRLLRLCEGTLFRKISSRRRQDKLWFCCLSPNHKLLQYGDMEEGASPPTLESLPEQLPVADMRALLTGKDCPHVREKGSGKQNKDLYELAFSISYDRGEEEAYLNFIAPSKREFYLWTDGLSALLGSPMGSEQTRLDLEQLLTMETKLRLLELENVPIPERPPPVPPPPTNFNFCYDCSIAEP

SEQ ID NO: 15843 - DNA, 1898 bp, Homo sapiens
  CDS (2)..(1897)
aatgcaagaacaagatatgccattcttgcgaggagggccaggcatgtacaaggtagtgaagacgggaccttcaggtcacaacatcagaagctgccctaaccttagaggtatcccaattggaatgttagttctgggaaacaaagtcaaagcagtgggagaggtaaccaattctgaagggacatgggtgcaactggatcagaacagcatggtagagttctgtgagagtgatgaaggagaggcatggtccttagctagagacagaggcggaaaccagtacctccgacatgaagatgaacaagctcttctggatcagaattctcaaactcctcctccaagccctttctcagtgcaagcttttaataaaggggcaagttgcagtgcccaaggatttgattatggactcggaaatagcaaaggtgatcgaggaaacatctcaacatcttctaaaccagcctctacatcaggaaaatcagagctgtcctctaaacacagcagatcgcttaaacctgatggacgtatgagccggactactgctgatcagaagaagccaaggggcacagaaagtttatctgctagtgaatccctcatcttaaaatctgatgctgctaagttgaggtcagattcccacagtaggtcattatcccccaaccataacaccttgcagacattgaaatctgatgggaggatgccttctagctccagagctgaatccccaggaccaggttctcggttgtcatctcctaagccaaagactctcccagccaataggtctagcccatcgggtgctagttctccacgctcctcctcaccacatgataaaaatctacctcaaaaaagtactgctcctgttaagacaaagcttgatcctcctcgggaacgttctaaatcagactcttacacacttgatccagataccctccgcaagaagaaaatgcccctcacagaacctttgagaggacggtcaacgtcaccaaaaccaaaatcagtaccaaaggattctacagattcccctggatctgaaaatagagctccctctccccatgtggtacaggaaaacctccacagtgaggtggtcgaagtctgcacctcaagtactttaaaaacaaatagtctaacagacagcacctgcgatgacagcagtgaatttaagagtgtggatgaaggttcaaataaagttcattttagcattggaaaagcaccactgaaagatgaacaggaaatgagagcatctcccaaaataagtcgaaaatgtgctaatagacacaccaggcccaaaaaagaaaaatcgagttttcttttcaaaggagatggatccaagcctttagagccagccaagcaagccatgtctccttctgtggccgaatgtgccagagctgtgtttgcttccttcctctggcatgaaggcatagtacatgatgcaatggcttgttcttctttcctaaagtttcatcctgaactttccaaagaacatgctcctataaggagtagtttaaatagccaacaacctacagaggaaaaagaaaccaagttaaaaaatagacattcattagaaatatcatctgcactgaatatgtttaatattgcaccccatggaccagatatatctaagatgggtagcatcaacaaaaacaaggtattgtctatgcttaaggaaccacctctgcatgaaaaatgtgaggatgggaaaaccgagaccacttttgaaatgtccatgcataacacaatgaagtctaagtctcctcttcccttaactttacaacatttagtggctttttgggaagacatctctttggctactatcaaagctgctttccagaatatgatttttccaagtcctggttcctgtgcagttcttaaaaagaaagagtgtgagaaagagaataagaagtccaaaaagg

SEQ ID NO: 15844 - protein, 632 aa, Homo sapiens
MQEQDMPFLRGGPGMYKVVKTGPSGHNIRSCPNLRGIPIGMLVLGNKVKAVGEVTNSEGTWVQLDQNSMVEFCESDEGEAWSLARDRGGNQYLRHEDEQALLDQNSQTPPPSPFSVQAFNKGASCSAQGFDYGLGNSKGDRGNISTSSKPASTSGKSELSSKHSRSLKPDGRMSRTTADQKKPRGTESLSASESLILKSDAAKLRSDSHSRSLSPNHNTLQTLKSDGRMPSSSRAESPGPGSRLSSPKPKTLPANRSSPSGASSPRSSSPHDKNLPQKSTAPVKTKLDPPRERSKSDSYTLDPDTLRKKKMPLTEPLRGRSTSPKPKSVPKDSTDSPGSENRAPSPHVVQENLHSEVVEVCTSSTLKTNSLTDSTCDDSSEFKSVDEGSNKVHFSIGKAPLKDEQEMRASPKISRKCANRHTRPKKEKSSFLFKGDGSKPLEPAKQAMSPSVAECARAVFASFLWHEGIVHDAMACSSFLKFHPELSKEHAPIRSSLNSQQPTEEKETKLKNRHSLEISSALNMFNIAPHGPDISKMGSINKNKVLSMLKEPPLHEKCEDGKTETTFEMSMHNTMKSKSPLPLTLQHLVAFWEDISLATIKAAFQNMIFPSPGSCAVLKKKECEKENKKSKK

SEQ ID NO: 15845 - DNA, 3040 bp, Homo sapiens
gtgctttttgtggggaaagtgaggtttttttttatatacatatataattgatatctttaatttattggttgttaactgttgctgctgcctggtgtgtcctcagctcccagggctgcgggcccaccgtttacatgtgcacgccctgacccacctgcccacgccgacttgggaggatggtggcctgcagcggccaagaagccaaaaaaatttttttttttttcagatactgtgcttgatttttggagaggggagaggtggaaattcctaaatggctaatgcactgttccctccagcccgaatgcctcctgccaaaccccttttccctgctgcctctgtccccgcatccttgttctcccctgggtccgtaacattttttccgaggatgaacaggggacatctttaggtttctcaactcttgctttggtgtttgccgcagcatggaaaacagggcgcctaaggctgggagctggaagaaggggcattgggtacccaggcagagtcaggagaggtggtctttgaagtaagttagcagaaatcaaggggacccccgcctccttgggctggggaggggatttcaagatagttcatgactctctcccgctctgccttccctccttcctatctgctttttccagtaaactgcatggtgtccttccctggccttctcttggctcaaaggctgggagggagggaaggagagaagagttccaggcaatcccatcaatatagtccctacacctggggctgcggcccacatgtcttcacggaggcttccagcggtgcctgccactgaggcaggtgcggccccaggaccatcaccaggaatgcgaggccaccctggaccagaggtaggagcccaaggtccggcccttgctctttgattgtgggcagcctcctgccctctctgggtctcagttgccccatctgcagagcgaggaggcccgggctggttggtcttgaaggcccttttccatgccgacatcatgtcactctaggcctggggttcagtttcctgtggctggtgatgctgtggttaagtttgcttgaccccagcagcccgagggactgtctgagtcacagcacagcccctattgcgtggctgctggtgtgtggggtcagttccagcagatgaatgtgtcatgtggcacaccttgtcccttcccgcagcatttcctggttccccccagacccttgagcgctctttgggacccagaaggagtccttgcacagggaaggcttgaggtgagaagccgcttcccagactgtcagggccaggcctgggtctagaattcttgctgctgctttgcagagtcaacagcccatcagcccatgttttagaggggacactttggtcctcggttcccaccctcagcaagcaggcctccagcccgaggaaggcctctgccgtagtgacgttgccgtgtggggctgcgtggctgttccccttggctggagcattcagccaaccccagcgtcccccctgaggcgttcattggcagccccctaggactgcacgctggccccacggtaacccccccctcccccaccaacatcctgcagggatggggtcagtggttccaccttcacaggccactttgaagggtggattctttgaggcccctgccagtcggctccctgctcagctgctggcccgggcgacctgggactcagcaccaacggctgaagtttctcagctgggctctgacctggggtctggggcagggaacgaacatggtggctttgggctgagaggatgagggaggtctttcccaggtcaaattactttcctttggcctctgcctgaggctcgatttgcctctctggtccaatgggactgacactgttgtacaacctgacctgtggctgagggtgtctgggcttaagcatgtggaccccttcggtgtgtctggccttcctccatcgtcctgccctttggccttttggtttgaagccacaggtgtggcttctggccttagcagatggtatgcttgcggaccgcagcccagcatgccggtgggcccacagcccgagccagcccagagctgccggaagggccgcccttcccggccctggcggggtgctggacactggccattttcactagagtttgcctggcagggaccgatctctgccccctcctctccccaggcctctggctgcagtgatgccgcagaatcctgagccaggtgcctcctgagcagcccgtgcgcctctccacagcggcgtttgccacccaatgcggctcgcttcagatgctctgatgcagagggcacgcccatagtccctctgcagagcctcgcactggggccagggcaggcaccagccccaggcggccagtcggccacggcctgtcctcttcctcgtagcgtctgctcctcactttgtgttgatggtgacttaggagaatgttccgattttccatgatctaagcaggccacgtttaaaataacatcaaggcaagcgtacgtgtcaccctctgtactgacatctcctcccctgaaatgcttttcagtttgacagcccgtttcctagacaagtgcacctggggtttcaggaactttgtgttttttcggagggggttggtggggaggtcgggatgcctgggatcccttcctggagaggcaggctgtctctggaaaaagcctccattgcccacccgccaggcggaaagtcaccctgttcccagcgcggtttcagcatttaattttaagggagctaaggaagcgcggcgcgccccctggtggtggtaagccgccaacgcacctgggggctgcaaccccaccggacgggtggtccggagggaggctggagcggggaggcgaggagggggctgtgagtcctcagaggccctgggccaccacatttctggcagcgtttcccagacacccctctgctaggccatccctggatagcaagtgaattaacttaagggcactgtgatgggaagccttgcccccctcttttttttttttttttttttaatatctgcggaataaacccaatggttaatttttgaatgaataaaaggcttttgttgaat

SEQ ID NO: 15846 - DNA, 2399 bp, Homo sapiens
  CDS (296)..(2398)
aacggcccttcgcagcgggcgcgctgtcagacctcagtctggcggctgcattggtgggcgcgccgctctcgtctgatccctgctggggacggttgcccgggcaggatcctttacgatcccttctcggtttctccgtcgtcacagggaataaatctcgctcgaaactcactggaccgctcctagaaaggcgaaaagatattcaggagcccttccattttccttccagtaggcaccgaacccagcattttcggcaaccgctgctggcagttttgccaggtgtttgttaccttgaaaaatggctactggacaggatcgagtggttgctctcgtggacatggactgtttttttgttcaagtggagcagcggcaaaatcctcatctgaggaataaaccttgtgcagttgtacagtacaaatcatggaagggtggtggaataattgcagtgagttatgaagctcgtgcatttggagtcactagaagtatgtgggcagatgatgctaagaagttatgtccagatcttctactggcacaagttcgtgagtcccgtgggaaagctaacctcaccaagtaccgggaagccagtgttgaagtgatggagataatgtctcgttttgctgtgattgaacgtgccagcattgatgaggcttacgtagatctgaccagtgctgtacaagagagactacaaaagctacaaggtcagcctatctcggcagacttgttgccaagcacttacattgaagggttgccccaaggccctacaacggcagaagagactgttcagaaagaggggatgcgaaaacaaggcttatttcaatggctcgattctcttcagattgataacctcacctctccagacctgcagctcaccgtgggagcagtgattgtggaggaaatgagagcagccatagagagggagactggttttcagtgttcagctggaatttcacacaataaggtcctggcaaaactggcctgtggactaaacaagcccaaccgccaaaccctggtttcacatgggtcagtcccacagctcttcagccaaatgcccattcgcaaaatccgtagtcttggaggaaagctaggggcctctgtcattgagatcctagggatagaatacatgggtgaactgacccagttcactgaatcccagctccagagtcattttggggagaagaatgggtcttggctatatgccatgtgccgagggattgaacatgatccagttaaacccaggcaactacccaaaaccattggctgtagtaagaacttcccaggaaaaacagctcttgctactcgggaacaggtacaatggtggctgttgcaattagcccaggaactagaggagagactgactaaagaccgaaatgataatgacagggtagccacccagctggttgtgagcattcgtgtacaaggagacaaacgcctcagcagcctgcgccgctgctgtgcccttacccgctatgatgctcacaagatgagccatgatgcatttactgtcatcaagaactgtaatacttctggaatccagacagaatggtctcctcctctcacaatgcttttcctctgtgctacaaaattttctgcctctgccccttcatcttctacagacatcaccagcttcttgagcagtgacccaagttctctgccaaaggtgccagttaccagctcagaagctaagacccagggaagtggcccagcggtgacagccactaagaaagcaaccacgtctctggaatcattcttccaaaaagctgcagaaaggcagaaagttaaagaagcttcgctttcatctcttactgctcccactcaggctcccatgagcaattcaccatccaagccctcattaccttttcaaaccagtcaaagtacaggaactgagcccttctttaagcagaaaagtctgcttctaaagcagaaacagcttaataattcttcagtttcttccccccaacaaaacccatggtccaactgtaaagcattaccaaactctttaccaacagagtatccagggtgtgtccctgtttgtgaaggggtgtcgaagctagaagaatcctctaaagcaactcctgcagagatggatttggcccacaacagccaaagcatgcacgcctcttcagcttccaaatctgtgctggaggtgactcagaaagcaaccccaaatccaagtcttctagctgctgaggaccaagtgccctgtgagaagtgtggctccctggtaccggtatgggatatgccagaacacatggactatcattttgcattggagttgcagaaatcctttttgcagccccactcttcaaacccccaggttgtttctgccgtatctcatcaaggcaaaagaaatcccaagagccctttggcctgcactaataaacgccccaggcctgagggcatgc

SEQ ID NO: 15847 - protein, 701 aa, Homo sapiens
MATGQDRVVALVDMDCFFVQVEQRQNPHLRNKPCAVVQYKSWKGGGIIAVSYEARAFGVTRSMWADDAKKLCPDLLLAQVRESRGKANLTKYREASVEVMEIMSRFAVIERASIDEAYVDLTSAVQERLQKLQGQPISADLLPSTYIEGLPQGPTTAEETVQKEGMRKQGLFQWLDSLQIDNLTSPDLQLTVGAVIVEEMRAAIERETGFQCSAGISHNKVLAKLACGLNKPNRQTLVSHGSVPQLFSQMPIRKIRSLGGKLGASVIEILGIEYMGELTQFTESQLQSHFGEKNGSWLYAMCRGIEHDPVKPRQLPKTIGCSKNFPGKTALATREQVQWWLLQLAQELEERLTKDRNDNDRVATQLVVSIRVQGDKRLSSLRRCCALTRYDAHKMSHDAFTVIKNCNTSGIQTEWSPPLTMLFLCATKFSASAPSSSTDITSFLSSDPSSLPKVPVTSSEAKTQGSGPAVTATKKATTSLESFFQKAAERQKVKEASLSSLTAPTQAPMSNSPSKPSLPFQTSQSTGTEPFFKQKSLLLKQKQLNNSSVSSPQQNPWSNCKALPNSLPTEYPGCVPVCEGVSKLEESSKATPAEMDLAHNSQSMHASSASKSVLEVTQKATPNPSLLAAEDQVPCEKCGSLVPVWDMPEHMDYHFALELQKSFLQPHSSNPQVVSAVSHQGKRNPKSPLACTNKRPRPEGM

SEQ ID NO: 15848 - DNA, 2338 bp, Homo sapiens
  CDS (62)..(2053)
gcaggtggtttcggttgcggcagtcgcgtcccgggagcgtcgctgcctggtgaacgctagaatgggtactaggaaaaaagttcatgcatttgtccgtgtcaaacccaccgatgactttgctcatgaaatgatcagatacggagatgacaaaagaagcattgatattcacttaaaaaaagacattcggagaggagttgtcaataaccaacagacagactggtcgtttaagttggatggagttcttcacgatgcctcccaggacttggtttatgagacagttgcaaaggatgtggtttctcaggccctcgatggctataatggcaccatcatgtgttatgggcagacgggagctggcaagacatacaccatgatgggggcaactgagaattacaagcaccgggggatcctccctcgtgccctgcagcaggtttttaggatgatcgaagaacgccccacacatgccatcactgtgcgtgtttcctacttggaaatctataatgagagcctgtttgatctcctgtccactctgccctatgttggaccctcagtcacaccaatgaccatcgtggaaaaccctcaaggagtcttcattaagggcttgtcagttcacctcacaagtcaggaggaggatgcattcagcctcctttttgagggtgagaccaacaggattatagcctcccacactatgaacaaaaactcttccagatcacactgcattttcaccatctacttagaggcccattcccggaccttatcagaggaaaagtacatcacttccaaaattaacttggtggatctggcaggctcagagaggctggggaagtctgggtctgagggccaagtcctgaaggaagccacctacatcaacaaatcgctctcattcctggagcaggccatcattgcccttggggaccagaagcgggaccacatcccctttcggcagtgcaagctcacccacgctctgaaggactcgttagggggaaactgcaatatggtcctcgtgacaaacatctatggagaagctgcccagttagaagaaacgctatcttcactgagatttgccagcaggatgaagctagtcaccactgagcctgccatcaatgaaaagtatgatgctgagagaatggtcaagaacctggagaaggaactagcactactcaagcaggagctggctatccatgacagcctgaccaaccgcacctttgtgacctatgaccccatggatgaaatccagattgctgagatcaactcccaggtgcggaggtacctggaggggacactggacgagatcgacataatcagccttagacagatcaaggaggtgttcaaccagttccgggtggttctgagccaacaggaacaggaagtggagtccactttgcgcaggaagtacaccctcattgacaggaatgactttgcagccatttctgctatccagaaggcggggcttgtggatgttgatggccacctagtgggtgagcctgaaggacaaaactttggactcggagtcgcccctttctctaccaaacctgggaagaaagccaagtccaagaagacattcaaagagccactcagctccttggcaagaaaggaaggtgccagcagccctgtgaatgggaaggacttggattacgtttccacctccaagacccagctggtcccatcctccaaagatggggatgtcaaagacatgctttcgcgggaccgggaaacttccagcattgagccccttccctcagactccccgaaggaggaattacgcccaattaggcccgacaccccaccctccaaaccagtggcctttgaggagtttaagaatgagcaaggtagtgagatcaaccgaattttcaaagaaaacaaatccatcttgaatgaacggaggaaaagggccagcgagaccacacagcacatcaatgccatcaagcgggagattgatgtgaccaaggaggccctgaatttccagaagtcactatgggagaagcaagacaggaaacaccacaggttactgggctttccctcgctaaatcacaaccctgttccaggccagcttccatgagtgatctccagatgtcacttggtttattcctgcaagtcagatgcatcatctcactcacagggggtgcattttactcatttatttctcagaggagcagggcgtggtggcacacacttgtaatcctagcatcttgggaggctgaggcatgaaaatcgcttgagcccaggaggcagaggttgtagtgaggcaagattgcgccactgcactccagtctgggtgacagatgaagactgtcttggaaaaaaaatataataacaattaaacaattatttctcagagggc

SEQ ID NO: 15849 - protein, 664 aa, Homo sapiens
MGTRKKVHAFVRVKPTDDFAHEMIRYGDDKRSIDIHLKKDIRRGVVNNQQTDWSFKLDGVLHDASQDLVYETVAKDVVSQALDGYNGTIMCYGQTGAGKTYTMMGATENYKHRGILPRALQQVFRMIEERPTHAITVRVSYLEIYNESLFDLLSTLPYVGPSVTPMTIVENPQGVFIKGLSVHLTSQEEDAFSLLFEGETNRIIASHTMNKNSSRSHCIFTIYLEAHSRTLSEEKYITSKINLVDLAGSERLGKSGSEGQVLKEATYINKSLSFLEQAIIALGDQKRDHIPFRQCKLTHALKDSLGGNCNMVLVTNIYGEAAQLEETLSSLRFASRMKLVTTEPAINEKYDAERMVKNLEKELALLKQELAIHDSLTNRTFVTYDPMDEIQIAEINSQVRRYLEGTLDEIDIISLRQIKEVFNQFRVVLSQQEQEVESTLRRKYTLIDRNDFAAISAIQKAGLVDVDGHLVGEPEGQNFGLGVAPFSTKPGKKAKSKKTFKEPLSSLARKEGASSPVNGKDLDYVSTSKTQLVPSSKDGDVKDMLSRDRETSSIEPLPSDSPKEELRPIRPDTPPSKPVAFEEFKNEQGSEINRIFKENKSILNERRKRASETTQHINAIKREIDVTKEALNFQKSLWEKQDRKHHRLLGFPSLNHNPVPGQLP

SEQ ID NO: 15850 - DNA, 1945 bp, Homo sapiens
  CDS (128)..(1720)
gaaaagggggcgccgggccgctctagccggtgaggccggcgggctctctgtggctgcggctgggaaaccgcgcggaggaggtgcccggccggggaccagccctggtccagcgcctccctctctcagcatggacgaggagagcctggagtcggccttgcagacctaccgtgcgcagctgcagcaggtggagctggccttgggcgccggcctggattcgtctgagcaggctgacctgcgccagctgcagggggacctgaaggagctcatcgagctcaccgaggccagcctggtgtctgtcaggaagagcaggttgttggccgcgctggacgaagagcgcccgggccgccaggaagatgctgagtaccaggctttccgggaggccatcactgaggcggtggaggcaccagcagcggcccgtgggtccggatcagagaccgttcctaaagcagaggcggggccagaatctgcggcaggtgggcaggaggaggaagagggagaggacgaggaagagctgagtgggacaaaggtgagcgcgccctactacagctcctggggcactctggagtatcacaacgccatggtggtgggaacggaagaggcggaggatggctcggcgggtgtccgtgtgctttacctgtaccccactcacaagtctctgaagccgtgcccgttcttccaggagggaaagtgccgctttaaggagaactgcaggttctcccatgggcaggtggtctctctggatgagctgcgccccttccaggacccagacctgagctccctgcaggccggctctgcgtgtctggccaagcaccaggatggcctctggcacgcagcacgcatcaccgatgtggacaacggctactacacagtcaagtttgactcgctgctgctgagggaggccgtggtggagggggacggcatcctgcccccactgcgcacagaggccacagagtccgactcagacagcgacggtacgggtgactccagctatgccagagtggtggggtcggacgccgtggactctgcacagtcctctgccctctgtccgtctcttgcagtggtggggtcagatgctgtggactctgggacctgcagctctgcctttgctggctgggaggtgcacacgcgaggtataggctccagactcctcaccaaggtgggctatgagtttggcaagggtttgggccgacacgcggaaggccgggtggagcccatccatgctgtggtgttgcctcgagggaagtcgctggaccagtgtgtggagaccctgcagaagcagaccagggttggcaaggctggcaccaacaagccccccaggtgccggggaagaggggccaggcctgggggccgcccagctcctcggaatgtgtttgacttcctcaatgaaaagctgcaaggtcaggctcctggggccctagaagccggggcggccccagcggggaggaggagcaaggacatgtaccatgccagcaagagtgccaagcgggccctgagcctgcggctcttccagactgaggagaagatcgagcgaacccagcgggacatcaggagcatccaggaggctctcgcccgcaacgctggccggcatagcgtggcgtcagcccagctgcaggagaagctggcaggagcccagcgccagctggggcagctccgggctcaggaagccggcctgcagcaggagcggaggaaggcagacacccacaagaagatgactgagttctagagaccccacaagcactatggacgaagcgtgggaccccagcacgggctgccctcaggaagaccagtgttgcccgaggaggggccggactgctggcctggggcgtgcggacactgctgagtggagacagagctgcggggtcccatctggacacttacttgcccacctgccagtgtcttgggcatttccttggcaaggacattaaagtgatttcatcacagtgtc

SEQ ID NO: 15851 - protein, 531 aa, Homo sapiens [sequence omitted]

SEQ ID NO: 15852 - DNA, 2053 bp, Homo sapiens
tgtcttcatgcttgttgcttcagtaacaaaatagctgctgaggctgcaggcatcacaccacattcaaggcaagaaaaaggaagaagtgagaatggtgccagccacatcatcttctcttaccaggaaaggcaaaagtcttcctagatctcccagcaggtttctgcttatatgtcatttgctagaactgtgtgccatgaacaccctggatacaagcaaaaacctggaaaagcacatattttgcctgggtctgggctcattgccatcctgagagaaagcagacttctggtagcaaagaaggtggaaataggtattgggaaggaagctaacggtgtctgctacaacacagcttaataaatagtagttttatatgcataataaatagtagctactccttggcataaagtaaaaataatgataacaaaaatacttacataattatattgtgtaagtgcttactatgtgccaggaactgttctgaatgttttaaatatgttaactcatttaatcttcacagcaattttgtgaggtaaatgttactatccttggtttttttttttttcagtgtttttaattctactttatatacatacaattagattgatcataatccctggttcatgacataccctcattggtccatgcatggctctcttttgtttactttttaaatattagttattgtaaataatatatagacaccttcaaatcccctgtccaaaataaaattagtgtctggtcagcaatttgcatctggctgtatggtacccccaacacattttacttcctcccctggccaaggtgatcatcatccagaattctgagctcattatccttcactttgcttttcatacagttttagagttttcttgcatctatataaagtcctaaaaatatgtgtgtgtagtgtgtgtgtatatatatagagaaagatggttgtttttaactgtatgtctttagtacttttttcacttgatattacattgttaagattctaccatattgttgtatgttgctacagttgttccttttgactcctgtttaacactcccattgtgcaaatatgtagcagtttattcatcctgaaaccattctttactgaagtgcctataacattcttattgattttctcttttctggttattaactggtctaattctgttacattcaagctttgcatatgattctagcagttttccaatatcctttttaatgtctgcatgaagtcctgaatcttctgcaagacttgcaataatttcttgcaaacgacttgccttgtgttgtgtgttgtcagatatttacattgggctaccagagagaggctgaccaataaagattttgacttgatggggtcttggtgcacacagagggcccttcatttcagcaaggaggaatgttgcaggactgagggaggcagagaatgtcaattcacttgtgaatattttcttgtcatgatgacttttgtttccctgggcaacctggcaaatgcgggaactttgattgtgaacactcagatactcagaagtccctacatcttggcaaattctttaacacttctcccacaaaaggtagaatctaattcctctccccttgaatatggccttggtgactcacttctaaagaatagtgtccaggaaacgtgttgctatgggacttctgaggctagaataagaaaaggtgatacagcttccatctggcttgctctttttgggacactcattctggagaagccagtcatcaggctgtgaaggagcccaaaggagcccacacagagagaccatggagaagcccacatggatgggcactgaggcctccaactgacagccaagagcaatcgccaggcatctgagtgagtctcctaggagaggctacaaagtttgaggagaagtagcaagtcatcctggacatgccctgtctaaattccccacaatgtacaaaattaagctaactgtgctctgtctgaaggcctcacccacagaatccattcacataataaatggttatcttatgctactaagttttggggtaatttgttatagaaattaataaaattagt

SEQ ID NO: 15853 - DNA, 3152 bp, Homo sapiens
  CDS (77)..(2041)
attttcccccatcttaagaaaatttgctttgatttccattctcctactagcagcagctgatatcacctgtagacctatgagcattttatctattctatcattgaagttactgataaagatttttgttgttgttgttgttgttgggagaaatggatttcccacaactaatccctctggcccaccattaggagaaggtcatagagctgaatatatgactacaaggcctccaaatgttccccctaagccccagaaacacaggaagtccaggccccgctcacagtataatactaagttgtttaatggggatttggaaacattcgtcaaggactcaggacaggttattcccctcattgtggaaagctgtattcggttcatcaatctctatggtcttcagcatcaggggattttcagagtgtctggttcccaggtggaagtcaatgatattaaaaattcatttgagagaggtgaaaatcctttggctgatgaccagagtaaccatgatattaactcagttgctggcgttctgaagctctatttccgtgggctggaaaaccccctctttcctaaggaaagatttaacgatctgatttcttgtatcagaatagataatctctatgagagggcgcttcacatccgcaaactcctcctgactttgcccaggtcggtccttatagtgatgaggtacctctttgccttcctcaatcatctatcacagtacagcgatgagaatatgatggacccttataacctggccatttgctttggcccaacattgatgcctgtcccagaaatacaggatcaagtgtcttgccaggcacatgtgaatgaaattatcaaaaccatcatcatccaccatgagactattttcccagatgctaaagagctggatggccctgtttatgagaaatgtatggctggagatgactattgcgacagcccatacagtgagcacggtacattggaggaagtggaccaagatgctggtacagagccccacacaagtgaagatgaatgtgagccaatagaagcaatagccaagtttgactatgttgggcggtctgccagagaactatccttcaagaagggtgcctccctgctgctgtatcaccgtgcatctgaggactggtgggaaggcaggcacaacgggattgacgggctggtgcctcaccagtatatagtggtgcaggatatggatgatacgttttcagacactctgagccaaaaagccgacagtgaggccagcagtgggccagtcacggaagacaagtcctcatccaaggacatgaactccccgacagaccgtcatcctgacggctatttagccaggcaacgaaaaagaggagagccaccccctccagtaaggcgtcctggcaggaccagtgatggccattgcccgctccaccctccacatgccctttctaactcctcagttgacctagggtccccaagccttgccagtcacccccggggcctgctgcagaaccgtggcctcaacaatgacagtcctgagcggaggcgcaggcctggccatggcagcctgaccaacatcagccggcacgactccctcaagaagatcgacagccctcccattagaaggtccacgtcatcagggcaatacacgggcttcaatgaccacaagccactggacccagagacaattgctcaggatattgaagaaacgatgaacacagctttgaatgaactccgagaactggagagacagagcacagcaaagcatgcccctgatgtggtgctggataccctggagcaagtgaaaaactctcccacccctgccacttccacggaatctctcagccctttgcacaacgttgccctcaggagctccgagcctcagattcgacgtagcacgagctcctccagtgacacaatgagtactttcaagcctatggtggcacccagaatgggcgtgcagctgaagcctccagcccttaggccaaaacctgctgttcttccaaaaacaaatcctaccataggacctgccccacctccccagggtccaacagacaagtcatgcacaatgtaaaaaccagccaagcaaggccataaagggaggtgacttaaaaaagaaaatggattagtgacaaaagtcactgatccataactttccttagttttgtgcttataactggagatcttttggcttttctatgttgtcgaatgtaatgtctgagactagctaaattaacacgggcatttgtattttgtaatttttttaaataactggacatatgtcattttaaggacaatagaaacacttagacttacttgaaaatccaatgctgcaccacttgtaatgaaggcaacaccgctctccacattgtacagagcttcaggtttaatgtagcccagctgagtcagaaaggttgtgacctgaaggcagaagaacccgaatgccacacctcattggagtatagccagtgttggtctgtggcacttgggctgaaaggtgataatggcattgcgtggtagctgacaatgagcaccttcggttccatgtggagcggggtttagctcatgcaaaagacttgcaattgtctccatgggacgatcccagtgggactgtcagcccacagctcgagtgggttggatgcttgcctctttcctaacagttatttccccgggtccagcttaaagactcgatggaaggaggtagaacctctgctgttactgcttgaacttaacctgggaaaggagaggaagacaccatctccaaagctattaatgtcactccttttgcgagcatgattaggccccggagatttccaagtccccccatctacacttacaaacgattagaagggtttaattttaaagactttctggttacactactccacgaactcctccaaagatccgttattcaataactgcctagaaaatgtttccatctcctctaaatccctgtgttctcctctgtggaaatgaaggcagcaagaagcacctgaggccttggttcatgcagtgttctcttttgactaaatcacctaggttcctttaaacatgctacaaagcccaggcgtggtggtgcacacctgtactcccagctactcgggtggtttacacaggaggatggctttgggcctagtagttcgagtccagcctgggcagcatagtgtgagaccctgtctctt

SEQ ID NO: 15854 - protein, 655 aa, Homo sapiens
MSILSILSLKLLIKIFVVVVVVGRNGFPTTNPSGPPLGEGHRAEYMTTRPPNVPPKPQKHRKSRPRSQYNTKLFNGDLETFVKDSGQVIPLIVESCIRFINLYGLQHQGIFRVSGSQVEVNDIKNSFERGENPLADDQSNHDINSVAGVLKLYFRGLENPLFPKERFNDLISCIRIDNLYERALHIRKLLLTLPRSVLIVMRYLFAFLNHLSQYSDENMMDPYNLAICFGPTLMPVPEIQDQVSCQAHVNEIIKTIIIHHETIFPDAKELDGPVYEKCMAGDDYCDSPYSEHGTLEEVDQDAGTEPHTSEDECEPIEAIAKFDYVGRSARELSFKKGASLLLYHRASEDWWEGRHNGIDGLVPHQYIVVQDMDDTFSDTLSQKADSEASSGPVTEDKSSSKDMNSPTDRHPDGYLARQRKRGEPPPPVRRPGRTSDGHCPLHPPHALSNSSVDLGSPSLASHPRGLLQNRGLNNDSPERRRRPGHGSLTNISRHDSLKKIDSPPIRRSTSSGQYTGFNDHKPLDPETIAQDIEETMNTALNELRELERQSTAKHAPDVVLDTLEQVKNSPTPATSTESLSPLHNVALRSSEPQIRRSTSSSSDTMSTFKPMVAPRMGVQLKPPALRPKPAVLPKTNPTIGPAPPPQGPTDKSCTM

SEQ ID NO: 15855 - DNA, 2350 bp, Homo sapiens
  CDS (174)..(1070)
actgggcggcctgaggagcgcggaccccggcgctcggctcccggcgccatgtgagggggctcgggggccgcggggggccgggcgctccccgccggaggtgtgaacccacatccctgcccccagggccacctgcaggacgccgacacctacccctcagcagacgccggagagaaatgagtagcaacaaagagcagcggtcagcagtgttcgtgatcctctttgccctcatcaccatcctcatcctctacagctccaacagtgccaatgaggtcttccattacggctccctgcggggccgtagccgccgacctgtcaacctcaagaagtggagcatcactgacggctatgtccccattctcggcaacaagacactgccctctcggtgccaccagtgtgtgattgtcagcagctccagccacctgctgggcaccaagctgggccctgagatcgagcgggctgagtgtacaatccgcatgaatgatgcacccaccactggctactcagctgatgtgggcaacaagaccacctaccgcgtcgtggcccattccagtgtgttccgcgtgctgaggaggccccaggagtttgtcaaccggacccctgaaaccgtgttcatcttctgggggcccccgagcaagatgcagaagccccagggcagcctcgtgcgtgtgatccagcgagcgggcctggtgttccccaacatggaagcatatgccgtctctcccggccgcatgcggcaatttgacgacctcttccggggtgagacgggcaaggacagggagaagtctcattcgtggttgagcacaggctggtttaccacggtgatcgcggtggagttgtgtgaccacgtgcatgtctatggcatggtcccccccaactactgcagccagcggccccgcctccagcgcatgccctaccactactacgagcccaaggggccggacgaatgtgtcacctacatccagaatgagcacagtcgcaagggcaaccaccaccgcttcatcaccgagaaaagggtcttctcatcgtgggcccagctgtatggcatcaccttctcccacccctcctggacctaggccacccagcctgtgggacctcaggagggtcagaggagaagcagcctccgcccagccgctaggccagggaccatcttctggccaatcaaggcttgctggagtgtctcccagccaatcagggccttgaggaggatgtatcctccagccaatcagggcctggggaatctgttggcgaatcagggatttgggagtctatgtggttaatcaggggtgtctttcttgtgcagtcagggtctgcgcacagtcaatcagggtagagggggtatttctgagtcaatctgaggctaaggacatgtcctttcccatgaggccttggttcagagccccaggaatggaccccccaatcactccccactctgctgggataatggggtcctgtcccaaggagctgggaacttggtgttgccccctcaatttccagcaccagaaagagagattgtgtgggggtagaagctgtctggaggcccggccagagaatttgtggggttgtggaggttgtgggggcggtggggaggtcccagaggtgggaggctggcatccaggtcttggctctgccctgagaccttggacaaacccttccccctctctgggcacccttctgcccacaccagtttccagtgcggagtctgagaccctttccacctcccctacaagtgccctcgggtctgtcctccccgtctggaccctcccagccactatcccttgctggaaggctcagctctttggggggtctggggtgacctccccacctcctggaaaactttagggtatttttgcgcaaactccttcagggttgggggactctgaaggaaacgggacaaaaccttaagctgttttcttagcccctcagccagctgccattagcttggctcttaaagggccaggcctccttttctgccctctagcagggaggttttccaactgttggaggcgcctttggggctgcccctttgtctggagtcactgggggcttccgagggtctccctcgaccctctgtcgtcctgggatggctgtcgggagctgtatcacctgggttctgtcccctggctctgtatcaggcactttattaaagctgggcctcagtggggtgtgtttgtctcctgctcttctggagcctggaaggaaagggcttcaggaggaggctgtgaggctggagggaccagatggaggaggccagcagctagccattgcacactggggtgatgggtgggggcggtgactgccccagacttggttttgtaatgatttgtacaggaataaacacacctacgctccg

SEQ ID NO: 15856 - protein, 299 aa, Homo sapiens [sequence omitted]

SEQ ID NO: 15857 - DNA, 1959 bp, Homo sapiens
  CDS (133)..(753)
gaattaggggaggtggagggcagggctgggctcgaggagcaaggcaggcccggcgccaaagacgtgctgatccagctgcccgggcaggaggtctcccatgtggctgccgaccccgaggcccccgagatccagatgttcccacaggcccaggagagcccggccgccgtggaggtgctcacccaggtggtccatccctcagcagccatggcctctcaggagcgggcacaggtggccttcaagaagatggtccagggcgtcctccagtttgctgtgtgtgacacggccgcggccggccagttggtcaaggacggtgtcacccaggtggtggtgagcgaagagggtgccgtccacatggtcgccggggagggtgcccagatcatcatgcaggaggcgcagggcgagcacatggatctggtggagtccgacggggagatctcgcagatcatcgtgacagaggagctggtccaggccatggtgcaggagtccagtggcggcttctccgagggcaccacgcactacatcctgacagagctgcccccaggggtgcagggcgagccgggcctgtactcccacaccgtgctggagactgcggactcgcaggaactcctgcaggccggggccacgctaggcacagaggccggggccccaagcagggcagagcagctggccagcgtggtcatctacacccaggagggctcctcggccgcggcggcaattcagagccaaagagaaagcagcgaactccaggaagcatgagacgcgcggcacctttactcagcacagggcaggtgtgggaaggtccagcttcggtgggggaccgtgttccctgagcttcatctgaaaccttcaaaaccatgaggacaaggctcccgtgagctctgagcatgccctcccagcgagagtcacactggccaccagccaggcgcccacagagggtaccgtgggctgggcctcggggagcaggctgccaagtgcaggggagggccgggcgcaggccacacagggagctccggtccactgggggcccttcgatcagtggcctcccgcttcgtcctggccgctgtgctgaagagaagccaagtgttgttggtgtttttctctcccaagtgttttcccatttcagttatcagaaggtcatggccgtggggaaagtggtgaagatacccctcgtggcttggggtgcacctgcttgtgcagtcagcatgtagctgcctttccatttcattctctactgggctaaaaattgcagctacaagtgttaccatcttgaagcagtccacttccattcaattttttttttttaattttagaataacagtgtccccataccaaaggaagcctgctagctcatttcatgtataaatttcccatcttcaaacagtttaggtgtatttgttgctctggtcacattctgcataaaagaaatcctcttaagcctatggttaagaaaagccttgaagtttatattcagttaaaatatatgtcggtggagatagccagtgcttctaattttgacttagtttcatacagtaaagcctaaatgtgaaacgcacacgctggaagatattgttcctatcaatattttgctttttataacaagggtttgttcatattgatgccatttttgcaggatttcttcgtgatttctgtccatatgaaaatgctgacattaaacattaacacatggagaccgtgccctgtggccctgccgtggctgccagcatggtctgtgtttccttgtggattcacctgtggccctgctgtggccaccagcatggtctgtgtcctcgtggattcactgcagctgtcggatgcgagtttctgtcataatcatttgtttcctgatacaattgttcttattcttttccaaaactgtaaaataatctcctccctcaaatgcaaaggttgtttttgttctgtttctgttttctttgaaataaaattataacgttaaaagat

SEQ ID NO: 15858 - protein, 207 aa, Homo sapiens
MFPQAQESPAAVEVLTQVVHPSAAMASQERAQVAFKKMVQGVLQFAVCDTAAAGQLVKDGVTQVVVSEEGAVHMVAGEGAQIIMQEAQGEHMDLVESDGEISQIIVTEELVQAMVQESSGGFSEGTTHYILTELPPGVQGEPGLYSHTVLETADSQELLQAGATLGTEAGAPSRAEQLASVVIYTQEGSSAAAAIQSQRESSELQEA

SEQ ID NO: 15859 - DNA, 2252 bp, Homo sapiens
  CDS (329)..(1915)
ggaatattttgatctgaagagacatgagctgtgtggagattacattaaagacatcctttgccaggagtgctcgccctacgcagcccacctctacgacgccgaaaacacccagacgcctctccggaatctcccgggcctctgctctgattactgctctgccttccattctaactgtcactcagccatttccctgctgaccaatgaccgcggcctccaggagtctcatggaagggacggtacccgcttctgccacctcctggaccttcctgacaaggactattgcttccctaatgtcctgaggaacgactatctcaaccgccacctgggcatggtggcccaagatcctcagggctgcctgcagctctgcctgagcgaggtggccaacgggctgaggaaccccgtctccatggtccatgctggggacggcacccatcgcttctttgttgccgagcaggtaggagtggtgtgggtctacctccctgatgggagtcgcctggagcaacccttcctggacctcaagaacatcgtgttgaccaccccatggatcggggatgagagaggcttcttggggttggcttttcaccccaaattccgccacaatcgcaagttctatatttattattcgtgcctggacaagaagaaggtagaaaagatccgaattagtgagatgaaggtttctcgggctgatcctaacaaagctgacctgaaatcagagagggtcatcttggagattgaagaaccagcctcaaaccataatggcggacaacttctttttggcctggatggctatatgtacatattcactggggacgggggacaggctggagatccctttggcctgtttggaaatgctcagaacaaaagttccctgctgggaaaagttttaaggatcgatgtgaacagggcaggctcacatggcaagcggtaccgagtcccctcggacaatccatttgtttctgagccaggggcccaccccgccatctatgcctatgggatcaggaacatgtggcgttgtgctgtggaccgaggggaccccatcacgcgccagggccgaggccggatattctgtggggacgtgggccagaacaggtttgaagaggttgacctcattttgaaaggtggaaactatggctggagagcaaaggaagggtttgcatgttatgacaaaaaactttgtcacaatgcctctttggatgatgttctgccaatctatgcttatggccatgcagtggggaagtcagtcactggaggttatgtctatcgtggttgtgaatccccaaatctcaatggcctgtatatctttggagacttcatgagtggtcgacttatggctttgcaggaagatagaaaaaacaagaaatggaagaagcaggatctttgcctgggcagcaccacgtcctgtgccttcccagggctgatcagcacccatagcaagttcatcatctcctttgctgaagatgaagcaggggagctgtatttcctggcgacctcttacccaagtgcctatgcaccacgtggatctatttacaagtttgttgacccctcaaggcgagcacccccaggcaagtgcaaatacaagccagtgcccgtgagaaccaagagtaagcggatcccgttcagaccactcgccaagacagtcttggacttgctaaaggaacaatcagagaaagctgctagaaaatcttccagtgcaaccttagcttctggcccagcccagggtttgtctgagaaaggctcctccaagaagctggcttctcctacaagcagcaagaatacattgcgagggcctggtacaaagaagaaagccagagtggggccccacgtccgccagggcaagaggaggaagagcctgaaaagccacagtggcaggatgaggccatcagcagagcagaagcgagctggcagaagtctcccttgacctattggtcaaggtggccgacagggtgacgtgagagaggagagccacctcatcaaatgaaagtcactgctgaataaagaccttagaagtctgggaagccagggtagaggtggggcagggcggttttcctctccctgggaaatcttgctgtctactgaataaataaatgcaccttctctgtatgcagtgcttctgtgggagaccatatcccagattgctggtgcacctgggttatggtaagcactagtccatgagcctgcttggaatcacactggatgtctccgttttgtcttgtaaatgcctacaacctgaggtaataaatcaacatttgctc

SEQ ID NO: 15860 - protein, 529 aa, Homo sapiens
MVAQDPQGCLQLCLSEVANGLRNPVSMVHAGDGTHRFFVAEQVGVVWVYLPDGSRLEQPFLDLKNIVLTTPWIGDERGFLGLAFHPKFRHNRKFYIYYSCLDKKKVEKIRISEMKVSRADPNKADLKSERVILEIEEPASNHNGGQLLFGLDGYMYIFTGDGGQAGDPFGLFGNAQNKSSLLGKVLRIDVNRAGSHGKRYRVPSDNPFVSEPGAHPAIYAYGIRNMWRCAVDRGDPITRQGRGRIFCGDVGQNRFEEVDLILKGGNYGWRAKEGFACYDKKLCHNASLDDVLPIYAYGHAVGKSVTGGYVYRGCESPNLNGLYIFGDFMSGRLMALQEDRKNKKWKKQDLCLGSTTSCAFPGLISTHSKFIISFAEDEAGELYFLATSYPSAYAPRGSIYKFVDPSRRAPPGKCKYKPVPVRTKSKRIPFRPLAKTVLDLLKEQSEKAARKSSSATLASGPAQGLSEKGSSKKLASPTSSKNTLRGPGTKKKARVGPHVRQGKRRKSLKSHSGRMRPSAEQKRAGRSLP

SEQ ID NO: 15861 - DNA, 3159 bp, Homo sapiens
  CDS (281)..(2449)
acagtttcacccagcaagcgtgagaacaggtactgcttcctgagcaccgccagccaccggcaccaagaccggccacatcccagcactgcccacctctgctcccagccgccagatgacggaggctctcgccagaccctcagcacgcagagctggcttctgatagaagtgctcgggaaagaaagcaaagcgggaggtgcctctttagaaaccacgaagtgcacgcggcgtcgacagtgatcacgccacctggacagccagagtccaaggcataaggaggaaaatgagtctcctcaaagagcggaagccaaaaaagccacattacatccccaggcctccaggaaagcccttcaagtataaatgtttccaatgtccctttacttgcaatgagaagtcacatctttttaatcacatgaagtatggtctttgtaaaaactcgattactttagtatcagagcaggatcgagttcccaagtgccctaaatctaactcactagaccccaagcaaaccaaccagcccgatgccacggcgaagccagcctcttccaagtctgtcgcaaatggactctctgccttcgactcgaagcttcagcacagctctgccagggaagacatcaaggaaaacctggagctgcaagcccggggaacccacaggtgcctgggacagaagccagccctccacagggcatcaccctgcaagagcccagctccggaagccgccctcggtgcccagcctgctctggaaggcgcagctcggccttctgcatttgttccagtcggcgagcacagactcaaggggccagacaacgccgagccgcccgagacactggctttacacaaccccactgccaaggccgtgtctttccacaccaagtcggccttccacactcctggctacccctggaaagccggctcacctttccttccaccagagtttccacataaaatctcatctacaaaggggcttggggccatttccccttacatgcaccccacaatcccagagtacccgcctcacttttacacagagcacgggctggccaccatctactcgccttacctgctggctgggagctcgcctgagtgtgacgcacccctgctgtcagtctacggaacccaagacccgagacacttcctgcctcacccggggccgatccctaagcacctggctccatctccagccacatacgatcactacaggtttttccagcaatatccctctaacctgccgattccttacggattttacaggccagagtctgcattttcctcctatggtctcagactcccacctgtcactggcctcacccgagatcagagctctcacctgcttgaagaagccaccctggtctatccagcctcgagtccttccaggttaaacccttcggaccccaacagaaaacacgtcgagttcgaaagtccaattcctgaggctaaagactcctccaaggctgggcagagagacacggaagggtccaaaatgagcccccgcgcagggagtgcagccacgggctccccagggaggccgagccccaccgacttcatgcagacgagccagacctgcgaaggcctgtacgacctctccaacaaggcagcctccagcgcactgggaagactctacccgccagagcaaagcctcacagccttcaggcctgttaagaaaagcacagaatgcctacctgcccaggctgctgagaccacagcagagtctccagtaagcctcaatgttgtgaacggagaccctcctgctccgaccggaagcgcctctctcgtctcggaggccgcgccttccagtccggacgacagctccgggatgggccccctcaacctctccaagaaatcagagataaacctggcagccacccacgaacccacgtaccaaggcagcccccaggcggaaaccgccagcttctcagagctgcaggaccttccactcaatctctcggtgaaggacccctgtaacacccaggctccgaggcccgccttccccggtcgaccacgagctgcggaacctgctgctgctgttccacagaagactgggacagaaggttctgaggatgggcccagccaccctgagaccaagccaggcagcctcgacggtgacggggccccacccacaggccccggcgaggaggctccagacgcatgcgcggtggacagcagcgaggagcagaagcagacggcagccgtggccctgtgccagctggcggcctacagccccaggaacatccgggtgggcgatggggatgctgcggccccggaacctgcctgccggcaagacacacccacactgagctccatggagagccaagaggcccagtgtgacctcagacccaaaggacaaaagaggacaagtctaagggatgctggaaaatcccagcaaggagctaagaaggcgaagctgcaggacacggccagagtgttcacactacgaaggagggcccgggtgtcctaacgccgggttcacacgtgtgttcacagagctacggccacacacacgccttccaaggtggcaagctacaacacctctgaactggcactttcacatttttacaaatgcagctgctgcttctcaaaaaaacaaacaaacaaacaaacaaaaaaccctccaattcagtttttataaatattaagcatgaatattaaaaggtgcttctacttttggttgtaaaaacacctgaatgactctaagactgatatgtattttcaagtctaagctgtcttacagaagatcttttataaatgtttccttataaatatctcaccattacaacaaattgttttaactgtttttctattagctctagctgcatatttgatgtaaatgacaattactgaaaaaatgtcagaaaaaacattttcagtactaacattaaagtgccatatgtaaaaaagaaaaatgtgatttgtataactaaataacacacaaacatcaagaggctatttatacaaataatttatttccactagggaaagtgcattactggtgaaggtattatcaatttattctacttgcttataatgttacagtgaatgttctggcttactctgcctcactttccattccccaaaatgatgtgtatgttgctaattttccaataaactcatatgaaccataaggaaacataaaatgcaaataaacataaatctatgttatccttt

SEQ ID NO: 15862 - protein, 723 aa, Homo sapiens
MSLLKERKPKKPHYIPRPPGKPFKYKCFQCPFTCNEKSHLFNHMKYGLCKNSITLVSEQDRVPKCPKSNSLDPKQTNQPDATAKPASSKSVANGLSAFDSKLQHSSAREDIKENLELQARGTHRCLGQKPALHRASPCKSPAPEAALGAQPALEGAARPSAFVPVGEHRLKGPDNAEPPETLALHNPTAKAVSFHTKSAFHTPGYPWKAGSPFLPPEFPHKISSTKGLGAISPYMHPTIPEYPPHFYTEHGLATIYSPYLLAGSSPECDAPLLSVYGTQDPRHFLPHPGPIPKHLAPSPATYDHYRFFQQYPSNLPIPYGFYRPESAFSSYGLRLPPVTGLTRDQSSHLLEEATLVYPASSPSRLNPSDPNRKHVEFESPIPEAKDSSKAGQRDTEGSKMSPRAGSAATGSPGRPSPTDFMQTSQTCEGLYDLSNKAASSALGRLYPPEQSLTAFRPVKKSTECLPAQAAETTAESPVSLNVVNGDPPAPTGSASLVSEAAPSSPDDSSGMGPLNLSKKSEINLAATHEPTYQGSPQAETASFSELQDLPLNLSVKDPCNTQAPRPAFPGRPRAAEPAAAVPQKTGTEGSEDGPSHPETKPGSLDGDGAPPTGPGEEAPDACAVDSSEEQKQTAAVALCQLAAYSPRNIRVGDGDAAAPEPACRQDTPTLSSMESQEAQCDLRPKGQKRTSLRDAGKSQQGAKKAKLQDTARVFTLRRRARVS

SEQ ID NO: 15863 - DNA, 2466 bp, Homo sapiens
  CDS (147)..(833)
agttggtccgagctgccgaaaggtctggtcgcagagacaggaacgtgtaatcctcagcgtgctccagcccacagcttcgctctactgctcggcagggcagctggcctctgggcaccggcggcccctctgcctcgcggaaaagcctgatgaagtcctccgatattgatcaggatttattcacagacagttactgcaaggtgtgcagtgcacagctgatctccgaatcgcagcgtgtggcccactacgagagtcgaaaacatgcaagcaaagtccgactgtattacatgcttcaccccagggatggagggtgtcctgccaagaggctccggtcagaaaatggaagtgatgccgacatggtggataagaacaagtgctgcacactctgcaacatgtcattcacttcagcggtggtggccgattcccattatcaaggcaaaatccacgccaagaggttaaaactcttgctaggagagaagaccccattaaagaccacagcaacacccctgagcccacttaagcccccacggatggacactgctccggtggtcgcatctccctatcaaagaagagattcagacagatactgtgggctctgtgcagcctggtttaataaccctctgatggcccagcaacattatgatggcaagaaacacaaaaagaatgcggcaagagttgctttgttagaacaactggggacaaccctggatatgggggaactgagaggtctgaggcgcaattacagatgtaccatctgcagtgtctccctaaactcaatagaacagtatcatgcccatctgaaaggatctaaacaccagaccaacctgaagaataagtagtgaaagcatcaatcaagacataagaacaaaacattagcatttctctgccgtggagaattgcttatcaaccaccagaggaggcttctttcttgaacaataaacatttcttataaggattcacagattcacatacgactgatcttgatttttggaaatgaatgaggtttcttttttctttttcctttttttaattttggggtaagttatgatatttggatggatttttaaattctttcctgataacatatttagcacatgttctaaattataatcctatagcaaacagttggagcattattcaaactgaaagtggaaaaatttaaatttccaatttattctagatttcctcagagcataattattctgttaaatcctcaatgagtgtgatgtaaaccacctctatccagaaatatacattcttttctcatcatgttggacacagttgagggtgacatgcacagaactggaacagatcactattagtggaaaataccaaatggacaaataaataccagtcgttttctccgttctccaagcacaggagccaggtttaccatctgaacaatgaagacgaagggagtaaataaaggaagaattctcatcttttttcctgatcattcaaagaacagtttctcaaggttaagccaagtcctccttgcaagttgccaaataatagcttaggaaaagaattagtctgcctgcatgatgatcttcttaggcaaaaacgtcttcacagcccttgaccttggtgaatttttttccccaaaagcatccaaaagaagaattataaaccccagaacgagatggaaataaacaagtattttttttttatgatgtttggcctgaactgtgggctttaattgggggatactgatcgtttggaaagaagtgagaaaattctgaagaaatggcggccttgggctaggcggggtcccctatttcttctgtttctcactgaagtcctactgctgagccaagactcagtcactctggaaagagcatgaccgataaagaaaacagttcctttctgatggggagcgtctgagtgcagatcatgaggctctttctctaggtttaattcttttccatggtgaccggacttggtgtcttgtagcctggttacgaagtgggacgttgagcttctactgacgatgccctgcatggaccagctgggatctggctggggctgccctgtgtccctaacgaccataggcaatccatcttcttgtgtcagcaatttctggacacccactgttttccaccaagagctgaggtggcaacaactcagtgagcaataaacaaaatgacacagaaatgcacagtgttgttatgaaggagcctgtttacctgtgttcaaaatctggcaccattcccttgagcagggcccgctcaggagggaccaggtctgccagtttctgtgcctgcagagagacgaagccccacgagccacaccctactctacaagaggaaagggggttggatgggaagaatctattttgctgttttggaaagcacacagccgacctacaaacctcctgtgatggtgtttcttcggatgtgtaaaataaggctttatttgtcaattccgctgtaaaataagcattgtccgagtaaaaacagcagcaacaac

SEQ ID NO: 15864 - protein, 229 aa, Homo sapiens
MKSSDIDQDLFTDSYCKVCSAQLISESQRVAHYESRKHASKVRLYYMLHPRDGGCPAKRLRSENGSDADMVDKNKCCTLCNMSFTSAVVADSHYQGKIHAKRLKLLLGEKTPLKTTATPLSPLKPPRMDTAPVVASPYQRRDSDRYCGLCAAWFNNPLMAQQHYDGKKHKKNAARVALLEQLGTTLDMGELRGLRRNYRCTICSVSLNSIEQYHAHLKGSKHQTNLKNK

SEQ ID NO: 15865 - DNA, 2012 bp, Homo sapiens
taatgcattatttgttgactgacttgctcatacagtttgcatgactttgcagttctttggaaaagaggtattgctggaaagggagttttatctggaagtgtttcataaagcctactcttatctccattgtgccccaggcaaacttagccactgtgtcctctgtgctcactctctctctcttacacacttcattgccctccttctttcagtcttttttcctcagtatatctccagtgttgaacacagggcctggtagaccgtagacacttggtacatctttgtaaaagaataaatgatgaatgaatgatattgaggtctaaaagctcaggatgagaaagagaggcaaattcagttgcaagtctggcaagtggctcagttggaactcctcagcaggcctggcttgctagaggcctgtgttgagtttgtctgggacaggcctcctgtgaagactcacatctatgatccagcagtaacagctttcactgtcaggcacaaacttcttggctgactgaaagagcaacgtgttagtctctagaagtggagtggactggtgtctgaggtgagtatagcccacttggatacagatgcccagtatttggttacctgccctggggagaggactggtttctccctggtgtatagactcataggctggctacagacatatatacacacacacccaactactgatttgccttgggagtacactgtgcttacttaatattgtacaagctggtgaccagattaccttatgagaaggcacatgatgtagagtgtaaaatccactagatttgaatttagaagacacagattctacttccaactctggtttgccctgagtgtgtaaccttagaagggtcacttcactaggcctgacttctgtctgtaggatgaaggcattaggctacataatctcagagtttaaagctagaaatttccaaagctggaatgagttgcctttgtaggcagtgagtttccaatagctggctggaagttccagaacagggattcttagccttagaagtgtagttgtgttgggcctttccaacccgattgagtaactttcagctgatttggaatcccatcagcatgggccaaactgacgtcagcagggagacagacacagcattacgttgtttactctgtacaacctataagtgaattaatgacctgccatgtcactattttgatagcaacaacatcacccccattgtctaccatttatgaattatcttttttgggcttgtcaattgattggacatctgcatatcctagggcatgtgcagatccacatggtcacatgctcattctctgggtcttcctcctctgagaacctagcatgtggtgttctttgtgacttgcccatataaactgctattaaagccaaagactgggtgccctgtgctggctgtgtccctctgtgagagactcagatgctgaggtctccagtggcacttaatgctccaattgccattgtttgaagaacgacatctaccctgtagtcatacgtgcctatgttgacatctctttccacttactctttgcaattctcttctggtgtccatgctgctggtgatctttattaacagtaaaattcttcaagagctccatagccctgaaagaagaattatgccatcacttccattttactcaatttcatttttctggaagcattagaagatgagtgttcacattttccataaatttatttgcagcttgaaagaaggaaagattgagcgctgtggctcacacctgtaatcccagcactttgggaggccgaggcaggcagatcacctgaggttaggagttcaagaccagcctgcccaacatggtgaaactccatctctactaaaaatacaaaaactagctgggtgtggtggcacatgcctggaatgccagctcctcaggaggctgagccaggagaatcacttgaacccaggaggcggaggttgcagtgagccaagatcatgccactgcactccagcctgggtgacagagcaagactccatctc

SEQ ID NO: 15866 - DNA, 2163 bp, Homo sapiens
tctttaattatgtcacagtttgttgatgaatacattgcctttgcttcagttaaatcaagtaggatgcagtgactccaagtctgaggggtgcttcccaggaagagccaccccccacagccatttgcagagcattggagtaagttttaccttcatcccttagatgtgaatttgttatcctcactgtgacaatcccttatcacatggcttttagaaggattctcaaaaagctagactctcacattcaactttgcaattgcctggctgggtgttacgtttctttgcctcctattagagaccctatcagcatctaaaactagcgttgtttgaggatgttggagccaacggttctttgccagatagaactttgtgtgtccaaataaatggttcaaaatcatcaagcaaataaataccctggaataagagaagcctcatgaggatttgactccaaattgacttcctctgttctgcagtaagaagttaggaattaaaccaaaccttgcctgaggttcaggtatactcaaaagcaatgaggtgtggctcaggtgtgcgctggcaaggtcactgtgaagttcagccagaggctttgcaagcctgggcctgagaagccagacctcttagatccagaagggccaatggagctgggctggcctgctgccactcacaggcagagactctgccagcagaagggactctgctgtcagagctggagggcagcggaccacatggctgaggcccaaccacaggtctcctgactcaaaacctcttcccagggcttgtcctcctccctaaatatatgtgccccaaattgtcaccagatctcgggaaagcactggctttgtctgggataaacaccaactccacagcacacccagtcattaccagattggcagttgttgtctaggtcttgtggcttcttggggttttctcgggtgtctctctcccaaatctttcccctttcctttgattatattcacataaacattgagctttgtagccctcaagctctctcaagcataactcactttgtccctctctgtttccctatgcagtcgcctctccctctgctgtcagaggcccatccaactgctccagccctgtggctccagcgtctcctcctctctctttcccctgctctgtttctgggaagatctatctgagggtcctgaaggaggagactcgaggttgttctcttggacaaagaggtctgggtggatgacataattcactttacgtcttagaaaaataaccttgtggctcttggctctcctgggctgtcattttggttgcctaagggctctaggcagaaggccagggagcccagccccagcctagaacttgcagggctcagagagctgcagtgacggggtgtccgctgtgcctgccgccccccttgccatggactctacttgcagaacttcacagctgagaggctggccctgagattcccctttatgcctcccaaagcttgcgattgcttaattatacgctgctgcgtaccaatttccactttctctcccggtgtgttttgactgataactttgacttaacctcctgatgccagaaactatgttggctactgctctggcggcaggaagaggccggttccagggaaggctgaatgcctattgttctggatcattttgagaaaaaaaaagagataccttgaagaaagatgaagacaaaatatggaagggtgctgaatttacaaaaagcctaaggggaaaaaactcaaatgtccctcaggagtggaatgagtaaacaaatcatggcgtgttcacacaatggaatgctacctaccaataaaaaggaatgaactgcggatgcacacagaaacatgggtgaatccactaggcatcatgttgtgtaaaagaaagccaacttggccaggcgtggtggctcacgcctgtaatctcagcacgctggggaggctgaggcaggtggatcacttgaggtcaggagttcaagactagcctggccaagatgatgaaaccccatctctactaaaaatacacaaattagctgggcgtggtggtgcgtgcctgtaatcccagctgcttgggaggctgaggaagagaattgcttgaacccaggaggtggaggttgcagtgagccaagattgcaccactgcactccagcctgggtgacagagtgagactctgtctc

SEQ ID NO: 15867 - DNA, 2254 bp, Homo sapiens
  CDS (815)..(1390)
gaattggagtcactgccaaaatgggtttgtatttcaggtaatcagagcccagttgatcgaataccttcagagaataagcacctgtactcctgggtctggcggaggaggggctggggaactggactcctgggtctgagggaggaggggtggggcccgtactcctggatgtaagggaggagggtctgaggcctggactccagggtctgagggaggaggggctgggggcccagacttcgggtctgagggaggaggcagctagagtctggactcttacttaggtctgaaggaggcgggcctggggtctgcacccctgagctctgggggagcaggacctgtcggtccttggtcttctaaggcctgtcagcacttgggtacccggaggccttcacttacctgtgtgccttccctggttgttttcttgtctgagctgatttccaggctgcgaccaaaggtctctggggtgggaggcgcttgcgtttgactttgccgcagcatggaggagggggcgggagctgactcagctctttccagcgagccctcgtcagggcagggaggggacttggcctccttcaggaccacctgccccgtctagaatggactgaaactgggacagaacaggcaggccagtgggacctccaagtgcaggaggtggcgagcgagctgccagggcccctgctgtgccccactcaccccctctctcacttctttctccacccagatctgggcacgaaagcttctctctgtcccttggcttctgtgtggtcccagaagatatgcctcctccagtttcaaggctgcagacctgcagctggaaatgacacagaagcctcataagaagcctggccccggcgagcccctggtgtttgggaagacatttaccgaccacatgctgatggtggaatggaatgacaagggctggggccagccccgaatccagcccttccagaacctcacgctgcacccagcctcctccagcctccactactccctgcagctgtttgagggcatgaaggcgttcaaaggcaaagaccagcaggtgcgcctcttccgcccctggctcaacatggaccggatgctgcgctcagccatgcgcctgtgcctgccgagtttcgacaagctggagttgctggagtgcatccgccggctcatcgaagtggacaaggactgggtccccgatgccgccggcaccagcctctatgtgcggcctgtgctcattgggaacgagccctcgctgggtgtcagccagcccacgcgcgcgctcctgttcgtcattctctgcccagtgggtgcctacttccctggaggctccgtgaccccggtctccctcctggccgacccagccttcatccgggcctgggtgggcggggtcggcaactacaagttaggtgggtaagtagcacccccatccccagaacgactggcgcactgggcgttggagacacagggaccagcgtgcgtgctttcggccatgcctctggatgtcacatgaaggtgacatcatcagcaccgtgcagggctcagtgctaagtgacctccctggtccctgaaaacaaaccatggaaggaaggaggaggggattatttttcagatggacaaaaaggctcacagatgggaaggcattgggtggaggtcagtggggaaaccaggactggtccctggaagcctccaggagtgaagcttacactcagctcactggcttctcgccccagaagcctcccctgatcccccaggctgggctgcgctccccatacccagctcccacagtcgtttgagcctccaaagcccctcacccccgtgtggactttctgtgtaaatctgtctcccagtggcctcagctcagcagggcaggaaggagacagctgggtctcctgggcaaccaaggcagagggtgggcactggcgtgttgggacaggaatgtggccccagctgggggtgcattcaggtcctttcagccacatcctgtgaggtctcctgagggccaggccctgtgctggcagaagctggggacacagatgagtcagccccgagccctgctctcctgggtctcccaggctggtgggagccccagtattcggagctgcatgttctctggtgaggtgacccagggcattgtgaaagccttcacagaggccagaggcggtggctcacgcctgtaatcccagcactttgggaggctgaggcgggcagatcacgaggtcaggagatcgagaccatcctgattaacacagtgaaaccccatctctactaaaaatac

SEQ ID NO: 15868 - protein, 192 aa, Homo sapiens [sequence omitted]

SEQ ID NO: 15869 - DNA, 1947 bp, Homo sapiens
ttttttttttttgagacagagtctcactcttgcccaggctggagtggagtggcataaacacagctcactacggcctcaaccttctgggctcggatgattctcctgcctcagcctcctgagtagcaggaactgcaggtgtgagtcatcacactcagctaatttttttttttttttttttactttttgtagagatggggttctcactgcattgcccaggctggtcttgaatttctgggctcaggtgatcttcccacctcagcctcctgagtagctgggaccacaggtgcatgctaatttttaaaattttttgtttttaaatgctggtcttcaactcttgtccccaagtagctgggattggggcatgaggcactgtgctaacttcatgttgaaattgaattgccattctaacagtgttaagagatggggcctgtaagaggtgattaggctgtgagggctccactctccaagggcggagttaatgttatgaaagggtaagtccagcccgcttgtgcctctcttgccctccagtgttcaaagcaccatcttggaggtggaattcccaagtcggccagttcctggatcttggactgtccggtctccagaaccgtgagccaataaacctctgttccttgtaaatgagtcagcctcaggtattctcttgtagcagcacaaatggaggcagacacttccttcaccaatctcatgggaggcccactcctgtgagctgcctctagttccccaggccacagactccatcagggctcacctggagccgtccctgtctcacctggaagctctcccactcctctggccagcctgggcatctccacccaatatgagtgatggcgactgattcccttactttagcaagctgggaataaggaatgtttgcctgttcttattcaggggtctctgcatctccacacttgcacaggttgtgtgtacatacattttcctgtctttctggtaagcccctggggtggagctctgggccacagggcaggaaaactcagtgttgctaggaactgccagacattttcccggagtgagtgcagcatttacattcccaccagaagtgtgccaggttcttgtcatactgcgtcctcgccagcgcttggtgctgtcagtcttcttagtttccatttagagattcagtgtttaaattttgaacgtcttgggtgaacaccttggtttgagaaaaagaaatgacccaaagtgcagcacagaaagacagagctggaaaatatgagatgggatgagacaagaagatggagagtttagtatgacatccgcaatttacgagtaattccagaaggaggggaaagagaatatggggtggaggcaagtattcagagaaatacggctgagaactttcccaaaccaacaggagcccctgctccttaggttcaggaaccagcagctcccaagcagcatagttaaaaagctctacccaaacagtcacgtcttggtgaaagtacagaatctcatgacaaagagatcttaaggcagaaaagaaagagattatctggaaagaagaaaataagtagttgattaaaagcaacagtggaagccagaaagatagtaaataatatcttcaaagtcctgggagaaaatagtgatagcctagaattgtgtacccagaaaatccgtctttcaagaatgaggggccaggcgcagtggctcacgtctgtattcccagcactttgggaggccaaggcaggtggatcacctgaggtcaggagttcaagaccagcctgatcaacatggtgaaaccctgtctctactaaaaatataaaaattagctgggtgtggtggcatattcctgtagtcccggctgctcgggaggctgaggcaggagaatcacttgagcccaggaggcagaggttgcagtgagccaagattgtgccattgcactccagcctgggcaatagaatgagactctgtctc

SEQ ID NO: 15870 - DNA, 3577 bp, Homo sapiens
  CDS (1040)..(1558)
taaaggtacaaaaattagccgggcgtggtggcgggcacctgtaatcccagctactgaagagcctgaggcaggagaatttcttgaacccgggaggcagagcttgcggcggtgagccgagattgcacgccattgccctccagcctgggcaacaagagcgaaagccagtctcaaaaaacaaagaaagaaagaaaagcacctggggtgcgtctggagccgcgttctgggagccgcgcttcactcgctggtggtacagctccaaggctggagcttacttggcatttttgttgccacagaagcagatgggaaaattctaggtctgtaccttgtgtgaaaaaaggctaagtaaaattttgcatttacgtgacttctgtgtggagagcagcgtcggcttttgtttgtctttggttctgtttggagcacaactagggtagagaggggtttggaaggttaggacagcgccctcggacgccagtgagacccagaggcgccaccaggccctgaacctcatgaacctgcgcggccctaggcatgcggtgaaaacgggacgttgccctcgtcctagcaccagagcaggcaggggcaccgctgctggagagcgccaggtggctcctgcggaggacggtggcccagatcctaccctgacgaagaaaggttcacgtcgtgaacagatgcctggcatgagggaaccttccgtgtgttccacctgtcagcagtaaaaagccaacaaatacacggaaatgcagaggcgcctgtagctacatgcctcgctgtgctgctctaaccttggcctccagacgcgcgtaagaaggtgactgagtcagctgcatgatcgcactgcgctgtggatgccgttctgaagccttttacttctgtccttcccaccttccctacgtgggggagatgggaaggggtggaaggagacagggctggggctggccctaaacctttgagttttccattctcccaccatctttatattaagattccctctctcctcattgtcctgtttcctgaagacttttctcccaaaacttcaatcatgttcatcagtttgtctagaaacaaatgtaagggaagagttttagcaaacacgaaattctgcccatggaatcaattccatttcatgaagttgtgttgccaaagcaaacaacctcttcctgtgagccgcccggacagtgtgaattacagctctgcagcccagccagccctttcccctctcctttccttcctgcggcttcttggggcttcagcttctgtcacaggccttccttttggaatggctgtcacacatgcacacaggtggcagagtggaaagaccccagggctgacccctgatgctcttcgtacagctgcagagctagcaaactgggtgcaactggctctaaagagaatctatgcggagcagacggccccctggccacctcaagtccctgctggggctggcatttcccacatcattcatccgaatggaacagtggaaagggattgtgccccccatggcttccagggtcaacctccctcacggtctgcggttgccgtgggggtcagtttccacacataggggacctggaggtaccgtcattgcagggggacagcgcgggccacacgtcaccagggagaggccccggggacatcaccagggacacacccgggaggcttctgagtgcacagctcggatttacagtggctttctaggaaaacctcgggaagaaaactctaaggcaacacagggcaaccagcccgggtgggaggtcccgcagagttgatcttgccggatctgccggaccacgcacgtgtggtgtggcctcctttgtataggtagctcccaacaaaaccccgtagaagactgaagtgccgctgatcttaggctcttccgtgaacaagcatgtcctgaagttgggttcgacagtgaggaatgtgctggacgtttcaaggtgtctgcagcagtgccgggtgaccttgctggggatactgatgcaggcggccctccctccaccgctgcaccctgatctgtatgaaactcacatcctgtctccccagcactcagcacccttgtggctcccatcgccttagggtctcccctgctacctgcggccgcccctctgccaccctggggcccagtggccctttccacccctctcagtcactgggtccacctactctgggcttctcctcgtgccactgtccccggcttgactggccctggggaggaggggcccctcctgctgctgatccttcgggcctcggcttagagttgcacctgcccacccctgccagccgtggtcattgtgtctttacccatgggtggctctggccgctctcccccgccacagggcaggctccccggggccagaacttgccccaccattgaccacagcttcccagaagtctctccgcaattactttttgagttaatcgtttgaggagaccaaagtagacgtgaaacagaacagaatgcagtgtggagctgcgggaaaggcgaggaggaacagcagccttggcagttgagtgaccaggacccctcaaagggacagagccctttggccagatcacgtagatgccgctaccctggtgccctcgaatgctcacggaggggcagcacgattcccaaggacccactggcatcggctacgtggccctgtactcaacaggcctgttcagcctccactggcacgccggggaccacgctagggtcagcgtcagccacagagacggctagggcgctcttgactttccttggggaactggcattcctcttagagagatggggaagtcattaatctctgtgtccccagagggtggcatttggcagggccttgccctatgtggagggtcaagcttgcagggaaggctctccagactctaaattaaaagtgggaaggctaaaccatggagcaaagcacagagcgggtaggcagaactgagcccggcctcctgccctgaggcagcctgccgggtgccctagcagtgtggagccaccccagccctgagacgctgggtccctcgaggcccacctggaaagcccctctgcctgcctggcactggccagcatcacacgctgcttcctgaactgttgttttattgttatttattttcttaagtgctttttgtaacaaaggagttttacttattttcttaagatcagtgtcatagcttttgaaaatgcgtcgtttagagcattagaatgggtcgaccattctaatccagacatgacctccctgtgcatggttggctgtgttgcttgccataaacacgagctcaggcctcagagcatctgtctgcttccaagaacactgtttctaaatatagaagacgaaggggctggggcggtggctcaagcctgtaatcccagcactttggaaggccaaggtggacagattgcttgagcccgggagtttgagaccagcctgggcaacatagtgaaaccctgcctctacaaaaaagtacaaataattagctgggcgtggtggtgcacacctgtagcctcagctattcaggaggctgagcccaggaggtcgagtctgcagtaagccgtgattgcaccattgcactcagcctgggcgacaaaaaagagaag

SEQ ID NO: 15871 - protein, 173 aa, Homo sapiens
MFISLSRNKCKGRVLANTKFCPWNQFHFMKLCCQSKQPLPVSRPDSVNYSSAAQPALSPLLSFLRLLGASASVTGLPFGMAVTHAHRWQSGKTPGLTPDALRTAAELANWVQLALKRIYAEQTAPWPPQVPAGAGISHIIHPNGTVERDCAPHGFQGQPPSRSAVAVGVSFHT

SEQ ID NO: 15872 - DNA, 2387 bp, Homo sapiens
  CDS (148)..(1902)
attcaaatagaacatggggaagttcgctcccagttcaaattacgggcctgtaattcagtgtttacagcattagatcactgtcatgaagccatagaaataacaagcgatgaccacgtgattcagtatgtcaacccagccttcgaaaggatgatgggctaccacaaaggtgagctcctgggaaaagaactcgctgatctgcccaaaagcgataagaaccgggcagaccttctcgacaccatcaatacatgcatcaagaagggaaaggagtggcagggggtttactatgccagacggaaatccggggacagcatccaacagcacgtgaagatcaccccagtgattggccaaggagggaaaattaggcattttgtctcgctcaagaaactgtgttgtaccactgacaataataagcagattcacaagattcatcgtgattcaggagacaattctcagacagagcctcattcattcagatataagaacaggaggaaagagtccattgacgtgaaatcgatatcatctcgaggcagtgatgcaccaagcctgcagaatcgtcgctatccgtccatggcgaggatccactccatgaccatcgaggctcccatcacaaaggttataaatataatcaatgcagcccaagaaaacagcccagtcacagtagcggaagccttggacagagttctagagattttacggaccacagaactgtactcccctcagctgggtaccaaagatgaagatccccacaccagtgatcttgttggaggcctgatgactgacggcttgagaagactgtcaggaaacgagtatgtgtttactaagaatgtgcaccagagtcacagtcaccttgcaatgccaataaccatcaatgatgttcccccttgtatctctcaattacttgataatgaggagagttgggacttcaacatctttgaattggaagccattacgcataaaaggccattggtttatctgggcttaaaggtcttctctcggtttggagtatgtgagtttttaaactgttctgaaaccactcttcgggcctggttccaagtgatcgaagccaactaccactcttccaatgcctaccacaactccacccatgctgccgacgtcctgcacgccaccgctttctttcttggaaaggaaagagtaaagggaagcctcgatcagttggatgaggtggcagccctcattgctgccacagtccatgacgtggatcacccgggaaggaccaactctttcctctgcaatgcaggcagtgagcttgctgtgctctacaatgacactgctgttctggagagtcaccacaccgccctggccttccagctcacggtcaaggacaccaaatgcaacattttcaagaatattgacaggaaccattatcgaacgctgcgccaggctattattgacatggttttggcaacagagatgacaaaacactttgaacatgtgaataagtttgtgaacagcatcaacaagccaatggcagctgagattgaaggcagcgactgtgaatgcaaccctgctgggaagaacttccctgaaaaccaaatcctgatcaaacgcatgatgattaagtgtgctgacgtggccaacccatgccgccccttggacctgtgcattgaatgggctgggaggatctctgaggagtattttgcacagactgatgaagagaagagacagggactacctgtggtgatgccagtgtttgaccggaatacctgtagcatccccaagtctcagatctctttcattgactacttcataacagacatgtttgatgcttgggatgcctttgcacatctgccagccctgatgcaacatttggctgacaactacaaacactggaagacactagatgacctaaagtgcaaaagtttgaggcttccatctgacagctaaagccaagccacagagggggcctcttgaccgacaaaggacactgtgaatcacagtagcgtaaacaagaggccttcctttctaatgacaatgacaggtattggtgaaggagctaatgtttaatatttgaccttgaatcattcaagtccccaaatttcattcttagaaagttatgttccatgaagaaaaatatatgttcttttgaatacttaatgacagaacaaatacttggcaaactcctttgctctgctgtcatcctgtgtacccttgtcaatccatggagctggttcactgtaactagcaggccacaggaagcaaagccttggtgcctgtgagctcatctcccaggatggtgactaagtagcttagctagtgatcagctcatcctttaccataaaagtcatcattgctgtttagcttgactgttttcctcaagaacatcgatctgaaggattcataaggagcttatctgaacagatttatct

SEQ ID NO: 15873 - protein, 585 aa, Homo sapiens
MMGYHKGELLGKELADLPKSDKNRADLLDTINTCIKKGKEWQGVYYARRKSGDSIQQHVKITPVIGQGGKIRHFVSLKKLCCTTDNNKQIHKIHRDSGDNSQTEPHSFRYKNRRKESIDVKSISSRGSDAPSLQNRRYPSMARIHSMTIEAPITKVINIINAAQENSPVTVAEALDRVLEILRTTELYSPQLGTKDEDPHTSDLVGGLMTDGLRRLSGNEYVFTKNVHQSHSHLAMPITINDVPPCISQLLDNEESWDFNIFELEAITHKRPLVYLGLKVFSRFGVCEFLNCSETTLRAWFQVIEANYHSSNAYHNSTHAADVLHATAFFLGKERVKGSLDQLDEVAALIAATVHDVDHPGRTNSFLCNAGSELAVLYNDTAVLESHHTALAFQLTVKDTKCNIFKNIDRNHYRTLRQAIIDMVLATEMTKHFEHVNKFVNSINKPMAAEIEGSDCECNPAGKNFPENQILIKRMMIKCADVANPCRPLDLCIEWAGRISEEYFAQTDEEKRQGLPVVMPVFDRNTCSIPKSQISFIDYFITDMFDAWDAFAHLPALMQHLADNYKHWKTLDDLKCKSLRLPSDS

SEQ ID NO: 15874 - DNA, 2052 bp, Homo sapiens
  CDS (219)..(1943)
tctttccgccagcgcccgcaggacccggatgagagcgcacgcttcggggtctccgggaagtcgcggcgccttcggatgtggcggatgcggccgtgagccggcgggggaggtgctgctgctgcctccactgtactcagacccaggtagcacaggattgtccatcctccagcagcccagtgcaacggtgtgaactcagcctgtttcagagcctccacaccatgacctccaagaagctggcgaactcggtggctggctgtgctgatgacgctcttgctggcctggtggcctgcaaccccaacctgcagctcctgcagggccaccgcgtggccctccgttctgacctggacagcctcaagggccgggtggcactgctgtcgggtgggggctctggccatgagcctgcccatgctggtttcatagggaaggggatgctgactggggccatcgcgggagctgtgttcacctccccggcagtgggcagcatcctggcagccatcagggccgtggcccaggccggcacagtggggacgctccttatcgtgaagaactacactggggatcggctcaacttcggcctggcccgggagcaggcccgggctgaaggcatcccggtggagatggtggtgattggggacgacagcgccttcactgtcctgaagaaggcaggccggcgggggctgtgcggcaccgtgcttatacacaaggtggcaggtgctctggctgaggctggtgtggggctggaggagatcgcaaagcaggtgaacgtggtcaccaaggccatgggtaccctgggggtgagcttatcctcctgcagcgtccctggttccaaacccaccttcgagctctcagccgacgaggtggagctgggcctggggatccacggggaagctggtgtgcgccggataaagatggcaaccgccgatgagattgtgaaactcatgctcgaccacatgacaaacaccaccaacgcgtcccatgtgcctgtgcagcccggctcctcagttgtgatgatggtcaacaacctgggtggcctgtcattcctggaactgggcatcatagccgacgctaccgtccgctccctggagggccgcggggtgaagattgcccgtgccctggtgggcaccttcatgtcagcactggagatgcctggcatttctctcaccctcctgctggtggatgagcctctcctgaaactgatagatgctgaaaccactgcagcagcctggcctaacgtggctgcagtctccattactgggcggaagcggagccgggtagcccctgccgagccccaggaggcccctgattccactgctgcaggaggctcagcctcgaagcggatggcgccggtgctggaacgggtgtgcagcactctcctgggcctggaggaacacctgaatgccctggaccgggctgctggtgacggcgactgtggcaccacccacagccgtgcggccagagcaatccaggagtggctgaaggagggcccaccccctgccagccctgcccagctgctctccaagttgtctgttctgctcctggagaagatgggaggctcatctggggcgctctatggcctgttcctgactgcggctgcacagcccctgaaggccaagaccagcctcccagcctggtctgctgccatggatgccggcctggaagccatgcagaagtatggcaaggctgctccaggggacaggactatgctgggttctctgtgggcagcggggcaggagctccaagcctggaagagcccaggagctgatctgttacaagtcctgaccaaagcagtcaagagtgccgaagctgcagccgaggccaccaagaatatggaagctggagccggaagagccagttatatcagctcagcacggctggagcagccagaccccggggcggtggcagctgctgccatcctccgggccatcttggaggtcttgcagagctagggtgtgtgactgcctcccttggcctcagctcctctcactgctgtgctgaggtggcctttgtcacttccttctgccttccaaccctcaccttcccccggcctggccc

SEQ ID NO: 15875 - protein, 575 aa, Homo sapiens
MTSKKLANSVAGCADDALAGLVACNPNLQLLQGHRVALRSDLDSLKGRVALLSGGGSGHEPAHAGFIGKGMLTGAIAGAVFTSPAVGSILAAIRAVAQAGTVGTLLIVKNYTGDRLNFGLAREQARAEGIPVEMVVIGDDSAFTVLKKAGRRGLCGTVLIHKVAGALAEAGVGLEEIAKQVNVVTKAMGTLGVSLSSCSVPGSKPTFELSADEVELGLGIHGEAGVRRIKMATADEIVKLMLDHMTNTTNASHVPVQPGSSVVMMVNNLGGLSFLELGIIADATVRSLEGRGVKIARALVGTFMSALEMPGISLTLLLVDEPLLKLIDAETTAAAWPNVAAVSITGRKRSRVAPAEPQEAPDSTAAGGSASKRMAPVLERVCSTLLGLEEHLNALDRAAGDGDCGTTHSRAARAIQEWLKEGPPPASPAQLLSKLSVLLLEKMGGSSGALYGLFLTAAAQPLKAKTSLPAWSAAMDAGLEAMQKYGKAAPGDRTMLGSLWAAGQELQAWKSPGADLLQVLTKAVKSAEAAAEATKNMEAGAGRASYISSARLEQPDPGAVAAAAILRAILEVLQS

SEQ ID NO: 15876 - DNA, 2414 bp, Homo sapiens
  CDS (64)..(1203)
agtgctggcagtgacagcagcaccagcgggagtggcggggcgcagcaaagggagctggagcgcatggctgaggtcttggtcaccggggaacagctacggctcaggctgcacgaagaaaaggttattaaagatagacgtcatcatctcaagacctacccaaactgttttgtcgcaaaagaactgattgactggctgattgaacacaaagaggcttctgacagagagacggcaattaaactcatgcagaaattagcagaccggggcattattcaccatgtgtgtgatgagcataaggaattcaaggatgtcaaactcttctaccgctttagaaaggatgacggcaccttcccattggataatgaagtgaaggcctttatgagaggacagaggctatatgaaaagctgatgagccctgaaaacacactcctgcagcccagggaggaggaaggggtcaagtatgagcgcaccttcatggcatctgaattcctggactggctggttcaggaaggtgaggccaccacgaggaaagaggcagagcagctttgccaccggcttatggagcatggcatcatccagcatgtgtccaacaagcacccatttgtggacagcaatcttctctaccagttcagaatgaacttccggcggaggcgaagactgatggagctgctcaatgaaaagtccccctcctcccaggaaactcatgacagtcccttctgcctgaggaagcagagccatgacaatcggaaatctaccagctttatgtcagtgagccccagcaaggagatcaagatcgtgtctgcagtgaggagaagcagcatgagcagctgtggcagcagcggctacttcagcagcagccccaccctcagcagcagcccccctgtgctctgcaaccccaagtccgtgctgaagagacctgtcacctctgaggaactccttactcccggggctccgtatgcaaggaagacattcacgattgttggtgacgcggttggctggggttttgtggtgcgaggaagtaagccatgccacatccaggctgtagaccccagtggccctgcagccgcagcaggaatgaaggtctgtcagtttgtcgtctctgtcaacgggctcaatgtcctgcatgtagactaccggaccgtgagcaatctgattctgacgggcccacggacgattgtcatggaagtcatggaggagttagagtgctgagctcctgggcctcccagccctccagtggcctgtgggtgagggaagccagaatgacacaaagcaatgcaaagacaagattgccatgcaaatggatggttttggacatacgagtcttctccgcacatacatgtctaaagttgagttttatacactgaatgtggaagaaccgggtatcatatcttttttaaaaaatgtcagtgtagaaaacatttgggaaaccattttcctacatgatagaactgccttactagatttctatttgtagctctcattcattgttttttatcttagtttgcagaaaggtgttgaaatgcttctctagcccaaacagcgacatgctaaagtccccttcttcagagtcaatagagtagttgttaaaggttttaaattgtactttctccaaaattagcatgcagctatttaatagggaatctagatttcaccaagattcaaatcaaagcaacatttaaaggaataagacctgttcactagcattttcaagggggttctaaagcattcaagtgcttaaaagccataaaaaatgacttcttaattcctgcctttagtgtcaacttttaagttaatacaggtttcaattgtggcattaggaacaaaaaaaaccttgtgatgctatggttgggggtagttagggagagactacatgaaattgtgtgcccctattttctttctgatcctaaatcattttgttttataaatcagctatagcatctttctagaattaatcctgaatatgttgaatgttaaaatagagaagtttgtatatacacataattaaaaatcaacccttctggcaagatttcactttgaaggtgtctgtttttaagggaaggctaaaactttgctgatatgtgataaaacttgaactctaaattgcctccttagcctgaatttttactagctttctagtgtaacatattctaaggacatgacatgctgcttatttggggggattatttttcaccaaaatgatcatcttgtgttgtaacttttcagctcacttgtatatacgcacgttttcatttttggtctagaaaatagtgcattttggggctcagcgtgcagaggaaattcctcaaagtgccaaattaggcagtcaggaaatactaaattcttcattccaaataatggatctgaatgatgacgttaattttttatcatgcattaacaaaataaaatatgagaattgt

SEQ ID NO: 15877 - protein, 380 aa, Homo sapiens
MAEVLVTGEQLRLRLHEEKVIKDRRHHLKTYPNCFVAKELIDWLIEHKEASDRETAIKLMQKLADRGIIHHVCDEHKEFKDVKLFYRFRKDDGTFPLDNEVKAFMRGQRLYEKLMSPENTLLQPREEEGVKYERTFMASEFLDWLVQEGEATTRKEAEQLCHRLMEHGIIQHVSNKHPFVDSNLLYQFRMNFRRRRRLMELLNEKSPSSQETHDSPFCLRKQSHDNRKSTSFMSVSPSKEIKIVSAVRRSSMSSCGSSGYFSSSPTLSSSPPVLCNPKSVLKRPVTSEELLTPGAPYARKTFTIVGDAVGWGFVVRGSKPCHIQAVDPSGPAAAAGMKVCQFVVSVNGLNVLHVDYRTVSNLILTGPRTIVMEVMEELEC

SEQ ID NO: 15878 - DNA, 2656 bp, Homo sapiens
  CDS (28)..(735)
tccatttataaggagcctcctccaggaatgttcgttgtacctgatactgttgacatgactaagattcatgcattgatcacaggcccatttgacactccttatgaagggggtttcttcctgttcgtgtttcggtgtccgcccgactatcccatccacccacctcgggtcaaactgatgacaacgggcaataacacagtgaggtttaaccccaacttctaccgcaatgggaaagtctgcttgagtattctaggtacatggactggacctgcctggagcccagcccagagcatctcctcagtgctcatctctatccagtccctgatgactgagaacccctatcacaatgagcccggctttgaacaggagagacatccaggagacagcaaaaactataatgaatgtatccggcacgagaccatcagagttgcagtctgtgacatgatggaaggaaagtgtccctgtcctgaacccctacgaggggtgatggagaagtcctttctggagtattacgacttctatgaggtggcctgcaaagatcgcctgcaccttcaaggccaaactatgcaggacccttttggagagaagcggggccactttgactaccagtccctcttgatgcgcctgggactgatacgtcagaaagtgctggagaggctccataatgagaatgcagaaatggactctgatagcagttcatctgggacagagacagaccttcatgggagcctgagggtttagaccctgctcccatctccccttcccccactcaagagtcccagcagaatcccttccccccaccccagggatggagaggcactgtgtatctccctccagactcgaagtcatcctgcaagatggcaagaaccaagcaagctccgatcccagggtgtgggagtgggggcctgttcccggtctgacctccttggcactggagcatctggggcttcgttcatccattcatcccatatcaggggccaaggtacctttacaggagcacctagagcgagggcctttggcaaaaacaaaacaaccaacacacctctccacagggccagctccttagggataagtggaagatggaaattgcaattccaagagggagtgtgcccaaatgatttatggggatacctggaagggagcttggggtgggggctgtctgtgacacttaagcagtctgggtggttgtctatttgtctgtcttcagtcttgaagcagggcttcccaatgcccttttcctccctgccttccttcccccattatttcccacaggccagcataattttgtttttcctaatttatagtcactgttctagacagaccaaagagaaggaacagtggtggagtctaggctgctgatcagtaagctttacctagcacctgagcacctttctcccctcccctctttcctcacccttttctagatgtaagacagaaggtaaatgtgactgggacttaaccaaggtcttggtaaagcctgcatggcaccgtaagaagctgaaaatactgtttgttcccgcaatcactgatttgaaaagttcccaacacaggcagctgctgtgtatatgggattagagccactacatagaatagtctcttacagattttcataaatactagtcacaataagggtatttttcttgggggtggagtaagggggagactgatgctagtccttgttgtattttgttgggctgtccttgtgtattttcaccccagcctgtagtcctcctcacttcaaccccagggatttgtggggagcaagggtagccaatggcagagggggttggggctgggactctggaggctcctccccttctttctcttccttctgcctcccccgtgcccccagctgctcttgtcactgtctctgatgggtatttgcctggctttgttgcttctctatctgtatttagctgcagtgatcctttagctggttggctcagaaaaaaaaaaatgtgctttaggtgccctgtaatcctgggcatcaagggaatccatccttcccctttttgatatgttctccccgtacttccagatttattgttatggctcccagtgggtattggcgattcttgtgatgcagggcctcagtcagtgtccagccatgcataagggagaggatagtgtgtacctgccctgccctctgctatgaaggtctctgccttgtggatcatgggactccccttggaggatctgtgcaaaggggggctgggcacaaaggagaatgtcctatttgggagggcaggaagcaaaggaactggacagggattggtgggcttggggaacggaagtttatcttggatacccttgaagaggctgggtctcttcacatgaagatcgaaaagggaccctgcttccaatttccctcttccattcctcgagctactccagggcttagaagaatgctcttggtctgtgggtccagtgttgtctgtcatccatttaagtgttcccactttcaagtgacaatcctctccttggccctgccatagggcagagcatgtctggcatagcagcctgacttttatgccctaatcttgagttgaggaaatatatgcacaggagtcaaagagatgtctttatatctgactgtatataaatgaagtttttttgttttttttgttttcctttttggtgcaataaagtttgttttggc

SEQ ID NO: 15879 - protein, 236 aa, Homo sapiens
MFVVPDTVDMTKIHALITGPFDTPYEGGFFLFVFRCPPDYPIHPPRVKLMTTGNNTVRFNPNFYRNGKVCLSILGTWTGPAWSPAQSISSVLISIQSLMTENPYHNEPGFEQERHPGDSKNYNECIRHETIRVAVCDMMEGKCPCPEPLRGVMEKSFLEYYDFYEVACKDRLHLQGQTMQDPFGEKRGHFDYQSLLMRLGLIRQKVLERLHNENAEMDSDSSSSGTETDLHGSLRV

SEQ ID NO: 15880 - DNA, 2152 bp, Homo sapiens
tccctaaaaacagttgttttttttctgaagtgaaatacaggtggagactaacacatcccctctgcttgtcataagctcattatctggacctcaggtccttttgagagagcccaccaaggccttgggctctgagcccaggtgaccagcagacatctcaggtgtgtcagggcctgagagcactggacatggacatggtggaaggactgtccagccagtgtcctggaaatatttgaacacagtggggagacctagcagggttttcccttgaagtagttgactgaaaatctgcattccttttggacacaggtggaagataatgaagtaaaattgtctgagaaaacccagcaagcagtgaggggggatgagtctttcctgggcacttatctaacaggaggagaaggagcatatctttattccagcaatctacagtcctggcctgaggaagggaatgttcatttcttctctagtggccttctgttttctcactgtcgtcatggaagtatcatcatatccaaggatcacatgaattccatttccttctatgatggggattccaccagtactgttgctgctcttctcatagacttcaaaagctcattgcttcctcacctcccagttcatttccatggatcaagcaattttctgatgattgcccttttccccaaatcgaagatataccaagcattttactcagaggtcttctccctctggaaacagcaggataactcagggatctctttaaaagtgatccaggaagatggattatctgtggaacaaaagagattgtaagtggctgcttcagtatttgtgcttgcttccctaggctttgtgggtgtgctctctctgcaggatgcctcgcattatgtaacacaggggtcttggcttctgaaagggtcaacacagacatttcaatgctgccaacttgcaggtagccggtgcccttgggggaatagaaggcaagagagggccatgtgcagtgcctcacacttgtaatcccaacactttgggaggctgaggcaggaggatgaattgagcacaagaattagagactagcctgcctgggcaacatagtgagaccccgtccctacaaaaaataaaaaattagctgggtatggtggcacatgcctgtagtctcagctagtcaggaggccggggtggaagggttacttgagcccaggaattcaaggttgcagtgagccgtgaccatgccattgcacttcagcctgagtgatgaaacaagaccctttctcaaaaaaaaaaacgaaaaatgtccccactgccaggagccagtgtggctgtgaggggccacgtctcacagccctgacccgggccaagcatggtgttgggcgccgggcccgtctcacctgtcttggggggcgcccagtgtcttactctgtcaccccgggtagagtgcagtggtgcggtcctggctcactgcagccttgacctcctaggctcaggttatcctcccgcttagcaggtgggactacagaggttgcagaacttgaagctaatttaccttgtacatgtaaagtgcattttcctgatccaaacaagcttcactgttctcagctaacagtaactccagatgagggttactaccagggtggaaaatttcagcttgaaaccgaagttcccgatgtgtacaacatggtgcctcccaaagtgaaatgcctgaccaagatctggcaccccaacatcacagagacaggggaaatatgtctgagtttactgagagaacattcaattgacggcactggctgggctcccatgagaacattaaaggatgtcgtttggggattaaactctttgtttactgatttttgaattttgatgatccactgaatattgaagctacagaacatcatttgcaggacaaggaggacttccagaataaagtggacaactacatcacgcgttatgccagataataaaaggggacggttgcaggcccatggactgtgttacagtttgtctctaatgtgaaacagcaggaggtagccccacctcccatcctcacgctccctctcagtcccctggattgccccagtcctgtgaccatgttgccctgaagaagaccatcttcgtgactgctcattgtagatggggaattcaacataaatacagcaagaaaatgtgtttgggcttcttt

SEQ ID NO: 15881 - DNA, 1860 bp, Homo sapiens
acacacacacacacacacacacgtgggaatgtaaggcttattttcttggcacatggatattcaattgcttctttaccatttattgaaaagactgtccattctgcattgaattgcctttgtacctttgtcaaaaatcatttgtctctagaaaaatcaggtttccaggaaaaaaaagactaatgtgttccactagtgttcttatttttcagttgtgttggcttttgtagattctttgcatttccatataaattttagaattagcgtatcaatttcttaaggcttggtgggatttccattgggattgtattgagtctatataaataaataaaactgagagagaattaacattttattttatttttttgagatggagtctcactctgttgcctaggctgtcgtgcggtggtgcggtctcggctcactgcaacctctgcctccgagattcaagcaattctcctgcctcagtctcccaagtagctgggattacaaatgcctgccactacactcagcttaatttttttatttttaatacagacagggtttcaccaggttggccaggctgttctcgagctcttgacttcaagtgatcagccctcctcagcctcccaaagtgctgagattacgggtgtgagcccccgcgcctgactgagaattaacattttaatattgagtgttttgattaaagtcttctctaatttccttcataaatgttttgtagcttttgtacagtcttgcacatcttttatccaatttatcccggagtgtttcatattgtgatgcttttgtaaaatgatttagtttttaaaatttcagtatctgttcattgctattatatagaaatgtaattgatttttgtgtcttggtcttacattctataaccttcctaaattcttttattagttttagtaactttttaatagatttcatcaggttttccctgtaggttatcttattgtcagcaaataaagaaatttttacttgtttctttctgacttggatgccttttattttcttttctggtgctgctgactgggtcatacggtaggtgtgtgtttaactttttgagaaactgccagctgggtgcggtggctcacgcctgtaatcccagcacttttggaggccgaggcgggcggatcacgaggtcaggagatcgagaccatcctggctaacacggtgaaactccgtctctactaaaaatacaaaaaattagctgcgcgtggctcctgtagtctcagctactcgagaggctgaggcaggagaatggcatgaacccgggaggcggagctttcagtgagccgagatagcgccactgcagtccggcctgggcgaaagagcgagactctgtctcaaaaaaaaaaaaaaaaaaaaaagaaaagaaaagaaactgccaaactgttcccaagtagttgtaccgtttttcatttctattagcagttgtatgaattccggttgcccccagccttaccaacaattgggtatggtcactattttaaaatgtttcccccaactttttaattataaaatacacataatatacacataaccatctttttaaaacctctttataaaaacgttttggctgggtgcagtggctcacgcctgtaatcccagcactttgggaggctggggtgggcagatcacctgaggtcaggagttcaagaccagcctggccaacgtggtgaaaccccgtctctactaaaaatacaaaaattaaccaggcgtggtggcaggtgcctgcaatcccagctactctggaggctgaggcaggagaatcgctggaacccaggaggcagaggttgcagtgagctgagatcatgccattgcacttcagcctgggtgacaagagtgaaactccgtctc

SEQ ID NO: 15882 - DNA, 2024 bp, Homo sapiens
gtttgcacattgatgaacacatttaaaattttcttaaatcagttatgctccgaaaaatcctgttcctacaacttaaagcacatgtgtgattttttttccttaggttatccttccagaaatagaactgttgagtaaggaatatgcatgttaaaatttctagtattggtccggcgaggtggcttacgcctgtaatcctagcactttgggaggccgaggcgggcggatcacctgaggtcagaagtttgagaccagcctggccaacatggtgaaacccagtatctactaaaagcacaaaaattagctgggcgtggtggctggtacctgtaatccctgctactcaggaggccaaggcaagagaatctcttgaacccggcaggtggaggttgcagtgagccgagattgcgccattgcactgcaacctgggggactaggttgagactgtctcaaaaaaaaaaagaattaaaaaaatattaataacatggtcaagtctccctccaaaaaaggccaacgtaggaggattattttttctcacattcttttttacactatcttgagtctttaaatgacagacaatatcttattttttttcatttggattttcttggatactgttaaaggtgttcgtttttatgaacatcttttaaattatcttttaggactttttcgtatcttgctctttgttctttttttgatgtagagtctcagtctcactcaggttggagtgcactggtgggatatcataaaatgtttcttgggagatattggtggagttaaaaggaatatgtagggattctgtgacacaggattttagaaatctgggataacaagtacagtcttaggcagctgaaatgagactggatagcaagttccaaagggagaaatacctggaaaaaaaatctggagaaagagactgggaccaggtattatatatgagtgtttggaacactggaaagttatctaactaaaattttagttatttccttgggattagtttacctaattacgcaagagtatacatgtgtaaaatgtgtaggctaatcttcagtgtatagacattttaatatggtagtatcttaaaaatcggattttatcgggtttataaataaatctagttgaaaaagtcattttatctgaaggcttctcttaaaagtttttaaagaattacggggaaaattcccataaccgtgtacatttgtaatgtaacccacaactgcattaactcagtttctaacataacccgttgctgagctctagttaaccttgttggattatttgtgcatgtaatatgctgtgcaggctttagaaaataggttaacattattcgaaaacgatatgcgtaactgctgttgaattactcgcttgcattttctttattgggaatactgggacaaaatatagtgttaccttaaatggcatttgctgtatgttatattgctttatcaaaaagcaattaaccaaccatattgtggccaccagtcatgtaagagtatacatatttcatgactaacttttgggttttgggtactttttttaaccaacttctgataggattgcttaaatttgcattttatgattctaaaggaaatccttctagttaggaactagagtagaaactactgtttttggaagccacataaacctaccatccaaaaattccactgtgtcattctagtgtgtcaggcgagatgcgggttaagccagctgttgggccaaagtagtgaacaagccagacgaagtaaaaattaggccaggcgcagtggctcacgcctgtaatcccagcactttgggaggccgaggcgggcggatcacgaggtcaggagatggagactatcctggctaacacggtgaaaccccgcctctactaaaaaaaataacaaaaaattagccggtcgtagcggcgggcacctgtagtcccagctacttgggaggctgaggcagaagaatggcgtaaacccgggaggcagatcttgcagtgagcccagatcgcgccactgcacttcagcctgggcaacagagcgagactc

SEQ ID NO: 15883 - DNA, 2106 bp, Homo sapiens
  CDS (158)..(1330)
aaagccgttcgagtgtcctgtggaaggatgttgcgcgaggttctccgctcgtagcagtctgtacattcactctaagaaacacgtgcaggatgtgggtgctccgaaaagccgttgcccagtttctacctgcaacagactcttcacctccaagcacagcatgaaggcgcacatggtcagacagcacagccggcgccaagatctcttacctcagctagaagctccgagttctcttactcccagcagtgaactcagcagcccaggccaaagtgagctcactaacatggatcttgctgcactcttctctgacacacctgccaatgctagtggttctgcaggtgggtcggatgaggctctgaactccggaatcctgactattgacgtcacttctgtgagctcctctctgggagggaacctccctgctaataatagctccctagggccgatggaacccctggtcctggtggcccacagtgatattcccccaagcctggacagccctctggttctcgggacagcagccacggttctgcagcagggcagcttcagtgtggatgacgtgcagactgtgagtgcaggagcattaggctgtctggtggctctgcccatgaagaacttgagtgacgacccactggctttgacctccaatagtaacttagcagcacatatcaccacaccgacctcttcgagcaccccccgagaaaatgccagtgtcccggaactgctggctccaatcaaggtggagccggactcgccttctcgcccaggagcagttgggcagcaggaaggaagccatgggctgccccagtccacgttgcccagtccagcagagcagcacggtgcccaggacacagagctcagtgcaggcactggcaacttctatttggaaagtgggggctcagcaagaactgattaccgagccattcaactagccaaggaaaaaaagcagagaggagcggggagcaatgcaggagcctcacagtctactcagagaaaaataaaagaaggcaaaatgagtcctccccatttccatgcaagccagaacagttggttgtgtgggagcctcgtggtgcccagcggaggacggccaggaccagctccagcagctggggtgcagtgcggggcgcagggcgtccaggtccagctggtgcaggatgacccctccggcgaaggtgtcctgccctcggcccgcggcccagccaccttcctccccttcctcactgtggacctgcccgtctacgtcctccaggaggtgctcccctcatctggaggccctgctggaccggaggccacccagttcccaggaagcactatcaacctgcaggatctgcagtgacggcagcctcggcctgggcaggcccaaggccacggtctaggacacaccttccctgagactcatgacatgagcctggggagacctcatttggtttccgttcagaagaccagcgtagcccttttgagacttttgggtacatttatcaaaaatgttttccttttgttttaccaggaatgagttcgggctatactctttgaaactgcctttgtgagcaaagtgctttggcaaggcaagggtctccctcagcagggctaggtgcactacagcctctttccccgtgtcccgttggatctgagctgtgtagcacttgttgcattacaaagaaaaagacttctgcaggaaatagggtagagaacaggctgtctagtcagatgcagcttgatctgtggcaaaaccaagtgtggtctttcagcttcagtgtgttagcatcccagcacctgggatggggtttgtgggcaagttgattttgccacactgtagggcccaggtggtcccattgccaccgtgaagccaaattctagcccaagtctggtagagcagtcgggcagctagttttcgggggaggatgatgtggtgggacagaggacctcagtggcctattacggagccctcttcccagactaaattcatagccgagagctcggggggatggtagagttaaaatttaaaataattttctaaattctgtatttggatattagtgtttaagtggtaatttggcaacagtttataaagtgatgttctgaataccataaattatgtgtaggactgtg

SEQ ID NO: 15884 - protein, 391 aa, Homo sapiens
MKAHMVRQHSRRQDLLPQLEAPSSLTPSSELSSPGQSELTNMDLAALFSDTPANASGSAGGSDEALNSGILTIDVTSVSSSLGGNLPANNSSLGPMEPLVLVAHSDIPPSLDSPLVLGTAATVLQQGSFSVDDVQTVSAGALGCLVALPMKNLSDDPLALTSNSNLAAHITTPTSSSTPRENASVPELLAPIKVEPDSPSRPGAVGQQEGSHGLPQSTLPSPAEQHGAQDTELSAGTGNFYLESGGSARTDYRAIQLAKEKKQRGAGSNAGASQSTQRKIKEGKMSPPHFHASQNSWLCGSLVVPSGGRPGPAPAAGVQCGAQGVQVQLVQDDPSGEGVLPSARGPATFLPFLTVDLPVYVLQEVLPSSGGPAGPEATQFPGSTINLQDLQ

SEQ ID NO: 15885 - DNA, 2067 bp, Homo sapiens
  CDS (1140)..(1676)
gctttactgggtcccttctctcttcattcacagggggccctccctttagatctctgtctattcagacaggcggccctttctcagatgggatatagacagatgatcttttgaaataagtgagaagatttttaagattagaataatatgaagaatatctttctggccgggcgacgtggcttatgtctgtaatcccagcactttgggaggctgaggtgaggggattgcttgaacccaagagttcaagaccagcctgggcaacatggcgagaccctgtctcgaagaaaatacaaaaattagctgcatgtggtggtgcatgcctgtagtcccaggtactgaggaggctgaggcaggaggatcctttgagcccaggaggtcgaggctgcagtgagccgtgatcacaccagtgcactgcagcctgggcaacagcatgagaccctgtctcagaataaaaaagtgtttctttctcagaagacagagtacagaagatgtttgtttttgttttttctctctctgtgctacaggggaaggtgtggctcattgactttaatccatttggtgaagtcacagattcactgctgttcacctgggaagaactgatatctgagaacaacttaaacggcgattttagtgaagttgacgctcaagagcaggtacaacatttttaagacagatacagtgtaaacctttccagtctactgactgactgcttgttcttcagacgcataggtaggcggcaatggccaggacccttgggaagcgcagagtgtaacacagctttactaatagctaacctgcccatggtggtggtcaaagaagggggccccacttaactttatatacagaagtcaggatcatctgatcagtttttttagttctttttctgagcttcttctgtcacacccacctggaggaatcttggtcccagatcagctcatgcatctgttccttctgaccccagccccagctgctgaggccgacagagaagttacacacgtgcagcccagcggattcctgtcagctttctcctccatttccacggtgactggctcacgccttgatgcttctcagtctcccatcattccttccttcctctcagcagatgatttaacttgctgtttcccggaaaagggaacccactgatgagaattccctcggttgatttctcatcacacctacaagcttgtccgtcccttcctgagtctaatctcccccctccatacacttgtgtccccctctgtcatctccccactctggacactgtgtcctcctctgtcacctcccccctcagtacactgtgtcttcctctctcacctccccctcaggacactgtgtcctcctctctctcacctccccctcaggacaccgtcctcctctctcacctcccactctggacactgtgtcctctctcaccgcccactccggacactgtgtcctcctctctctcacctccccctcaggacactgtcctcttctcgcacctcccactctggacactgtgtcctcctctctcacctcccactccggacactgtgtcctcctctctcacctccccctcaggacaccgtgtccccctctctcacctccccctcaggacactgtgtcctcctcctctttctccagatgccctctgctctttttgcaattcttcctctctatcaactctgtccatccggatttagtcatgttcagatacctcccatccgaaaaaaacaaaacattgttcaacccggtttcttcacccagccactctctcctttcctgccagcttcacagccagactttcctgaaacaactttgtagtgctgttttctgcccataaaagtaacatgtccaagacgggcggatcaggaagtcagggtatcgagaccatcctggctaacacggtgaaaacctgtctctactaaaaatacaaaaaaaaaattagccaggcgtggtggcgggcgcctgtagtcccagctacttgggaggctgcggcaggagaatggcatgaatccgggaggcagagcttgcagtgagccgagattgtgccactgcactccagcctgggcgacagggcaagactgtctc

SEQ ID NO: 15886 - protein, 179 aa, Homo sapiens
MRIPSVDFSSHLQACPSLPESNLPPPYTCVPLCHLPTLDTVSSSVTSPLSTLCLPLSPPPQDTVSSSLSPPPQDTVLLSHLPLWTLCPLSPPTPDTVSSSLSPPPQDTVLFSHLPLWTLCPPLSPPTPDTVSSSLTSPSGHRVPLSHLPLRTLCPPPLSPDALCSFCNSSSLSTLSIRI

SEQ ID NO: 15887 - DNA, 1966 bp, Homo sapiens
  CDS (170)..(910)
atttggggtttcggttcccccccttccccttccccggggtctgggggtgacattgcaccgcgcccctcgtggggtcgcgttgccaccccacgcggactccccagctggcgcgcccctcccatttgcctgtcctggtcaggcccccaccccccttcccacctgaccagccatgggggctgcggtgtttttcggctgcactttcgtcgcgttcggcccggccttcgcgcttttcttgatcactgtggctggggacccgcttcgcgttatcatcctggtcgcaggggcatttttctggctggtctccctgctcctggcctctgtggtctggttcatcttggtccatgtgaccgaccggtcagatgcccggctccagtacggcctcctgatttttggtgctgctgtctctgtccttctacaggaggtgttccgctttgcctactacaagctgcttaagaaggcagatgaggggttagcatcgctgagtgaggacggaagatcacccatctccatccgccagatggcctatgtttctggtctctccttcggtatcatcagtggtgtcttctctgttatcaatattttggctgatgcacttgggccaggtgtggttgggatccatggagactcaccctattacttcctgacttcagcctttctgacagcagccattatcctgctccataccttttggggagttgtgttctttgatgcctgtgagaggagacggtactgggctttgggcctggtggttgggagtcacctactgacatcgggactgacattcctgaacccctggtatgaggccagcctgctgcccatctatgcagtcactgtttccatggggctctgggccttcatcacagctggagggtccctccgaagtattcagcgcagcctcttgtgtaaggactgactacctggactgatcgcctgacagatcccacctgcctgtccactgcccatgactgagcccagccccagcccgggtccattgcccacattctctgtctccttctcgtcggtctaccccactacctccagggttttgctttgtccttttgtgaccgttagtctctaagctttaccaggagcagcctgggttcagccagtcagtgactggtgggtttgaatctgcacttatccccaccacctggggacccccttgttgtgtccaggactccccctgtgtcagtgctctgctctcaccctgcccaagactcacctcccttcccctctgcaggccgacggcaggaggacagtcgggtgatggtgtattctgccctgcgcatcccacccgaggactgagggaacctaggggggacccctgggcctggggtgccctcctgatgtcctcgccctgtatttctccatctccagttctggacagtgcaggttgccaagaaaagggacctagtttagccattgccctggagatgaaattaatggaggctcaaggatagatgagctctgagtttctcagtactccctcaagactggacatcttggtctttttctcaggcctgagggggaaccatttttggtgtgataaataccctaaactgcctttttttcttttttgaggtggggggagggaggaggtatattggaactcttctaacctccttgggctatattttctctcctcgagttgctcctcatggctggactcatttcggtccctttctccttggtcccagaccttgggggaaaggaaggaagtgcatgtttgggaactggcattactggaactaatggttttaacctccttaaccaccagcatccctcctctccccaaggtgaagtggagggtgctgtggtgagctggccactccagagctgcagtgccactggaggagtcagactaccatgacatcgtagggaaggaggggagatttttttgtagtttttaattggggtgtgggaggggcggggaggttttctataaactgtatcattttctgctgag

SEQ ID NO: 15888 - protein, 247 aa, Homo sapiens
MGAAVFFGCTFVAFGPAFALFLITVAGDPLRVIILVAGAFFWLVSLLLASVVWFILVHVTDRSDARLQYGLLIFGAAVSVLLQEVFRFAYYKLLKKADEGLASLSEDGRSPISIRQMAYVSGLSFGIISGVFSVINILADALGPGVVGIHGDSPYYFLTSAFLTAAIILLHTFWGVVFFDACERRRYWALGLVVGSHLLTSGLTFLNPWYEASLLPIYAVTVSMGLWAFITAGGSLRSIQRSLLCKD

SEQ ID NO: 15889 - DNA, 2202 bp, Homo sapiens
  CDS (22)..(408)
caagatccaattatagctcggatgtccatttgttcagaagacaagaaaagcccttccgaatgcagcttgatagccagcagccctgaagaaaactggcctgcatgccagaaagcctacaacctgaaccgaactcccagcaccgtgactctgaacaacaatagtgctccagccaacagagccaatcaaaatttcgatgagatggagggaattagggagacttctcaagtcattttgaggcctagttccagtcccaacccaaccactattcagaatgagaatctaaaaagcatgacacataagcgaagccaacgttcaagttacacaaggctctccaaagatcctccggagctccatgcagcagcctcttctgagagcacaggctttggagaagaaagagaaagcattctttgagaaaaacaagcaaaggagaagagtgttactgtacccttatgacagaattgtcctggattttgactccatccacgcccatcacctttctacattttgctgacagataactaaccgatgatgaggccgaggtaaaagagacatctgcagtgtgacagaagggagcatgagaagcatggctcaccagccagcctctgtggtctttgtaattagaagcttcagaactcactaatactactgtacctttcattggcgcattaccccataaaactttttgagacgaggtgagatctgagtataaagataggtcagaagtattttaaagggcttaatgtgccaaaaagaaaaaaagctagagaccctttttgtaaacatttggtgaccacacatttgagggaagacgtggcgttaggtgaagcagaagcaaaccctgctcttaggggctcacctaggtgagtgcacagcctgtgacgctacagggagaggctgagtaaaccgagatccagcgttctgtatggcaggggtattgcttatcacagaggttctgaagagtaggaagtacataatgaagagggctttaaaaattgccaacaaagtgagtcaccagggctggcagtagtgtgacggggctgtcctgagctgttaggagagtagatgcggggagggctggtgacctccgtgggtttatatgtcggaaactcttctctccaaatcccaggcctggcttccagcaccatccagctgtgcccaagaagccaccctggtctgttctccaactcttttaaatggtgcccaacttttctaagtgagcttagcaatgagaagaaaaaaaaacatgaattctttttctggaaaatcagggagacatgggtaataataggtactaataaatatttatagatgagtgaatgaggaaataattacatcaaaaaggtcagtgacaattgataaatgacaaggaaatatttaattaggtaaaactaaatcattgctctctatactaggatagactttatctacttcatctgttcctaagtcagcatgttagttctggggaaggatcataagaaaggaaatactttttaaaaaaaaatttggaaacatgtaacaaagcaagggtaaaatatatatatatatctatataagtgctgtgactgtaaaagtgtactttccattaattattagccgagttaagagaatggtcacattgaagtactgtgtggactagaaatgtaccctgtcatcatgcaatgaaatattgttatcgttttaacatagctcatttatgtagaatgaattctggtggtttaccccaagtcacagttaggacggtagatggtgagatcgcagatgcgctattatctagattcagtgttacattttcgatgtttatcactcagtgggtttttattaatatgctgattaagttatttactgggccagtcattgtgctaaatagttgctcttttgtgtttcattgccttgatgtttgagtgtaatctagcattttaatacagtgtttattttgcatgatctttaacaaatgttttaagcaatttttaaaaaggcaggatgttattgacattatacactgaagtcttaacattttaatatttatagtgcttatttgcaaaattgtataattaggaattatttcagagacaatgttttctttttcaggtgagtagttgccgcgtaatatcattggagtacattctttatactgtttgtgaaattaatactagcatattaagtgtacaaatagatttagaaaacaataaaaaattgcatgct

SEQ ID NO: 15890 - protein, 129 aa, Homo sapiens
MSICSEDKKSPSECSLIASSPEENWPACQKAYNLNRTPSTVTLNNNSAPANRANQNFDEMEGIRETSQVILRPSSSPNPTTIQNENLKSMTHKRSQRSSYTRLSKDPPELHAAASSESTGFGEERESIL

SEQ ID NO: 15891 - DNA, 2214 bp, Homo sapiens
ctgaaaatgaagccacctcaggcagtgggcttcgattggctacaattgtgcccttcttactttagcactttggcaaacattgagaaaattattattatggaaattttctttctgttttgagacaggatctcactctgttgaccaggctggagtgcagtggtgttgtcatagcccactgcaacctcgatctcctatgcttaagcaatcctcccacctcagcttcctgagtagctagggccacaagcacatgccataactccgtggatgccgaaagtagataacgagacctactggatcagaatgaggcagattagtacacatcgcacagcaaatagcaggaatatcagcatgaaagtgctggtgcccctgacctcaagtctcgtggggtgacatgatgggcccagatgatgtctatgcatgaattgggtttgcctacagctgaggaaccaaggaccaccaaggacttagcactttcctttctttttttctttcttttttgtttttttgagatggagtttcgagtttcactcttgttgcccaggctggaatacaatggtgcaatctcggcccactgcaacctcctccgcctcctgggttcaagcaattctcttgcctcagcctagcgagtagctgggattacaggcatgcaccaccatgcccggctaattttttatttttagtagagacggggtttctccatgtttgtcaggctggtctcgaactcctgacctcgggtgatctgcctgcctcggcctcccaaagtgctgggattacaggcgtgagccaccacaccgggcctgggcttagcactttttatagcaagtgatagacaggccaggcttcttctcctcaatgggggcatgtcatgctacagtctccttgaccaacttcatgtcgccagctacaagaagacagaccttgcagtttggcactctcagcaaggacatgcagggatgcttggggcctcggccaaaggcagcatgatatagatggagcatagtttaattaatcatcctgtcatgttatttagaagtttccactttgttcctgtaagaaagaatcctgtaacattcttgtggataaagttttgctcacatttccagtgattttcttaggctagattcctgtaagtggacttactgggttagggagtttaactttgtagtctcttgatatgtactgccaaatgggttttcagaaagtgtgaatcagtttacacctcataccagtatatgatgatacttgttaatttatccttcctgacattgaattactatttttttaaacttttttttgaatttttttttttgaggcagagtcttgctctgtcacccatgctggagtgcagtggtgcgatcttggctcactgcaacctccacctccctggttcaagcaattcccctgcctcagcctcccaagtagccatgcctggctaattttttttgtatttttagtagagaaggggtttcaccatgttggccggactggtcttaaactcctgacctcaggcagtctgcccgcctcagcctcccaaagtgctgagattcaggcatgagctactgcacccggctgaatatttttttaatcttttgggttgctgatataattaaaattttttcctgcctctctcagcattggcagaatgaactttgttctaagaacctcggctagtgtttacatgtattagaatgggaaaattatagcagcttctttcccaggtcgttttttattcatctattcaacagatacttattgaacacctataatgagctggacactctatgggccttgcaatttagacatgaatagagttctcaggtaccttacattctaattagaaggagaactttgacctctaaccaagacctgtttaattcataggagggtttcttttcttttttttaaactgcactcacggtcatccccccaaaggatgagggtttcttaagttatgttgaaaattcaaaccttgagtccgggcatggtggctcacgcctgtaatcccagcactttgggaggccaaggcaggtggatcacgaggtcaggagatcaaaaccatcctggctaacacagtgaaaccttgtctctactaaaagtatgaaaaaattagctgggtatggtggcgggcgtctgtagtcccatctactcaggaggctgaggcaggagaatggcgtgaacccaggaagcctgggcgacagagcgagactccatctc

SEQ ID NO: 15892 - DNA, 2761 bp, Homo sapiens
tttccccctgccccatcaatatgttctcttgcatatattggcgtgctgccatataaagtaaaaatactggagatattctatattttatatataggtttatgtgttgttggggatgttttcattgtgctcttttggacataataaataattctctattgaggctacattctttttttttttctttttttttaaaagaatggcatctcactctgttgcccaggctggagtatagtggctaagtcatagctcactgcagcttcgaactcctgggctcaggccattctcctgcctcagcctcttgagtatctaggattataggcatgctccaccacacctggttaacttcatttttattttttgtagagatgaggtctcactatggtgcccaggctggtcttgaactcctagaccaagtgatcctcctcctttggcctcccagactgctgggatcactgcaccggccaaggctgcattcttaacccaactagattgtttactgaatcccatatgacagcgatacattgtccttacatatttatttttagacattgcaaagttattaaaaacagttaactatagtttttacacaacgtaggcaacaatgaagagtatagactgtaagattttcatctatgactcataaatctgggaaaaaaaaattattaagactaatgagaaactgaaaaccttaaactaatgaatattatttctgctgctaaaaatatgaaactttctggtctgtagttgaaatttgtatgatcctctagacttgggtatacttttcatctggtgccattaaagcatctctaatattgatcctaaatatttgtaagtccatgagcagtgaactttggaataagtttctgtgtagatacccaaagtttaataattatgagagcacctgatttgatagacagaaaatacagttctttagtcaaaacacaagatctgaattttgttcaggtgctagaccatactaaatgtatatatttttaattatagtgatttgtttcatttttttagattggctaattctgtaattttttccccaaaaacatgtgaagaaaggaaaagtaaattaaattccttagaactgttttaggttaagattctctgtgtctgcccatattctgcagtccttaacttgttttcaactctttacctcactcatgaacttgtttttacccatttgctgccaaacataggtgtgttcccttcaggagaatcagcatatacaggttatgataggctcccaccatttatgcttcttcactgatagggttgcattactttctgcagcagactataatacctcatatagtactgctgtgtctcaactggaaaggtcaggaattttaatgttacgttgtggtctttgaaaactgttaggcctagcaatagataaatctcaaaattaattttaaaatctgtattgacaagaataggtaaaattatgaccaggaatcattgttacccttagttccaagaggtggtttttgaaagagcaagaggaaagaaaaaagaaaagaaggaaagaagaataaagaagagaaacgtgtaagaatggtttgcagattgattggttaaaagtgtttttagcacatccccaaccctgaaaacttcgcattaagagccaagcacaatgttggtagctccaagatattctgactgtgttctcagaatgagggattacccatcactgggtattccttcccaagtagaaactttagattttcactggtaatacacattgccaagttttatgggaaatctgaatatactgtgaaaatgcatatctggttagttgtctgctgcccagatcttatcaataccagtaactaaccagtatttaacataaaatgatacaaataaaggcctttttctatttcagtgagggtacatttttcttgatatatatgtactttaaggatattggatctgtttatggatctgttttaggaaacagatttgcaagggataattgtatatatagtagtatttaggtttatttcaaattcatcttagggatgcctagatgcataatttttaccaggacatattgaaaatattgcaaagagatagccagttatattatcccattcattagaaattaccagtgtaactaaacataaatattccagtttagagtgcttaaacgtagctatctttcttaaggccaggagggtaactttgtggtatctaaagggcttaaatttcagaatgcagaataaattgcctttttaaaaccaagcattttgtacaagcttttattttcagttttttaactaccaaataggtgtgatgtactttagaagtaaacaaagatgttcacccatgataatggatgttaaagctcctgcagttgttcttttcgtgtttaaagggtatattctaatagtggaagcatcaaacatgtcagtgatttcatctcattcagaaataaagagattaatattggtctttattttttggcattttaagttttatataaatggatgcagatggagattatcacccacaaatatatttaaatggatttttcttaatttgaatttcaagtaatctttttatttcaagtaattagttacgcatttagttacattgccagttttttttttttatcaatttcagtaagacaaaatatactaaaatgtttaaatagcctcattcaatcttacattttgacatttcagcaatcattctggcttacagtaattagatcccctgttacgacacatgccctttgttcttaataactagc

SEQ ID NO: 15893 - DNA, 2311 bp, Homo sapiens
  CDS (1422)..(2309)
aattattgttcactttttcctttgtgtataaaattataaatattaatcatattattactttgtcttctactaaacatactgtttaaaacaattgcaaaagaagtattttacagcgagagggaaatgaatttgaatgtttacagaagaccacctttgaataattgcagtttgcttgtgttgtagagctgtttacgatctgtgctggaacaaatagcagcatatggccaggttgtgtttcgactccaggagttcattgatgaagtcatgggacacagttctgagagcatgctgcctggaagtgggtctgttcctaagaagtcaactgaagctccctttagaacctaccaggctttcatgtgggccctgtacaaatatttcattagtttcaaagaggaacttgcagaaattgagaagtgcatcatcaataatggtattaaatgttcttcatctttactcatactacacgtaactcataatttgaatgccacttagagtttttattatataagatttgaaagttgcctagcagataagtagttctcgtgaatgcttcttttaaaattattttaaatttatatttttaagccattcatatctctaaaaatcaaaaaactacagaagatttagaatgaaaaatctaaattattcttcctgcaccagtaccccagccagtcagttctcctctccagagacagccaggtccttggcttcttacgcatccttccagaaagagtttcaacatacatgagcagtgcatatacatatacgcatacctagcagtcattacactgctctcttcaaatttttccagtttaaattttgaggataataccatacatatatgaagagcttctgttttcctttttacaaattgagtgtttcatcatatggtcgtgtcatagcccagtccccttaatggatttaggttgttcccaggcttttgctattgccagtagtgctgcagtgataatcacttctacatatccgttatcgtacacaggcagtgagttatctgtagggtaggttctttttttttttttttcatttgagacggagtctcgctctgttacctaggctggagtgcagtggctcaatctctgcttactgcaagctccgcctcccgggttcacgccatcctcctgcctcagcctcccgagtaactgattacaggcacctgccaccatccccagctaatttttgtattttcaatagagacaggctttcaccatgttgaccaccttggcctcccaaaatgctgggattacgggcataagctgggattatactgcatctgaccatgtgggatactacaataactcttgcaatagtggtggacaagttggcacctcgattgtctcagctcaaggttctgcacaaagtgtttagtactggagtagcagaagttccacctgatactcgaaatgtcgtccgggcctctcacctgcttaacaccctgtacaaggccattcttgaatatgacaatgttggagaagcctctgagcaaacctgaccagggaaccctgagagctgaccgtgcacactctctgcctcaggtctccctccttttctctctctgggtggaaacggtgcggccttacctgcagacggtggacgagtggatcgtgcacgggcacctgtgggatggcgccagggagttcaccatccagagaaacaaaaatgttccagttaatcacagagacttctggtatgcaacttacacgttatatagcgtatcagaaaagacagaaaatgaagaaaaaatgagtgataacgctagtgcgagttccggcagtgaccaggggccctccagcaggcagcacaccatggtgtccttcctcaaacctgtcctgaagcagatcataatggctggcaagtcgatgcagctgctgaagaacctgcagtgtgcggagagcaccacctgccaggcaggagccagagatgcagaaagaaaaagtttatacactctctttctggaatctgtacagtcccgtcttcgacatggagaagattccactccacaggttcttactgagcaacaggcaaccaaggagaacctgatgaagatgcagtccattgctgaaagccatcttgaactggatgatgttcatgatccactgcttgccattaactttgcaaggatgtatttggagcagagtgactttcacgagaagtttgctggtggtgatgtatgtgtggatagatcatcggaatctgtgacatgccagacttttgaattaacgctgagatcctgcctctatcctcatattgacaagcagtatctagattgctgtggaaatctcatgcaaactct

SEQ ID NO: 15894 - protein, 296 aa, Homo sapiens
MSSGPLTCLTPCTRPFLNMTMLEKPLSKPDQGTLRADRAHSLPQVSLLFSLWVETVRPYLQTVDEWIVHGHLWDGAREFTIQRNKNVPVNHRDFWYATYTLYSVSEKTENEEKMSDNASASSGSDQGPSSRQHTMVSFLKPVLKQIIMAGKSMQLLKNLQCAESTTCQAGARDAERKSLYTLFLESVQSRLRHGEDSTPQVLTEQQATKENLMKMQSIAESHLELDDVHDPLLAINFARMYLEQSDFHEKFAGGDVCVDRSSESVTCQTFELTLRSCLYPHIDKQYLDCCGNLMQT

SEQ ID NO: 15895 - DNA, 2341 bp, Homo sapiens
  CDS (594)..(1136)
tgccaccggctggtaagcatcactgtgggccaggcactgtttacctatgggaccacgtgtaacaactcagacctttgctgagtcaagatagactaggctttgggtctaaattttggctctgctactttctaactgcacagtggtcaaaaaggtactgagcatatcaaagtctcagtattcccatttgtaggaaaggggcgcagtgagactcccttcctaacaggattcttgactggatgaatagagacaaggtatgcaaagtgcttaataaggtggcagatacgtgataagcactcagtaaatgtagctctccataaatcatcaatcctctcaacaatcgttggagcttggcattataatccccactgcacagatatggaaactgaggcctaagaggttgtcagttgtccaaagtcacatgattaggaagtggccaaagggatttcctctgatcctcctttctccagcccacggtcccattcagtgagggaaaggggctagagctcccggcttgcagaatattcaggaaacagatctttgctctctgatgctggtaagtttgggggaccctgaaactggctcctgaagagctcatggcaggaagcctgggttcagtgaagccacaggaggctgctccaggaaccagctgccacttgacctgttgcatttctttcccttggcttcaggagctgagtgaccaggcgggttcggagttcgagaactctgatgtcagatgggtcatcacggtgcctgccatctggaagcagccggccaagcagttcatgagacaagctgcctaccaggtgagggtagagtcagggcgggtggaagccggaggagaaggactcaagatgtccagggtggtgactgtagccccgcccaggtacctcccacattcactggcctccatgggaggcagcaaggaggctcccctagccagggtgggagctgggagacaaggagccatccctttcctcagcttcctcctgggggagccatgggggtcagtcccacaacaagagctgggttcggtttccttcctggctttctacatttccaggtcatgtttctactgcggagtctccagggctaggatttcaaagctgtggttcagagacatttctctgtgggtgaaatgaagtgagaaccttaagggaaaggcttgggaaacaggaatatttgaacaagaaagcaagcaagccaaggccattggccacgaaccaggcattttcagcttggcgtggaggctgaaaactgcatgtctgccgcagaaaagaagggaagtgtgattgttccctgcacacttcactcagcgggggggtgttggaggtggcagacccctgcagagggcagtggcatggccaaggggcataccaggcacaggcgcttgttggccagggagacagatgctccagtgccagtggccagcccatccctgtgggcactaggggcggctgctgtgaggatctggcttccaggcagaaatggcgagccatgctcacctgttgttatggtcccagggacaggacagagctggctcctgttgcacttaagcccctgggcgtatgaacacccacgcctggggcctgggtcagctctctgtgtattgagagtcagttttgtgagtcttcagctgaggctgggttgtgtggcaagtcaccagagtcattagatgtcccctccccactgtcatgactctcaggaagcatcctgcccacctttcccaggagacgtacctctgattttgtttgtgacactttctttacaaaaaacccacagagtcaaccctgagccccagcatagttgaatggccatgggaacctcagcaccatgaattgttttcagcgctcactcggaaggcttgactccaagtagcacacagttcaacttgcgtgcagtcaagggcgagtcgtctcctccctgcactctctccccttccccaggctgcttcccctgcactcccctgcctccttgcagtgtgagaatctggctcagtgtatgtacctgccaaaaatagatctgtttttatagggatgaaggaagagggtggaagctccagaaagaggcaagctctttaaaaagagaattacaaaatgcagtttagccattcacagaagccctgggcatcacggagcacaagctccatagtgtcagccttccggcagggcccagaaatggggcatcgggacacagctgtctgcagagacgccacctggcgttctgagtttttcccaggaagaatattcaagattcatggttttgactcttttcccagccccacaggaagacttcagcaacaaatgtgtgacccacgaaaaggtcaattcttatttatagcctg

SEQ ID NO: 15896 - protein, 181 aa, Homo sapiens
MAGSLGSVKPQEAAPGTSCHLTCCISFPWLQELSDQAGSEFENSDVRWVITVPAIWKQPAKQFMRQAAYQVRVESGRVEAGGEGLKMSRVVTVAPPRYLPHSLASMGGSKEAPLARVGAGRQGAIPFLSFLLGEPWGSVPQQELGSVSFLAFYISRSCFYCGVSRARISKLWFRDISLWVK

SEQ ID NO: 15897 - DNA, 2266 bp, Homo sapiens
  CDS (308)..(643)
agtattgactgttaatgctttgcttgaagtgttacctgtgatcagaccccgacagtgtttaaggtaaagcgtggcctgtagatcccgggacgctcccagtttggccccaatcattcgttaccctcctggttctcagatccttcgaaatgtgcagatttgcagccctgcatcctgcttgtcactcagcgtggcccaagttttgtttcagaaaataggagccctattaggtcatccccagcttgttaagtctcattattgtgtgttttcccctgggttgttggaatttgacacagttttacctgatgtgatgcttgaaggcgaccctatgactctttttaaaggaagagtttgcaggacggttttggactggggcttgtgggaatggaggaggggaggtgggcacatggccggggaaacagctccaggctgcacgaccagaccagcgttcccaccctcaagagccagtgagaaaccttggggagaaaaagcaaggatgggcaaggcttccctgttcgtctccactcatatcaaaatttccagcctgagctgggtgtggtggctcacatctgtaatcccagcgtcatgggaggctgaggcaagaggatttcttgaagccaggagttggagatcagtttggccaacatagcaagaccccccatctctaaacagtaaaaaaaaaaaaaaaaattagccaggtgtggaggcacgcatctgtagtcgcagctactcaggaggttgaggtgggaggattgcttgagcccaggagttcgaggttgcaatgagctatgagtgccactgcatttcagcctggacaacagagtgagaccctgcctctagaaaacaaaaacaaaaacaaaaacttctcccagccatcgagaagttaaaatgtggctcttaagttagttactgaacaccatacttcagcgtgctgatccctacaatttctgtaacgttcctagtaatcaaccaagaagtcgcagcgctgagacctcctgcttgcgtggatgtaccttttttggcgggcttttcctattgtggtgctggtggtttgtttgtgttttaaattagatgcagtcttttaaaactgtgaggtttcctacctcgcacctgatacctgcattcaggtatcagcaaatgcaggtatcagcttctttgggggaagaaaacccaggatctctggccacttgactctgaggctgccttgcagaactgcacagcctccaccccacccactattttcgtgaccccgaggccacggcccaggtgccattcatcactgtgcagcatggctttcctgtgctagaggaatgtttatctcctccatccagccatggagagcaggaaaatagagttcaatatgggtgggcattgcaacgccagcgcctctttctctgggggaagactctcccctctgtataagttgcagacacccactcttgtcacacatttggctctgcccacctggcctcacaggcatttgagtttgtgttccacccctccccatcccagagcccagcagtcagcagtgagagaagccaaatgtgtgcagggagtgcgaggcggcagctaccatgcaaactccaggggcacaccgccccccagtaatctctccccagagtgcatcaggcaataacaggaagatactcagctgttcattatgacatgatttcccattttcaaacctgacaagttggtcttgatgctgttattcaaataactgaaagtaaatggttgtgaacaaggaatttcagatcacagactcagtaagcctggccagcccccaaggctgtgtcttccttaaagttgggatctctgtattatctcatactctatagtagagcaataaacataagctgacttatgtgatcacttaaaactaccaggaagaaacattttccgtaataaatttagtgtaggattgctttgtcttctcacactcacttttcagaaaagaaaatgtaagtattgccaggcgcggtggctcacacctgtaatcccagcactttgggaggctgaggcaggtggatcacttgaggtcaggagttggagaccagcctggccaacatggagaaatcccatctctactaaaaatacaaaaattagccgggtgtagtggcgcatgcctgtaatcccagctacttgggaggctgaggctgaagaatcacttgaatacaggaggtggaggttgcagtgagctgagatcgcaccactgcactccagcctgggcaacaaggcaaggctccgtctaaaaaaaaaagaaaaaaag

SEQ ID NO: 15898 - protein, 112 aa, Homo sapiens [sequence omitted]

SEQ ID NO: 15899 - DNA, 2465 bp, Homo sapiens
tgaattattaatttttgcggctggacgcggtgactcatacctgtaatctcaacactttgggaggccgaggtgggcagatcacctgaggtcaggagtttgagaccagcctggccagcatggtgaaactctgtctctactaaaaatacaataattagctgggtgtggtggcacgcacctgtaatcccagctactggggaggctgaggcaggagaatctcatgaacccaggaggcagaggtggcggtgagctgagattgcaccactacactccagactgggatttaagaaaatgtgtagttaaatattgcctaaaatgctcgaatgtaggttataaacaatgagaatagggcccatgaagagattttcgtttttcacagaggtgagacttaaaaaggccttgaaggataaatagaaatagaagcagagtagaagggttattccaggagaatattagtttggatgagggcacagaggcaggaagatggagcttagcttgagggaatggaggtcactggtgctgtgaatatttgcagacagccatatccagagctgagaggtgaaagaacagactggaatagttcttttctttttcactctcctaccttatttgcttttggtttagcaaggaggatcgaaagtaaaccaagagaaatggtggggggcagcagagggaggtgggagggaaactccaggatgagttatggtcagccaaaagaagctgttgaaataaaatgaccaagagttaatgcctttatagacgcagggatgcacagcctagatccccttcctctaaaggacttgctgcccatccactgaaagcttggtcagcagccagcccccagctatcggctctttcagggcctgccttgttgcaaagggccgcctccctgcaaagagctgccttgctcaaagagctgccttgcactaggtcatgctcttctggtggcagcttgcatcctgtcacagagaggcaggggtgtgaaagcacagccatctcatttgctctgcaggacaatatccactccagagttcctgctagactggccaagaccttgttgccattcaacttctttcccattctactcgctccctccttccttcacaggtgttgagccctaataaaattttgcacccgaaattctgcttcattatctgtttctggagaacccaacctgtaacattttcccagccagggctgaatacacacacacacacacacacacacacacacacacacgtgctctctctgtatatatgtttctgtgtatgtatatatgtatgtatatttttaattacttttctccattcaatagtatactgcctatcaattattagcaaattgtattttcaacctgttggcttatttattctaaatatagccattttcctctaaagagaaatctttgttgccaaaagaattttataatggcaaaatcagtcattttccccactaatcgcaatgtaattttgcccattttgagatgggcaaaaatcatatgttcagaacagtaaggtgagacagaatcagctaatttactgataactgtgggcactagctgaactgacgtatcatgctgctacgcactttagtaccaggctctctggtggccagttctttgcaggataacgtggaataatgcttatgtaaaatatgacttccaagactaattctcaacttcagactccccactcccagcattatcgctttggcattagtaatgttagtcagaaatatgagtaattcttggcaagaatgggaagcattcaacttgtaacttcaaaaagacattatctgaaaggttgaaagccagtttctaatagtacctggtgtcttggcttcagggctcacagcaatcctgtggagaaagtatgagtttcccatttcaacaaagaaggtgaggcttagagggaaaggaagttgctcaagatttgctctggaacagagccaggattcccactcagatcttcgactctgaatcctgcaggccttcacctgtgcgagctctgagcgcctggctgccagctccagagctcctctggggccttggtcagtgtggtgttgtttatgtccagcacactttccgttggtctactggaggacagttcctgtacaggcagatgacttccttcaccaaggacctgtgactctctccctgagggctttctctgacatcatctgcacatggacagcttagactgaaagtttcaggggttcgatgccttccagaggcacctctctaacaataagagcccagattgagtggaaataccccagcttccttaccactccagcctccatgcccttagtggcatgattccgaggtgcatcctacactgactcttggtggctccctggccagagctcattcgcgtggccctcagcagctctcctccttccctggctgtcttcctcaccacctctccgtgattccaggaatcagctcccgaataaacgacttgcacccg

SEQ ID NO: 15900 - DNA, 2019 bp, Homo sapiens
gttggaaggcagacagatctgtgttccctatttgtccctctgggaatatgacataatcttagggggtaggacacaggccaagaatgtcactaactgatttgggacatgagtctctcaccaacaaaatggtaatagaccattcattcattcatcaggaaatagctattaaacacctactatgtgctaagcacgttggtattattgggaatacagtgatgaataaatcatattcttttccctaaagtcactgttactctttccattttacagatgaagaaacttgggctcaaagaagttaagcaactggcccaaggttctactcccataagtggcagagaagggttttgaagccagataccctagttttcaatctctgctttactcttgtgctgtctgcctccccggcatcatgcatttggcaggggacatgatatggacctgttacgtgggcccacagcatccaggtccagcctaagctgggaagatcaaggaaggctccctggaggaggtgacgcctatacgaattctaaagaatttggccaggcagcagggagtgtgtttggctggtgtcataggcagacagcagcatgcccaaagacaagaaggagggagggtttgatgccttcaggaaccaaaataattgaacatgcctgaacccaatttcttaaccagtgagcattgtaagggtagactaaaaggggctgtccttgtgacttgctgacacaaacccttttcccggtgaagaggtgcctgagcaatactatttaattgtatttcctggccagacaacttccaccatctccttaggagacagggtggtcaggaagcaggaaagactaagatgatggggactctctgctgtccccaccttccctgtccattgtagggtctctgcagcctcataccctatgtccagcgacctcccccaccccgccgccagtggaatgcctgaaagtggggtttggcctgggaaagtccaggtaacacttcagattaagctcctcttgtcaatttcctgctacacaagactttctgaatccaagtctctttcctatgaatagagggcgggaggccagattgcccagttggaggtgtggcttcagctggtctccgttgaagtctgaaaagccaacaaagcatagtgagaattctgtgtggttcaagagggtgccttgtgcttgttgaggagaggccgttggcttgatcactcacgacactattactgacgttattatttactgcctgcccaaccacagaaatattctgattcccctaaggagccagtgagcagtaataattttctgtattgcaacaatcctcctaatgacagaaacagatccacctccaggtacgtggtggacgaatgggagcagctggctgctggccccacacttaccaaccttgaccacagggtccacccagcaactccacctcacccatggatcggggggaaaaacaactcacagactgttctcctcttaccaaggttaaaacgcagctggaattactttgggcagtttgtttttaaaaatgagtgttgcaattgtaactgtctcaatgcaagcttcgctgtagatgcccttcttaacaatatgctttatcttctgactgagaaaatcacttgagatgttatcatgcacaatcccacttgttctgcctctccaccctggcaccttctccgaacccagagatcccagagggccagcatctcaccccatgtaactccatgtaattctcccatctaattacaccggctgagagtctgtcttaagaaattcagtgggagctccaggtgtggaggggataaagaagagatggaaatataccaagtgaaaacatcagatttttctaaaaagggatttgtgtattttcctggagtcatgagtcctatagaaaaaaatttatattctttttgttttgtcctttttactggcaagggatttaagcctttggattaagagaaactcaaaagataatttaattccattcttatacttctgcctggataaataattccag

SEQ ID NO: 15901 - DNA, 2450 bp, Homo sapiens
  CDS (472)..(786)
caaaacaatttttttaagagcaaagttggaggatttatagaacctgattccaaaactgtcagtaaaactacaataattacaaagtatcagccaggtgccgtggctcacatctgtaataccagctctctgggaggctgaggcgggtggatcacttgaagtcgggagtttaagaccagcctggccaacttggtgaaaccttgtctctactagaaatacaaaaaattagccaggcatgatggcacacacctgtaatctcagttactcaggaggctgaagcagaatagcttgaacccaagagagtccagctcaaaaacaacaacaagaacaaaagtatcacattggcataagaatagacatgtaaatcaaataacaaaatagagaattcaggtataaatcttcatatttatggctgattgactttgaacaaaggtgacgaggcaagtcagtatagcagcatattcttttcaacaaatggtgctggcagaagaaaaaaaaagtacttggatccttacctcacaccatgcacaaaaattagctcaacgtggactatatcagggtttctcaacatcagcagtgttggcgtttgctggggtggataattctttcctgtggagagctgtcctgtgcactgtagaatgtttagctgcatcctggcctctgcctattagatgccagtggcatccctcccctgacacacacctagttttgacaatctctgtctccagatattcccaaatgtgccctggagagcaaaactgtttccagttgagaaccattgacctaatgtaaaaaataaaatgtacagaagaaagcatagcaggaaatcattctgacctcaggttaggcaaagctttcttagatatgacactaaaggcataattcattaaaaaaataagttgggctttgtcaaaattttaagttttgctcttctgaagaaaccattaaaaaaaaatgaaaagacaagccacagactatgaaaaaatacttgcaaatcatatatctgataaaggacttgtacccagaccatgtaaagaactcataactcattaataaaaggataaagaaaaagctgaagacaattcatgcaagaagatatacaaatattaagcacattaaaatgctcaatattattagtcactagggaaatacaaattaaaggcccaatgaaatacctattacacacccattagaatgactgtaaacaacaagactgataattccaacatctgaccaagatatggagaaactagaactctcctacattgctggcatgagtgcaaaatgatacagccactttgaaacaccatttggcagttgcttaaaaaattgaacattcaactaccatatgacccagcaatttcactctcaggtatataaccaaaatacatgaaaacatggatctgcacaaggtcttgtatacaaatgttcatagcaacattattcataataaccaaaaattagcccatcaactgaaaagtagataaacaaaatgtatatccacaccatggaacgctactcagcaaacttctaaaaagcaacaaactactaaacacgtgcaacaacatgaatgagcctcagaaacataagtgaaagaggtcagacacaaaagactacaaattgtaagattccatttagataccatttctacaaaccgcaaaactgtagaggcacgaaacagattcatggtctgctgcagctggggatgggagtgggaacagagagcaaacattttgggatgatggaaacattctaaaactggattgtgattttggttacacaactgtatacatttactaaaatcaatgaacagaacacttttaatgggtaagccttaaggcatgtgaattatacaccaataaagctattttttttaaaaaaaagagagagagagaacgagagctacatggcagccccagggcaatagctctcagatctcccttagagaaagaactttctcttccacagcaatgagtgcaggtagctaacactgaccaacctgcatctggtagttcatttaaggtcggccttggctttcaagttaaggccatggtctttctctgcagtccccagccaatacgtgggcacagaaaggcacagggcatggctgattcagcccaacatgaggctccacaccctagaactccctgtggagttggccgatactgcctgtgacctgcaatgtggtctaagctgtcagacctccacagtggccagaaggttttccatacctgagcctgcttctacccacttttatttttcccaggagtcacgcttagtcatctcttgctctttgaactccatgtctgtatcagctacccagaggacccatcagacagaaagtaatatgcagataacagcccaggggaatctgggcagcactgtgaaaccaacatttcttcagtgaaacctagaacaaaagtggaataaataaaaactaactgtctcatttc

SEQ ID NO: 15902 - protein, 105 aa, Homo sapiens
MVLAEEKKSTWILTSHHAQKLAQRGLYQGFSTSAVLAFAGVDNSFLWRAVLCTVECLAASWPLPIRCQWHPSPDTHLVLTISVSRYSQMCPGEQNCFQLRTIDLM

SEQ ID NO: 15903 - DNA, 1917 bp, Homo sapiens
  CDS (91)..(465)
gatgtgtaaaaaattggagacaatctatttgataggtattttagttttcgattgcagaatatcaaattaccaaaaacttagtgaatcgaaatgacacacatgtattatctcacagtttacctgcatcaggagtccaggctaggttgctgggtgctctgcctagggtctcacaaggcagaaactgaggcgtcatttggggctgaggcttgttggcagaatttgtttttttgcagtggtacgatggaggtttctgggtttttttttctggctattaactgggggctgctttcatccctggaggtcttctactgctccctggcatgggggtcccctctacaacaagcacttgtctttttaaggcaggagaatccctctcccttcaactctccaacgttaagtgcttgcctcattatatcagacctgcccaggaaaatctctcttttcatgaacccaaagtcatctgattagggactttaattgcagctgtaaaatgagtcatgggataatatcccatcatagtcacaagagccactcatgatcaaggagagggattatgcagggtgcatataccaggggtgggaatcttggaggccactcagaattctttctaccaccagggcatgaggcagatacataattatattataatatgagacatcctgacaagcatattttttgagatgaagtctcactctatcgcccaggctggagtgcagtggtgcgatcccggctcactgcagcctccgcctcctgggttcaggcggttctcgtgcctcagcctcctgagtggctgggattacaggcttgcatcaccatgcctggctaatttttgtattttagtggagatgggggtttcaccatgttggccaggctggtctcgagctcctgacctcaggtgatccacccaccttgtgctcccaaagtgctgggattacaggtgtgagccaccacacctggccctgacaagcatcttcaaacaagggaaaactgccttgtgaagccagaaaacagaagtcatttcctgctgtaggggttgggaggcatggcagaggcaatgagtatgatttgagtaggcagaaatagaggcgaggggcagtgaggtagaaacggagtggaagaagcacatcccaagggaggcaaagaaggtatttcgggaaaatggtgaatgcttttggttggctagaacttgctactctgtggtttttaagagacttgtgttttgaacctattgaaatctatagaaaaggtgatggggacactcttgggtatacctgattccatgagcgtcctctgcttttttcatatactggctaatgaagaagaggagaatttggccacatgtctgttgaatgtggtgcgttgaatcctatcaccatagtcacccttcaggaccttgaaaaagtctttcttctccaccatttctgacagagaattccaaacttaggggcttctgtgtcttgtaaaatgcctttctcccttgtagaaaaggtagacaagtctgaaaaaagtgggttcaattctgtaagctacacattaaaccagctggagttggttgtaggtaaaataactcaaaaccatgttgtataagaaatgtgttggctgggcgcggtggctaaggcctgtaatcccagcactttgggaggccaaggtgggcggatcacaaggtcaggagttcaagaccatcctggccaacatggtgaagccccgtctctaataaaaacacaaaaattaattgggtgtggtggcacatggctgtagtcccagctacttgggagactgaggcaggagaatcgcttgaacccgaaaggcggagattgcagtgagccgagattgtgccactgaactccagcctggcaacagagtgagacactctcaaaaaaaaaaaaaaaagaaaagaaaagaaaaaaagaaagaaag

SEQ ID NO: 15904 - protein, 125 aa, Homo sapiens [sequence omitted]

SEQ ID NO: 15905 - DNA, 2807 bp, Homo sapiens
tttgtcacttccagtgccctgcccagccctacagaaaatacgtgattatttaagggtgaagaagccaaagctgggagagttttagtcacctatctaggggaaagtgtgaagatttcaaagcccagggtccttcacggagccacacggctctccttggcacttaatcttcaagctctcctcagcccacacttgacccttaacaggggagacaaaggcagactccaggtaagttgtcagggttagcataagcagctcagggcaactggtgggtagggagctgtacagcccagggattgcagcctcttgttttgcatttcctggagtcaaggctaaactcatggtctcctcaggggtcaaagcaggcctgactttcagtgtcatcttcaggacacacacacgcacgcgcacacacacacacacacacacacacacacacacacacacacaggattatacatgcaactaaccaatcacacagagctggaccatctagcctggtagaaggtctgccgagttctgcgggtcaccatgaaccaggcttgtgagccctcttagtcatatgtaaagggctgtgtttgagacccggtagcccacaaagctcttttctgcccaagccttggtttttccgtatgttagtggggacagattggaactaaacagaccttgagtcttttcagggtcagtctcaactctcttagatgctagagggatataggcagggctagcacagaacagaagcaagaaatagtcaaaatgaatattttggactgcatagactcagaatgtgctttacttgggcacccagggcttctcagacttcagttgttttcattccaccattcccttcctccccctcctcatcaccagcagcagcagcagcagcagcagcagcagcagcagcagcagcagcagggcgcacagctctggggggaatcaggcactgggctgtggtggtaccgaggttacccctgaagtcctcacgcctccctgtgaggttgatagattgaaactaccttattttgagtatgaggaaatagaggcacagtgaggtccagagaccgcccaagagcacacacctaggaagctgagtgccaggtttcaaaaccaggtctccctgggcagggcagggcatggctgtgtttgaaccactcaggtctcctttgtcatagttgacagcactagttacttgataatgtctttttaaaaattaatttacttaaaaaaacttgagtgctattctaagcaatgtgacatcgtggatttcttgggctagttatatattttatgatgttcatcaatgtacaattatgtaaaagttgaatgatcaagttctgcctaagaccatctcatgtaccagcagcgaggttagattcaaatagaaaaaagggatctggtccaagatttgacacggattcactgtctgtgggaccccttgctagggcacttgatcatctgggtcattaaatctgggggccaggcacattctcattcattcgagacgagcccatcctcttccagagcatgggggcttcttgaaaccctgtcctttccaggcacacactgaggtggggagagggaccctggagtcagaccacctggctttgaatcccagctgtctcctctgagctgtatggcctaaggcaagtcatttaagcttcttgtacctcagattctccaactgcaaaacggagatgataataggcagaagcctcgtggggctgtgagaatcgagtctgcatatgtaaagcactgggcactgtgtctggaggctgtgagcaccaagcggctctaatcattcccgttttacaaaggaggacagagagactaaggagacaaactctttctcatctctcgttgtgtgtcagtgcaggggcaggactaaaagctggtctgtggtctgcaagctttaggggttacagagtccccaggaactcctaggaaattcagctggcggctaccttccaccatccccaggttctgattcgtgggcctggggtgggacccaggaatctgcatttcagttacttcccaggggattctgatgcaggtggtgcgaagaccacttactgagaagctgcaagctgggtttgagaggtccctacctccttcttccttccccgagccccacccgcccccttctttccactgggcaactatgtaaacagcattatttctacccttgcacggacagaaaggggtctgtgctgctgcctctgttggtgcctcttcaggtcagggtgataagaagagaaggaacaaagaggggaaaaagatcacagcagagagacagagtgctcattttaaggtggaaatatgccatttcctgaccacagcgggacttccctaggttgtattaaaaaatcctgtactgcccatgtctggtacagaagtatgtatagaattgtagagaaaatgaacactttgggatgatttgaaagcaaattacagaactaccagtttcaccactttaaaacttttggggaatggccatttagatataacctggtgcagtcaggtaaccccaaacagagtttttaaaagtttccacacccttctttgctggtgcctgccctgcatcatgctgtcgctgtgaggagggacttgttccagatctctggggcagcccgagtgtctcacctaaagtcacacagcttccacggaacattactggaagctcagtgagggccttctgcctctgaaacttgctctatttccctcaagtcctgcttccttttgtaggtttaagacattagttcctgagaaattgactaatcaagaatattctggaaatcttagtttagcaaaac

SEQ ID NO: 15906 - DNA, 2011 bp, Homo sapiens
  CDS (957)..(1559)
ggaaagaggtttaattgactcacaattccacatggctgtaggtcagggcagtggggttcacaatcatggaggaaggcaaggatgagcgaagtcatgtcttacacggtggcaggcaagagagcatgtgcaggggaactgccctctataaaatcatcagatcttgtgacatatattcactaccacgagaacagcttgggaaagatgcacacccgtgattcgattacctccctccaggtccctctcatatcacacgggaattatgggagctacaattcaagatgagatttgggtggggatacagccaaaccatatcattcatcatctgagggaactgtggtctcagacagctgggcactgagagtgcacgctgccccctagaattccacacctacatcacagagagacagaacagtctcaaaggattcttaaggttaatgtggggagccaaaggaggagatgaattcacagcttgtgccttaccttctggtctaactaaaactacttttgtcctggcccaacaagattcccagactcttttctgggttgcaccaggggtaattcagaaagacaaaaagttattaatgcccctccattccccacagctcctgaggtctaagttgttcattccctgggttttaggttgttgttctccctctgcttccacagaatcagtgtgccccattccagtacctatgatttcacctgtattcttgtcacttcctactttctcctagacattttatctaacagagccaggtgaaacagagacaaggatatttacataaaacttaaacagaactaagttggagttccataacccccattgggctgggatggcactcaggctggcctaagattgtggttatggaacagaaagacacattttacccagaaattcacctcgttcacgatctcctgctcggggaatagaatatagtagagtgtccccacagcctatgattagccgcttacagcaacctcgcctttcacttcaaggccatcccacagatttacagacaagcaatgttaaaaatgaagaaaaactaagacgcagtcttccaaacctgtcccgaacatctaatacacaagttgactcagtgaaaagcagcagaagtgactcaaattttcaagtgccaaacggaggaatacctcgtatgcaacctcaggcttcagccataccttctccaggcaaattccgttcccctgcagcaccatctcctttggctcttcggcaaccagtgaaagcatttagtaaccatggctctggttctcctggtagccaagaaataacacagctcacacaaaccacctcctcacctgggcctcctatggttcagagcacagtctcagcaaatcctcccagcaatatcaacagcgctactctaaccagacctgcagggacaactgcaatgagaagtggcttgcccagacccagtgccccttctgctgggggcataccagtgcctcgcagcaaacttgcacagcctgttcgcagatccttgccagctcctaaaacctatggtagcatgaaagatgacagttggaaagatggctgttactgaccagcaaagacaagaatgcagaagtccacggcttcatggatacccttcaccaggctaaaaaacaacttttatatgcagactgttcagataagactcttgggatttataaaatcccagccctctctgtcttaattagcacaaaccgacagagatcatcaaacagcactttaatgacatttaacatcagatgtgtttggtaatcatacaatcactctccatagaatcacttttagttttgtttaatagaaactaggttgatttttaaaaaatatttgacagaggccaatatctgggcaaatacctaatggatgccaaagagaaatgcccatttgtaaatgagaaaaatgcccatttgtgcacaagaaaatggtgaattcaggctatccaaaacttcacattcaacctaatttactgtataaatagtatcaataaatatttgtgttaatgag

SEQ ID NO: 15907 - protein, 201 aa, Homo sapiens
MISRLQQPRLSLQGHPTDLQTSNVKNEEKLRRSLPNLSRTSNTQVDSVKSSRSDSNFQVPNGGIPRMQPQASAIPSPGKFRSPAAPSPLALRQPVKAFSNHGSGSPGSQEITQLTQTTSSPGPPMVQSTVSANPPSNINSATLTRPAGTTAMRSGLPRPSAPSAGGIPVPRSKLAQPVRRSLPAPKTYGSMKDDSWKDGCY

SEQ ID NO: 15908 - DNA, 2343 bp, Homo sapiens
gcgtcattcctcttggatatagatgttttcctggacacaccagctacacaataagccagtaaatctaagtttgacctgcttgttattattgggagccctaggtatgtcaaaggcttttcaccaagccagggttattaatcaaagctgactccctcgtattgatcagacctcaaatggtcgtgttccatgccaccctgtttatatattgctgtttaatttgcagccaccctgcgtgcactctatctaagtgacaacgattttgaaatcctgccgccagatattgggaagctcacaaagttgcagatagtaagtaatttatctaaattcttagaaaatcaattcactgctgcagccttgtaggggtagaatcaagtcaatttgagcaggagtaaggtttgttttgtgggaataaaccactactcctgatagtgtttcttgattatccgccggcacttgtaaatacatggaaaggattgagctttagtagaagagaggacatagaggatgagagtttctgtggagcaccttttaatgtgtaaatatgttgacaacttgttttcttctgtttagctcagccttagggataacgacctgatctcgctgcctaaggaaatcggggagcttacccagcttaaagagctccacattcaggggaaccgcctcaccgttctgcccccagaactaggtaaggttgctgatgaatgaacttagttctgggtttcatgaataacaattatcctaatgtagcaattctgaacaacctctgtcctcttcttggcaactactctccacctaggcacacgatgctgatcatttgagaaccatttgtcattgaccagagttagctgttacaggtttgaccttcccggatcctgtgttctgcagctgtagtgtcccctgtcttagaaactgctgatgaaagatgaccccgctcagctccctgcgtgatgtagtgggaaaagcatgggattagtagtaagagccttatccctggctcctcattgactagctgggtaagctttctgggtcttggttggttattaataactttaagtatcactcttactttttaaccccttaaatttttattgacctggaaaaacttttaccaaatagttaaagtagttgttatggctacttgaacatgttgatacctctgcgggtcgtgaatttgcctctctcctgatcccatctctagtaggaattgttaaatatgttcttgctgggaatggatcctactcctggccgctgaatcctaatcctgtttctctgccaggtcgttcctatttccagggtgggtttatgtcccccgccagaaataacctccaagccagtaattctgttactgcttcgttccactgcaaaaggttcacgagttcccttatcttttcttgtgcagaccctccatagcctctcatttcttcagtcctttgaaccacattgttttctcaaactgcgattatttgcttttctactccaaaataccatcatttttaagaaacacattgaggaagcagttctttaaacaagtttggcagtttgaagaggccatttgttagaaattagaatgcaatcaccaggagggcagggacatttttgtatttgttccctcgggtacagtaggtgctcagaaaacactgactgaatgaattaatgaagcaaggaccttggatgacaggacgttaggaaggttatgagcaggctcatgtggctaatggttacgcataggaagactgagacacagagcacgcctatcagcaccttgagttctgttggcagccatattagtctaaagggaaggcagtcacgtgatttcgtggaccagctgggaagtcccgcctcctctcttgccatttcccttagctctcttgctagtgttaaaaatccacctagaggattatttaatgattttttaagggctgaggagcaactcaacacttctctttactgagttgcaagtagtcacgtgttgctttgggagcagggtgacagaatcaagaaacgctttttgcaaacattttcaaggcaaaaaacttcttgttaaaggagagatctcgggccgggcacggtggctcccagttgtaatcccagcactttgggaggccgaagcaggcggatagcttgagcccaggagtctgagaccagcctgtgcaacatggtgaaaccccgtctctacaaaaagtacaaaaaattagctggacgtggtggtgcatgcctgtagtcccagctactcgggaggctgaggtgggaggatcacctgagcctgggaggtcaaagctgcagtgagcagtgatcgtgccactgcactcctggctgggtgacagaacaagaccttgttgaaag

SEQ ID NO: 15909 - DNA, 2344 bp, Homo sapiens
gttttgcagatcacgttactagaaggacacatttatagttgtgggcggatgtggaatcagagggaaatttacactggacaccaccaccaagcccaaattattataatttagtcttgaatcactttaatcaacactttaaaatattttggtattcttagccataatttattttgttctcttacaagtgctctttagcagttttctggatcatcaaataagagttcagtaaaatttacttttgggtcaattagttggaatgacacttttggaattatcaattactttatttctgatgaattttgaacaggactcaccaacctcatttcttagtttagccgttttgagttacataaagacaaaaacatggcaaggattttacagcaggaaaatgatttgtttttgtttttcaacattcctataatccagagagctgaagaaatctttgatctagaaagcttggaaattcaaagcccctcaaggcacttcttttttttttttcaaattaaagaagaattaaaaacagtatttgtaatggaaaattttggtgccattaagtacataatggcttttactttagtctgtaattcatcctgtggatttaagattttggccaagagtaagttttaggtgtgatataacataagtgcctccaaggtttgctagtgttactgacattctagagtggtggaaaaacaactggcattaatgcagaattggagtgactagtcccaggaatcaagtcagaaaaaaagaccaactgacaaatagagttaatacaaaatgaattttaaaatcccaccctaggccaggcgcggtggctcatgcctgtaatcccagcactttgggaggccgaggcgggcggatcacaaggtcaggagttcgagaccagcctggccaatatggtgaaaccccattgctactaaaaatacaaaaattagcagggcatggtggcaggcacctgtaatcccagctacttgagaggctaaggcaggagaattgcttgaacccgggaggcggaggttgcagtgagccgatatcccaccactgcactccagcctgggcaacagagcgagactctgtgtcaaaggaaaaaaaaaattcccaccctagttagattaggatgcagaggactcacagatttggaggatttggaggacccaaattaccaaaaccccttctattacacacttgtaaagttttattagcagtcaggtacgttttcaggtacgtttccacccccattaacttttcagagcatgtgaggactttcttcctggagcatggtgggccttcaaagcgctgttaaaactacagccgccatttgtccgaggtggtaacattatgtcctgttatagatatcctggatctatttccaggatccagatatctctatttgaaaatgaccgtttttcttccctggtcttaaaagacaagcctgcttccggtgcctctgctggacaccaggagctgcactctgacaaactgtccagggtaaaggaggaagaactggtcagcctagggcacagaaactccagacttgatttaaccgtgtctgcttgaagcatagcctctcttacaaagacttcagaactcctgaattggctccaagccttgtgtgaggtgctctctgcttgccactggccatccctgggtactcaatgtggggctcttttgggaagccatctccagatgcttccttactctgagctgtacctgcttatggccctggtgtctcccatctcctccctggactggaagctcctctctagggcaaggattagatctcattcataatctacccccagacagagtatttcacacctaattaatgttcagtaagtatgttcagaataaatgtatattagtcccttttcatgctgctgataaagacgtacccaagactgggcaatttacaaaagaaagatgtttaatggactcacagttccatgaggctggggaggcctcacaatcatggtggaaggttaaaggcacgtctcatatggtagcagacaagggaagagagctgatgcagggaaactctcccctacaaaatcatcagatctcctgagactcattcatcaccatgagaacagcatgggaaagacccaccccctacaattcaaccacctcccaccgggtccctcccacaacacgagggaactgtgggagccacaagtcaagatgagatttgggtggggacacagccaaaccctatcaaaatggccaaaaagaatatgctcaaatttagactatgaggtacttataatccctcaagcccctgaagattgtcaaacactgaacttgcctttcagctatttctactatttttcaaaagacttatctt

SEQ ID NO: 15910 - DNA, 2774 bp, Homo sapiens
  CDS (916)..(2391)
gtaaagacaaaaaactatatgtatggttttgtggattatgtgtgttttgctaaaggaaaaaaccatccaggtcacggggcaccaaatttgagacaaatagtcggattagaaataaagcatctcattttgagtagagagcaagggaagtggttcttagatggtgatctgggattaggccctcaagacccttataaaaataagccaggtgtggcggtgggtgcctgtaatcccagctactcaggaggctgaggcaggagaattgctggaacccaggaggcagaggttgcagtgagccgagactgtgccactgcactccagcctgggagacaagagcgagactccctctcaaaaaaaaaaaaaaaaaaagcaaatactctattcccacatctctcagtgtccattttgattcttttaaatgcatttcatttccatctataagaagcaactatattctcttcaggggaaaaaactcaagtgtgtgatgctttgtggcttactaaatatggtggcagatagttgcagaatttgtccaaatataaattgttaatgactacttccccccccgccctcaatctgtggtcagatttttcttattagtcctaggggacaagcatgggtgtttgatttcagaaatcagtacctggcgagatttttgtctcaaaacgactatttgaatttcaagaactgtgctgcgaagacactctgagaacatttgcaagtcaggggcattttccttgacccttgactgatgctatgcggagactgatacattttcttaatggacaatgttcaagccaggtacccatgcttgatctgtcttcacaccagacctcctcatattaaaaggaaaaataagaaaaaaaatgtaagcttctatacaattatgatttgcctgtgccagttatagcagcaggaatggacttcctgggaatgaaaatggttggtgagctgctacgaatgtcgggtgcctttttcatgcggcgtacctttggtggcaataaactctactgggctgtattctctgaatatgtaaaaactatgttacggaatggttatgctcctgttgaatttttcctcgaagggacaagaagccgctctgccaagacattgactcctaaatttggtcttctgaatattgtgatggagccattttttaaaagagaaggttttgatacctaccttgtcccaattagtatcagttatgataagatcttggaagaaactctttatgtgtatgagcttctaggggttcctaaaccaaaagagtctacaactgggttgctgaaagccagaaagattctctctgaaaatcttggaagcatccatgtgtactttggagatcctgtgtcacttcgatctttggcagctgggaggatgagtcggagctcatataacttggttccaagatacattcctcagaaacagtctgaggacatgcatgcctttgtcactgaagttgcctacaaaatggagcttctgcaaattgaaaacatggttttgagcccctggaccctaatagttgctgttctgcttcagaaccggccatccatggactttgatgctctggtggaaaagactttatggctaaaaggcttaacccaggcatttggagggtttctcatttggcctgataataaacctgctgaagaagttgtcccggccagcattcttctgcattccaacattgccagccttgtcaaagaccaggtgattctgaaagtggactccggagactcggaagtggtcgatgggcttatgctccagcacatcactctcctcatgtgctcagcttataggaaccagctgctcaacatttttgtgcgcccatccttagtagcagtagcattgcagatgacaccagggttcaggaaagaggatgtctacagttgctttcgcttcctacgtgatgtttttgcagatgagttcatcttccttccaggaaacacactaaaggactttgaagaaggctgttacctgctttgtaaaagtgaagccatacaagtgactacgaaagacatcctagttacagagaaaggaaatactgtgttagaatttttagtaggactctttaaaccttttgtggaaagctatcagataatttgcaagtaccttttgagtgaagaagaggaccacttcagtgaggaacagtacttggctgcagtcagaaaattcacaagtcagcttctcgatcaaggtacctctcaatgttatgatgtattatcttctgatgtgcagaaaaacgccttagcagcctgtgtgaggctcggagtagtggagaagaagaagataaataataactgtatatttaatgtgaatgaacctgccacaaccaaattagaagaaatgcttggttgtaagacaccaataggaaaaccagccactgcaaaactttaataatcaacaaatagttatggaaaattcggtcacgtaattactctcatcgaaggactcattacaacaaacagggaagtaaaggaagagacacatcctctcatactccctgagactctgagaacagtggacgcagagggaagagatgatcattggaagcaatcagtttactcttccccaccacagtggttaaaaggcgtttgtatctgacactatgtgtgtgttttaaaataaacttttggaaacatgtttggaaaagcaaagctcagctcatttcactaacacttttcagcttactatatgtattaaacttttatgttgacttttgaattaaagtatgacaacactgaaagctctggacattaaaagaaaatgaaaagggc

SEQ ID NO: 15911 - protein, 492 aa, Homo sapiens [sequence omitted]

SEQ ID NO: 15912 - DNA, 2008 bp, Homo sapiens
  CDS (17)..(562)
tttggaggaacgggccatgaggcagtttgccatggatgcggctgccactgcggctgcccagcgagacaccactctcatcagacactccccccagccctcgcccagcagcagtttcaacgaaggcctgctggcaggcaaccacaggcaccaggagatggagagcaggttgaaggtgctccatgcccagatcctagagaaagacgcagtgatcaaggtccttcaacagctttccaggaaagaccctggcaaggctacccagggcaccctacggcccgccaagtcggtgccgtccatctttgcagctgcagtggggactcagggctggcaagggttctcaaccagcgagcgacaaactgatgcacctgcccgacagacagtagaccgtggaccagcagaagagcccccggccacacctcctctccctgcccacaccaaacatggcagcagagacgggagcacccaaactgatggccctgcagacagcacctctgcctgcttggcctcagaacccgacagcctcctggggtgcaacggtagccagaggcaacctctctggactctatagctgcaaccagagtccaggatctgtcagacatggtggaaatactgatctgaaggaaggaggccttggggaccctgaagcctggctcccccatggcattccagcaattgtcttcaaatgctgcacctcacttcctccaaccagcaatggttttgtgcaggagctcagagaggagcactccaggggagccagaaaaggctgcacccccagaagactgcttttttttgacctatatttctcccacgacaatgaggaaggaagaggtctgttgctggagcaggaaggggctgagccccctccgtcctgccagtttgtatttgggcatgaagggaaaggagactggattctgattcccaagaatggctggacaccagccaaatggtctgcagggataatcaggccaaaccatggtgttctgtggctaagcatggccccagccagccctaactgctctcagtccctcactgccttcttcagatcactaagacttgaatcttttggggaaccattgggagtgtgagcctttcgggagccaccagcatgtccccttgcttggagtaggttagaggccatttgagaggcccgcagaacagtgtgttttgtatataattctctttccttgggaacagaagactaagcatgctggttcagagtctccttccagagctgtgctgcctgcccctgcttgccacagttcttgaaacatttgacaggtctaccagatgtccctctgcctccagttcttggcggtgtttttttgatactggttgcctttcctctgttttaaacccctgtgttcaatgcccgtgggattcttgtcaccagcctttgttgtgaacggctccaccgctcctacccctgggacatcctgtcagtttggttataaactgagccagatgcgatgagccacaacaagcggatatctgtcatacccagccccaggttctctttgaagaaactggagacgttgttctcataaacgtgttcgttcccaccagcagggactgggagagggagctatgctgttaaaagtaatcggtgaacttaaagaaaagtccccactaggtgcccccatcacagaatggcacccaagaggctggctcctcgagctttggtgccccagccctgaagcagggccagctactcggaattaggcagcctaccagcagcagtgactttaacttctggtcttaaagtaacccccattcagctgaaaaagcgattggtggattgcagatctgttgtgttttctcttgttgttttgttcgttttttctctcattgtttgaagttctgtctgttgttccattcccatggttctccgtgtttcctttttaaacatttgcatttgctgggcaattgcgtatttttttaattccccttttcccctgtgtaaagctgagaaatacatctggttcatgtgcgttgtttacaaagataaaagttt

SEQ ID NO: 15913 - protein, 182 aa, Homo sapiens [sequence omitted]

SEQ ID NO: 15914 - DNA, 1828 bp, Homo sapiens
  CDS (8)..(1549)
gacagagatggcactgatgcaggaactgtatagcacaccagcctccaggctggactccttcgtggctcagtggctgcagccccaccgggagtggaaggaagaggtgctagacgctgtgcggaccgtggaggagtttctgaggcaggagcatttccaggggaagcgtgggctggaccaggatgtgcgggtgctgaaggtagtcaaggtgagctccttcgggaatggcacggttctcaggagcaccagagaggtggagctggtggcgtttctgagctgtttccacagcttccaggaggcagccaagcatcacaaagatgttctgaggctgatatggaaaaccatgtggcaaagccaggacctgctggacctcgggctcgaggacctgaggatggagcagagagtccccgatgctctcgtcttcaccatccagaccagggggactgcggagcccatcacggtcaccattgtgcctgcctacagagccctggggccttctcttcccaactcccagccaccccctgaggtctatgtgagcctgatcaaggcctgcggtggtcctggaaatttctgcccatccttcagcgagctgcagagaaatttcgtgaaacatcggccaactaagctgaagagcctcctgcgcctggtgaaacactggtaccagcagtatgtgaaagccaggtcccccagagccaatctgccccctctctatgctcttgaacttctaaccatctatgcctgggaaatgggtactgaagaagacgagaatttcatgttggacgaaggcttcaccactgtgatggacctgctcctggagtatgaagtcatctgtatctactggaccaagtactacacactccacaatgcaatcattgaggattgtgtcagaaaacagctcaaaaaagagaggcccatcatcctggatccggccgaccccaccctcaacgtggcagaagggtacagatgggacatcgttgctcagagggcctcccagtgcctgaaacaggactgttgctatgacaacagggagaaccccatctccagctggaacgtgaagagggcacgagacatccacttgacagtggagcagaggggttacccagatttcaacctcatcgtgaacccttatgagcccataaggaaggttaaagagaaaatccggaggaccaggggctactctggcctgcagcgtctgtccttccaggttcctggcagtgagaggcagcttctcagcagcaggtgctccttagccaaatatgggatcttctcccacactcacatctatctgctggagaccatcccctccgagatccaggtcttcgtgaagaatcctgatggtgggagctacgcctatgccatcaaccccaacagcttcatcctgggtctgaagcagcagattgaagaccagcaggggcttcctaaaaagcagcagcagctggaattccaaggccaagtcctgcaggactggttgggtctggggatctatggcatccaagacagtgacactctcatcctctcaaagaagaaaggagaggctctgtttccagccagttagttttctctgggagacttctctgtacatttctgccatgtactccagaactcatcctgtcaatcactctgtcccattgtctactgggaaggtcccaggtcttcaccagttttacaatgagttatcccaggccagacgtggtagctcacacctgtaatcccagaactttgggaggccgaggtgggaggagcgcttgagccgaggagttcaagaccagcctgggtatcacagggagaccccgtctctacaaaataaaaaaataattcactgggaaaaaag

SEQ ID NO: 15915 - protein, 514 aa, Homo sapiens [sequence omitted]

SEQ ID NO: 15916 - DNA, 1834 bp, Homo sapiens
tcatgaactgctgacctcaaatgatctgcccgccttggcctcccaaagtgctgggattacaggcatgagtcactgcacctggcctggagcttggattctaactcctgtgtgttttctccaaaaactgtatttcagccactattttcattgtgtcatgcatatatcattttggatcctgttattttattagtattttaccagaaatgttcatcctcattttctcaatgatcatattaaattttatttataatatcatccagtatacagtccctttcactaaataatagtctgagttcattccctaggatattttatatttactataaattatatgcacatgctttgtaaagttttcttttttgaatgttggaactaaaaaaagtcaataaatattctaaaaagtctaacttttttccccatgtcaatacactgcaggacttgtatattctttttcaaatattcataatgtgtcactctagtggtaaagtataaaatagcctattgccttgaggaacttcagatgggcacgcattttatacctaagccaggttagaagcttttaatcaagagaatatttgaaagttaaatcaagccaggcgtggtggctcacacttgtaatcccagcattttgagaggctgaggtgggtggatcatttgaggtcagcagttcatgaccagcctggccaacatggtgaaaccttgtcgctactaaaattacaaaaaaattagccaagtggtagtggtgcatgcctgtaatcccagctacttgggaggctgaggtaggagagtctcttgagcctgggaggtgaaggttgtggtgagccaagatcgtgccactgcacctgcactccagtctgggcaacagagtgagaccctttcccaagaaacaaaagaaaacaaaaaattaagtctttttcttcttcttcagagctatctaagaaatatttcgtaatagaactctagctgtttttatatttttaattatttaatttttaagcgatagtttgcttctgtttccctccttccccactttgcagtttctcaggtatagttgtttttcagagttgtataggttaaggtgttgggaactccataacccatggttcttgcctgtagttctaaaattctcacatttagcagtctgcactcatcaaacatctagttgaactagatgactgattaatcacctcgtgattcattgtgttttacttctcatctagtaaatcttaatgcagataataaatatttttatattccaagttcctaattcacgtaacgatctcttaataagtacttttaatgaagcattccattaaagtggtctggtttttgagaattattaagaaacagaatagagtttttctttgtcccacaggagaccttgtttcaggagtgtaccttttctgatgttcaatgtgaaggatcggcagtgccttttaggaatgaataattgcttttcttcagcaggtgcctttcaaaattgttctcttcacttactctaggaattgcctgtggctgtctgaactctgactcccttctctaagctgagtcaatgctctaatcatgacctttgtgcagctctcactgatggctgatcctccacctggatgttctatttcagactcagtatgttcctccctaagcctatttcaccctctgttcaaaacaatttacagcagggcatggtggctcatgcctgtaatatgagtactttgggaggctgagacaggaggatcatttgaggccaggagcttgaaaccagactgggcaacatagtgagaccctgtgtctaccaaaaaccttaaagcctgggtaacagagagagactctgtct

SEQ ID NO: 15917 - DNA, 2034 bp, Homo sapiens
  CDS (23)..(1972)
agagcggatgtgaggggcgccgatggcggagggaacggcggaggctcctctagagaatggtggtggtggcgactcgggagccggagctttggaacgaggagtggcgcccattaagcgtcaatacctcaccaccaaggagcagtttcaccaattcctggaagccaaagggcaggagaagacttgccgggaaaccgaggtaggagaccctgctggcaatgagctggctgagcctgaggctaagcggatccgactggaggatggacagacggcggacgggcagacggaggaggcagcagagcccggggagcagctacagactcagaagagggcccggggacaaaacaagggccggccccatgtgaagcccacgaactacgacaagaacaggctgtgtccctccctaatccaggagtcggctgctaattgtttcttcggtgatcgctgccgctttctgcacgacgtggggcgctacctggagaccaagccggccgacctgggcccccgctgcgtgctcttcgagaccttcggccggtgcccctacggcgtgacctgccgcttcgctggggcccacctgaggcccgagggacagaacctggtgcaggaggagttggcggcccgcgggacccagcccccgtccatccgcaacggcctggacaaagccctgcagcagcagctgcggaagcgcgaggtccgcttcgagcgagctgagcaggccctgcgccggttcagccagggccccacacccgctgccgctgtccccgagggcacggcagccgagggcgctcccaggcaggaaaactgtggtgcccagcaggtccccgcagggccgggcactagcacccctcccagcagccccgtgcggacctgcgggcccctgacggatgaggacgtggtcaggctgcggccctgtgagaagaagcggctggacatccgtggcaaactttacctggcccccctcaccacgtgtgggaacctgcccttccgacggatctgcaagcgcttcggggcggatgtgacatgtggagagatggccgtctgcaccaacctgctgcagggccagatgtccgagtgggccctactcaaacgccaccagtgtgaggacatctttggcgtccagctggagggcgccttccccgacaccatgaccaagtgtgccgagctgctgagccgcaccgtggaggtggactttgtggacatcaacgtcggctgccccatcgacctcgtgtacaagaagggtgggggctgtgccctcatgaatcgctccaccaagttccagcagatcgtccgtggcatgaaccaggtgctggatgtgccgctgactgtgaagatccgcacaggcgtccaggagcgtgtgaacctggcgcaccgcctgctgcccgagctgcgggactggggcgtggcactcgtcacgctccacggccgctctcgggagcagcgctacaccaagctagccgactggcagtacatcgaggagtgcgtgcaggccgccagccccatgcccctgttcggaaatggggacatcttgtcatttgaggatgccaaccgcgccatgcagactggtgtcaccgggatcatgattgcccgtggcgccctgctcaagccgtggctcttcacggagatcaaggagcagcggcactgggacatctcgtcgtccgagcgcctggacatcctgcgggacttcaccaactacggcctggagcactggggctcggacacgcagggcgtggagaagacccggcgctttctgctcgagtggctgtccttcctgtgccggtacgtgcccgtggggctgctggagcggctcccacagaggatcaacgagcggccgccctactacctgggccgcgactacctggagacgctgatggccagccagaaggcagccgactggatccgcatcagcgagatgctccttgggccagtgccccccagcttcgccttcttgccgaagcacaaggccaacgcgtacaagtagcctcaggctttcccaggggcaccctggggcgaggagagtacaataaattttattctttt

SEQ ID NO: 15918 - protein, 650 aa, Homo sapiens [sequence omitted]

SEQ ID NO: 15919 - DNA, 2719 bp, Homo sapiens
tccctttttaaaataaccatttaaaaattttctaccctgaattgcattttgaaagggatggttcctaggtaacacaaggtagaaaatttacatctcaaaggcagagaacttacatttcaggcctaaatattgttatttgccaagacagaaagttgatgctaagaagcccagttcagacaaaatggttgaaggtgagtttatttggactaatgctctcacctattgtaagaatttctactgattttcctttatagatacacgtttttacaaagagtttcaaaataactggctaaataccagaaacgcaaattttggagactgatttaattcaataggcggtcttttcaacttagcttctgtttcttaactagattactgagttcagggcagagcccattagcaaatagagcagacaaagggtttcctatttctggatgcagatggatagttctgaaaatgcaaatctgcttcacccaagggcctaatttttataaatattacctagctttctttttccctttggagtaaaacagtaactaagtgaaaagattggcagattcaattttcttataaactagttgcttaaacttttcatttgccttctacatgagctcttttaaagagacaaacatttttgaaatctttttagaagcttttgcacatcaataggtatccctaggagggcctgattcagaagccctcatttttaaactcaattcttagatgaacagtcttattcatctggaatgttccacataatggtcatcataattctaatttatctttagtaagatttcaccatttttgtaagtatttgcagcttctaggccctaacacatgtaaaaggtaaacatagccagaaggtgaaatacacagttctttaaaaatttaaggatgctggccaggcgaggtggctcacgcctgtaatcccagcactttgggaggctgaggtcggaggccaggagtttgagaccagcctggccaacatggtgaaaccccgtctctactaaaaatacaaaaattagatgggtgtggcagtgtggcctttaatccagctacccaggaggctgaggtgcgagaattgtttgagcccaggaggtggaggttgcattgagctgagactgcgccactgcactccagcctggacaacagagtgagatgctgtcttaaaaataaaaaaaagaattaaggatgccatttttaagttgaatcttgagtctctcagagtcaagataaaagtctgagtgaaacgccatgaggttgggtcactgtgtttgctatctatctacctatctatctatctatctatctatctatctatcatcatctatcttatcatcatctatctttatctatctatctatctatctatctatctatctatctatctatttttgtccaggtttcctggcttgtaattcccatagcccttgttacaagcttttgttacaatgttgggtgttaggccttgcaggcaggcctcaggaaacagaatctctctgaccttctcttgccttcctttcacttccgcaaggcagaactgtgggtcatataaacccttattccagagagggtcctgctccatatgctgggggaaagaatgccaacttaatgaagcatccataaaaacccaagaggactgggttccaagagcttctggatagctgaacacatggagggtcctggagggtgacacaccccgggaggactggagagctctgtgccccttccccaatactgtgccctatgcatctcttcatatgttatcctttatgattttctttgcaataaactggtaaacgtgtttccctgagttctgtgagctgcaccagcaaattaatcaaaccccaagtggaggttgtgggaaccccaacttgaagccagttggtcagaatttccagacacccagagttacaactggtgtctgggaggtggggcagttttggggactgagcccctcgacctgtggcatctaacactatccacctggagacagtagatagtgggcaacatggtgagacccactatctccaagtagatagtgtcagaataaaactggaggacacctacttggtgtccactgcttagcgtgtgggaaaaactctcacacatttggtcacagaagtcttcttatgtgttgatgattgttgttatgttagtatgagagcagaggaaaaatggtttagagttttttcccaaaacagtcatgtaatgctatcatagtatacctcagtgcatagatgttttattttttctgccactcattctagagtgcagtggcatgctcatagctcactgcagccttgaattcctgggctcaaggtcttagctttccaagtctcagctttcctgggctcctgcctcagctttccaagtagctgggattacaggcacataccaccatgcctggctttgtttgttttttgtgtggacagggtctcgctttgttgcccaggctggtctcaaactcctggcttcacgcaatcctcccacctcagcctcccaaagtgctgggattataggtgtgagccaccatgcccagcctaaataattttttaaattccagtttttaattattctttgttaggatacagaaatgctttgtgtcctgcaatactgttaaatctccttattagttttagcagctttttttgtaaatcccttaggattttctatgtatgtgattgttatctgcaaataaaggcagttttatttcttc

SEQ ID NO: 15920 - DNA, 2326 bp, Homo sapiens
  CDS (94)..(2325)
cccctcggccccccgcacaccccggtcctcgatgacccctctccgcaggatggtttcccggtcctctggcgaggatcctccaaggcgtctcacatgaaccggctcagaaacgccaaaatctacgtggagagagctgtcaagcagaagaagatctttacaatccaaggctgctacccggtgatccggtgtctcttgcgccggaggggctgggtggagaagaagatggtccatcgctcaggccccaccctgctgccaccccagaaggatctggatagctcagcgatgggtgacagtgacaccactgaggatgaggatgaagatgaggacgaggagttccagccatcacagctgttcgacttcgatgatttactgaaatttgatgacctagatggaacacatgctctgatggtgggtctatgtctcaatctccggaatttgccgtggtttgatgaggttgatgccaactccttcttcccacgctgctactgcctgggggctgaggatgacaaaaaagccttcatagaggacttctggctgactgctgcccgcaacgttctcaagctggtggtgaagtctgagtggaagtcataccctattcaggcagtagaggaagaggcctcaggagacaagcagcccaagaaacaggagaaaaacccagtgttggtgtccccagagtttgtggatgaagctctgtgtgcgtgcgaggagtaccttagcaacttggcccacatggacatcgacaaggacctggaggccccgctgtacctcacccccgagggctggtccctcttcctccagcgctactaccaagtggtccacgaaggggcagaactcaggcacctcgacactcaggtccagcgctgtgaggacatcctgcagcagctgcaggccgtggtaccccagatagacatggaaggggatcgcaacatctggatcgtgaagccaggagccaagtcccgcggacgaggcatcatgtgcatggaccacctggaggagatgctgaagctggtgaacggcaaccccgtggtgatgaaggacggcaagtgggtggtgcagaagtatattgagcggcccctcctcatctttggcaccaagtttgacctcagacagtggttcctggtaactgactggaacccacttaccgtgtggttctaccgcgacagctatatccgcttttccacgcagcccttctccctgaagaacctggacaactcagtgcacctgtgcaacaactccatccagaagcacctggagaactcatgccatcggcatccactgcttccgccagacaacatgtggtctagccagaggttccaggcccacctgcaggagatgggtgccccaaatgcttggtccaccatcatcgtgcctggcatgaaggatgctgtgatccacgcacttcagacctcccaggacaccgtgcagtgtcggaaggccagctttgagctctatggcgctgacttcgtgttcggggaggacttccagccctggctgattgagatcaacgccagccccacgatggcaccctccacagcagtcactgcccggctctgtgctggcgtgcaagctgacaccctgcgcgtggtcattgaccggatgctggaccgcaactgtgacacaggagcctttgagctcatctataagcagcctgctgtggaggtgcctcaatatgtgggcatccggctcctggtagagggcttcaccatcaagaagcccatggcgatgtgtcatcggcggatgggggtccgcccagcagtccctctgctgacccagcgaggctctggggaagcccgtcaccacttccccagcctccacaccaaggcccagctgccttctccccatgtactccgacaccagggccaggtcctcagacgacagcacagcaagctggtgggcactaaggccctgtcgaccacaggcaaggccttgaggactctacccacggctaaggtcttcatttccctcccaccgaaccttgatttcaaggtggcacccagcatcctgaagccaagaaaggctcctgctctcctgtgcctccgaggcccccagctggaagtgccttgttgtctctgccctttgaagtcggaacaattcctagcacctgtcggaaggtcaaggccaaaggcaaattcaaggccagactgtgacaaacccagggctgaggcctgccccatgaagaggctgagccccctgaaacccctgccccttgttggtacattccagaggcgcaggggcctgggggatatgaagctagggaagcccctgcttcgattccccactgcccttgtcctggatccaacaccaaataaaaagaaacaagtgaagt

SEQ ID NO: 15921 - protein, 744 aa, Homo sapiens
MNRLRNAKIYVERAVKQKKIFTIQGCYPVIRCLLRRRGWVEKKMVHRSGPTLLPPQKDLDSSAMGDSDTTEDEDEDEDEEFQPSQLFDFDDLLKFDDLDGTHALMVGLCLNLRNLPWFDEVDANSFFPRCYCLGAEDDKKAFIEDFWLTAARNVLKLVVKSEWKSYPIQAVEEEASGDKQPKKQEKNPVLVSPEFVDEALCACEEYLSNLAHMDIDKDLEAPLYLTPEGWSLFLQRYYQVVHEGAELRHLDTQVQRCEDILQQLQAVVPQIDMEGDRNIWIVKPGAKSRGRGIMCMDHLEEMLKLVNGNPVVMKDGKWVVQKYIERPLLIFGTKFDLRQWFLVTDWNPLTVWFYRDSYIRFSTQPFSLKNLDNSVHLCNNSIQKHLENSCHRHPLLPPDNMWSSQRFQAHLQEMGAPNAWSTIIVPGMKDAVIHALQTSQDTVQCRKASFELYGADFVFGEDFQPWLIEINASPTMAPSTAVTARLCAGVQADTLRVVIDRMLDRNCDTGAFELIYKQPAVEVPQYVGIRLLVEGFTIKKPMAMCHRRMGVRPAVPLLTQRGSGEARHHFPSLHTKAQLPSPHVLRHQGQVLRRQHSKLVGTKALSTTGKALRTLPTAKVFISLPPNLDFKVAPSILKPRKAPALLCLRGPQLEVPCCLCPLKSEQFLAPVGRSRPKANSRPDCDKPRAEACPMKRLSPLKPLPLVGTFQRRRGLGDMKLGKPLLRFPTALVLDPTPNKKKQVK

SEQ ID NO: 15922 - DNA, 3552 bp, Homo sapiens
  CDS (1641)..(2042)
gtctgtgtggagacgaaagctgcccacaagggagcgagggagctgggagggggtggtaagagatgaggtgggaaggatgggttgggtgaaccttgaaataattgtagttgtactttgtgaaaaaaaactttatcatcaaggctttgtcctgatccaacctgaccttcccctcagttaatccgaattactgaggtttgactccatgttcagtttctctgagatttgctttgatttctcttagaagtggagctgctgtttattctcccggtggctctgtgtacacgctctgcccgtggagctgcctgggatgagccgtgagtcctctgagaactgcttcctgtttcgtctggtaactcctaagcctgcctttctttcctacagtctgcatttgtggaaatctgcagtatttgaagtttggaggagatcaatttttcatcctttccttcgtgggataaagaatatttcaaccacctctggagaccaaagagttctgagaagttttgaaatagcttgggaaatacaccacgtgcttcacacttcatttttctcctctctctttcattgtttgacttaattaaaatattgtaatgcaagaaggagagatgaggcaaacgtttagagaaggaaaaggaaatgggttcatgtttaaactgactctgagcaagcatggcgatggtagtttgaaagaattctgagcatgtaggaaggtaaactcaaaatgttcttcctgcctgagaagtgattaaaatacctgtgagcaccaacactattgtcgttaatgaaaactgtggccagctttccccacccccaagtgctccccacaacccaaagaaaaaattggaacatttttgggtccaagtttcacagatgttaagcattttgtgatattacttagggggtttcctgagctgcattaaagttgaaccactagggtgttgaaacagttgggccccataataaaatatacatgaaaaggaattgtgaaacattggctgttgtgtgttggtgacaattaggttactgttttaaaaaatacataccctggacacatctatgggagctttttagagaattttgagtagcactagagtaaaggcggttggtaatttctctggttgcctctggcaggtggacataatttaacaatacccgtcagatatgacaaattgtttttgagttacattagggccttaataagatcacatctgttcatatatcctccttaaccacagagcctgatttagagaggtttcatactggtatgatattgttgtttaaatatttagaggggtctagacatgtatcataaaagaatagactcttgtgtataaaaacacagtccttttattctcagtgtttttgctttcatggaccttgcatcattctgtctacttgagtgaaccacatgttgcttctaggagccagaaaatatatttcattcctcgtcagagttagtgttttagagctggaagaggccttggagaccaacttatccagctcccctcctctttagggtagaaacctgagatggagacagaaggaggggacttatttagggtttctcaccccattagtggcagaaacagaatcaggacttagatctgccaatttgtagttcggtcgtctttctgttatgctagatgttcacctgggacctgaaaatgtggccattgaggcactttgatgtgtcactgtcccttagaggctgcagtcctttccaggggacattcctggccactgagagggccaggctctttgctatgtattcagattcagagcccagatcctctagtttaggaatacctaaactatctccctgcctgaagaccttcctgtgccagcgtactttctgtcacttccctgctgacatgcacaggcacaggcaagtctctctcccatctctgaccacactgtgcacgtccccaactctgctcacactgttcccttctcctggaatgtgtcctctttgctatgtcagttactgtcatgtccagcataagctccatcttatcatgacgtctcccaagcccacagaggtgtgttaggtcgaatcatgtgaaaatgctgttttataggtgaaaaaggtcaaatattgtcagttttaacatgtctcaatgtattaaataccatgggggtaaataaagctcttttaaataagcagagattgtaatcaacacatacctcatggtaaatcatttaagaggctctataaaaacgtttatgcacagccatacataatgcatacatttctgaaataaaataaaataaatgcgtgcttttagaataggctgtagttacattcctctcccatgccatcgacatcaatttcccctgtagatgatggaggtgcgatgttcagacaaatgctgacgcagaccgacgggagctggaggctgaggggcggcggcctggcaggtgatgtctctccagtcttggggaatggctcctgggaacacgggtgtctgcttgcggcatcactggtcatcacaggctggtggggctgggtggttgtggctgtcagtctcaggcagttgaggctgactttttgtgcagccctgtgtgatgtctggatttagggagacgccaggaaagtggatgtagataatgctttacccagggcccctctgtgaccacctgtctcttccccatctccaggcaacagcagccactaagaagtgctagagtcattggcttcctaagaaattggcatgagcactcaggcccccttatccctacacagagaggcggaaactgtaccatgtgcctggctgtgtattcttcaaatatcaggctcatggcatttcagctaagaatcccaacatctgttgatcagcaacagacttggcaaatagtggtgcttagtaagtagcccttgagacagaggacctgatttgtgattcaatttctaataattcataaatgactcatgaatagcactcaatttgagggccattatgacactttgagaggcatagtaagagtatattgcattgatatagtatggtgtactcttttagaagcctgtcattcatatatatatatatatggaatttatgttaatcaggataagcatatattaaggtatgtttattaagtcacaagaagatctcttacttggccagtttgtggggtggggatggtttgggattgctctgtaatagactaccactagcttagcagcatgaaacaacactgtttactagctgtaggttgagaaacccagcaagcctgcctggtaaagagtatcagataggaaacagatagcaaacagcacaaggctggaatcagggtgtcagcccctgtgtatttctttctggaggctctggcaaaaacccacttccaggctctgtcatgtcgttagcagaatgcacttccttttggctgtaggactgaggtccctgttttcttgctggctgttggccagggcacattctcagaccacatgcccgcctccatctcaagtgagcaactctctctcatgttgactcctccttacctttctgatctctctgacatacgcttctgccaccagccagagaataccactgcttt

SEQ ID NO: 15923 - protein, 134 aa, Homo sapiens [sequence omitted]

SEQ ID NO: 15924 - DNA, 2175 bp, Homo sapiens
  CDS (52)..(603)
atatacttgcgcgccgacgccgccgctcgcttgtgaaactggaaggctgccatggctagcccagccgcctcctcggtgcgaccaccgaggcccaagaaagagccgcagacgctcgtcatccccaagaatgcggcggaggagcagaagctcaagctggagcggctcatgaagaacccggacaaagcagttccaattccagagaaaatgagtgaatgggcacctcgacctcccccagaatttgtccgagatgtcatgggttcaagtgctggggccggcagtggagagttccacgtgtacagacatctgcgccggagagaatatcagcgacaggactacatggatgccatggctgagaagcaaaaattggatgcagagtttcagaaaagactggaaaagaataaaattgctgcagaggagcagaccgcaaagcgccggaagaagcgccagaagttaaaagagaagaaattactggcaaagaagatgaaacttgaacagaagaaacaagaaggacccggtcagcccaaggagcaggggtccagcagctctgcggaggcatctggaacagaggaggaggaggaagtgcccagtttcaccatggggcgatgacaatgtttgccacagcctctgcctggaacctggctcgtgctgtgaccagaagggaaaggcggctgtttggctctttctcccccgcaaggacccgctgacccgctggatggagagcaaaggagacccctcccgagccgctcacagtcctgtatttggcaggtttgggagcctgaggggccatctccctgacactcagaggcactgccttgcagacaccatccgtgctcctggtaaagggggacagagagcctcaccttgccacatatttgaacagtgatgagtttggggctggtttctgggaagggaacgtttatttagtaaagagcagaacacccttgcgttttgttgggacatgtggaccgtgagtcgcaaacactctggagaaggctgagatgccaccattcccacggggactgaagacacattacgtggacctggtcccaggctcagtgaggagatggcctcagctgtggggctggtccatgttgcccactcactccagtgggaagtggggaccacgccatagagggtctgctcccactgcagctcccggtgctctcgtgttctgggaaggcctgggtgtgtgcacaaggaggcccgggccagggacttcaccaggggctgggtcacaagggcacagggtgtgtggaaagcgctgtgggggaagagccggtcaccggagagtgagcaggcggagactccaagctgggctgagccagagcagaaggcgagggattcccagccggacgggggttctctcaccaacagctgtgatttcatcccgaagtggaagggggtctaaacagaacaggctgagagaggcgggactgggtcaagtgggtggagctcctccttgcatgactgcaactgtcggggctttccgccggctcacagcagttggggccagcggggagaagagaggcggaactgctgtgtcctcacgtggcgcagcctcaaactggcatccaggcactgggcccgtgcagagaaggcacctgcagagagcagggcagcccggcgcaggggcatgcgcctagaatcccagctactcggaaggccaaggcaggaggaccgcttgagtccagggattcaaggccaacctgggcaatagagcgagaccctgtctcttaaaaaacgatgatgatgaacacagaggacggggcactgtgctgggagccagggggcctgggaggagccgagaccagccttttacctcggggttttgaggccaacagggacgacagagacagtttctagttagagccttggctccatttttggatgatttagccccgagttcctgagtctattttatgccccttacgtactttgatagaactaaggaaatagtggttttgagtgaagggaaaggaaacccagaaacattttacgttgcttttacttctgtagtgtagattgccccggcccctctctgagccctgtagcatctgtgatagcttctgtcccttcatcggttcatgtcacagggattttctttcccaggaagcggacacggagagtcagccctaataaatgagcacatgccctggctgtacattttgaaacctg

SEQ ID NO: 15925 - protein, 184 aa, Homo sapiens
MASPAASSVRPPRPKKEPQTLVIPKNAAEEQKLKLERLMKNPDKAVPIPEKMSEWAPRPPPEFVRDVMGSSAGAGSGEFHVYRHLRRREYQRQDYMDAMAEKQKLDAEFQKRLEKNKIAAEEQTAKRRKKRQKLKEKKLLAKKMKLEQKKQEGPGQPKEQGSSSSAEASGTEEEEEVPSFTMGR

SEQ ID NO: 15926 - DNA, 1928 bp, Homo sapiens
  CDS (1077)..(1646)
ttcttagaagtggaaatgtgtgtagcaataggaacggttcctaaggccaagaataaatggattgcggttgtgggtcttttggtagcactaagctttctgttgcagtgtgtgagaggacccggggagagcccaatcttcgaagggacagatgaggggtatgacctggggagcccacaaccgcctttgcttttcgcagatgctgggaacgcagctctgctgccggcggggtggacagaccctcccccagccattgctgcccacctgctgcgtcagggcctcccctgcccagctcagtcttggccaagcccagtctggaggagcatgcaccgcctgtgagcggtctgggcagcgcttcccaggttgcccatcagatgagcccgtcccaggtgtcgaggaggagatctcctgagcggcagtctcggaaatccttccccgtggaaggacacgttaacctctcgtgcttcccatttcaaaattctgtttccaacacgatttgatgaaagattgaaatatctgaaaactcatttcgagcacagggtctggcattgtgattctcaggtgaactgggcgtatggttgaggtaggacttcaaaaaagtgttcgaacgtcatttgcagcatttaaactgagctccaaatgacgttcaaacacccctctcgggtagagttttcatggtggaacggttgcgcccaccaaacagaagcttatgtttttggcacagaaggcctgggccattttcatggacacctggctggacctcggtggaagtgaactccgtaggttgttgcgttcactgcagcacctcacatgataccgtcccctctcatggaacggagcctcccccatgcagcccccactcaaatggagttttaaaggctgggttcaggttacgggggcgtttctcaccgtctgaatgcggaggacagagacgagctccagggagcgtgggcgggtgacggcgctgagatgcgtgatgtctcggaaacgtcctcgcatccctcagcgcgggcgctgactgccgcggcccttgcctgtcttccaggagcgctccagcttcgcccacacaccccgggctgatgtcccctcgctccggcggcctgcagaccccagagtgcctgtctcgggagggctcccccattccacacgaccctgagtttgggtccaagttagcttctgtcccagagtaccggtattcccaaagcgcacccggctcccccgtcagcgcccagccagtgatcatggccgtgcctccccgaccgtccagcctcgtggccaagcccgtggcctacatgcccgcctccatcgtaacctcacagcagcccgcgggccacgccatccacgtcgtgcagcaggcccccaccgtcaccatggtcagggtggtcaccacatctgccaactcggccaacggatacatcctcaccagccagggcgcggcggggggctcccatgatgcggcgggcgcagccgtgctggacctgggcagcgaggccagaggtaatgcagccgcggctggcagccttcgcaggaccctttgtggtggtcccggccggcaagtccccaaggcagcgccattggcctgggcctggggcttgaggaggatgattctctgcttctgcctctcgctgccttgtccctttaaatcagcatgagctgggcaggtggctcatgcttataatcccagtgctttgggaggccaaagcgggtggattacttgaggtccggagttcgaggtcagcctggccaacatactgaaaccccgtctctactgaaaatacaaaaattagccaggcatgatgatgcgctcctgtagtcccagctactcaggaggctgagggaggagaatcgcttgaagcctggaggcagaggttgcagtgagctagactgcgccactgcactccagcctgggcgacagagcaaaaccccgtctc

SEQ ID NO: 15927 - protein, 190 aa, Homo sapiens
MSPRSGGLQTPECLSREGSPIPHDPEFGSKLASVPEYRYSQSAPGSPVSAQPVIMAVPPRPSSLVAKPVAYMPASIVTSQQPAGHAIHVVQQAPTVTMVRVVTTSANSANGYILTSQGAAGGSHDAAGAAVLDLGSEARGNAAAAGSLRRTLCGGPGRQVPKAAPLAWAWGLRRMILCFCLSLPCPFKSA

SEQ ID NO: 15928 - DNA, 2403 bp, Homo sapiens
atacccaccatcgcatttccagggagatgagagtggaaagaccctgggcgctggtaggactacaccctgggataccagtgcagaagccgtgtcctggtgcagaaaggattttggtagggagcagaggaggcagaagtctgggctctggaccagttacctgaaggcattgcgaagtttctctcccactgggtatgtccggtccttcttctcaaactcatcgtcgaagagggctggagtgcagtggtgcagtcacggatcactgcagcttggaactcctgggctcaagccatcctccggcctcaacctcctgagtagctgggactacagggatggtgatgaaggaccccagaagcgctgcctgtacacccccaaccaggctccagtgggtgccacttgtcccggcctgaagtcacagcctccagatgctgcctccctctgccaattcctatacctgctggggtggacactgagggccagtcccagacttgggagcagggtgggagtgggatgggggtggtgcgtagggaggacctctatgtggccctgattgttggctcagtttcctctgcctgggggatgggttgagatgtcccctggttgtgacagaacagaggctgcaggttctcagcccctgcaatccccaccctgcatttggaacattctgtcctggctcctgagtctgaagaaggtgcaaaatgtgtggtttggaactcctattgaatctgagcgtggctctgcctcttgcagactcagaatcttttccattctagcttcagtgtgtctgagactcattgtttgctaaggattgattccatgaatgagtgacctgccctcagtggggcccatccttgatcgtaggctctgttgttgctgtcttgaaactcaataatgtctgaacaagagacccggatctccattttgcaccgggttctgtaaattatgtagccagtctcagttcacttttagttgtctgccctttagtatctttttcatatcgaaccacgtagatgtatttttaaaaatataaaatctaagtcgcacaaaagataaaaacaaagaaggacacatttattatttgttgtgcacctttagaaatggtccacaggtccactgcagtgcacaagctgctgcatgcacaccgcacgtgacaatccagtctgcctgactcccaggacagcctgtgtgatatgcaaaatgccattcccatgagggcgcatcatgtttcccaggagctctgaaggacacagatagagcttgtgctctaggctgcccccctgttcccgtgctggctccatgctggtgtccagaatgagccagttcacactccagtgccacgtggggggagaagtggcccccaaactcccctgctgacctccccccggcccctaggtgtaccttccaagtcagatgacagtcataggctaacatccccagctttgcctggaactcaggaaaggatacttacgggtagacagaaagattctgcagtgggcatggacttggccattgaagaccctgagaggacatcttgtccaccctctccaggctaggccctgtctgtgctgcctggagccagaagaaaaagattccagccttggaatctgcagggagggagactccttgcagtgagctttcttgcatttcattctagtatttgccacagatgctgatttcttgcctgagtcatatatattgaagtttttgctcatttcttactaggcttaagaaattggaattctctgccttacaaatcccaaagggctaaacatgcctccaagcccatgaacaagctttgagcatctgaaggacaaaaccccagctcctaaaacgttcatgagcatccactttctgctcagcctggaagagaaggagcactgctgccctctggtggtcaggcagcagagcatctaggagccacccaagggagctgggtcccctttgctttgtctttgggacagcagctttgagtattaggtcaatggatgtcctttcactgttcctggaacatggcaagcttgtttttgcctcagggctttgggtcttgatgctccctctccctggaatgttctttctccagctctcaggtgacagctgctttcacattctctagccctcagaccagatgccacctcctcagggaagccctcctggaccacttcatctaaaatagcaactcatcccaccccctgtcactctatcccattaccctgtttccctttgtttatagcacttacctgctatttggaaatatctgtctagagtctgcgtctctccctcaccagatgtcggctccaggagggcagagtccctgtgttttgtttgtcactggacttcaatgcatcgtacatagtagatacgcaaaaataaacttgtcaaagaagtaaataaatgcatattgacaac

SEQ ID NO: 15929 - DNA, 2473 bp, Homo sapiens
tttctgctacagacaggccagggacttagacacaaatggcgagggatgaggagcttgatgacgtgtcaagggggattagatatcaagtgtgggggatgaaaagcaggattcttgctggaactgagcttgccacggttggacgtggaaggccaatgttgaggcctagtggagaagagggcttggaggagcctggctaaggtttggtcaaggagagtctgtcacaagatagacccatctgtatccaggctaacgcaatagggtgaccaaatgcagcccgcacgcttctctgtgtttctctccaggtcctttgggcacttagtttataattttttattttctattttttatttttatgggtacatagtataggtgtgtatggagtacatgagatgttttgatacaggcatgcaatgtgtaataatcacatcatggaaaacagggtattatgggcacttagtttagccataaggcttccgtgccaagtggcctgggagccagctggggccagcttctgccacaggcatccttcacccacccttctcacaaacaagcgattcttcaataaacaataaacagaatacacaaaaagcaaaccaaaacatctctagatttattaatagatgggtgaattaaaggagtcttttccaaataatgtgactaacagaagccaagggggatgaatgcccaaagctggggcttgccagaacctgctggtaccgagagctgattgctgaagtgtgaggaattttgtgagccagctgacagcacattggcagcttgggatctgccagggcgggattgtttacaccacaggatttagcaaacgttatgaatcaacccctccatcggccccaagcttccctgacacaccaaacagtagaaattcactgcctttttttttttttttttaactctgcttggtgttagctaactagtcatgaagaatagaggctgaagtgaccaaagagatctttctgcattttgacattcaaatatttggaaagattttccgcattcagcatttggattctagtcccattgccaggctcaagtaagctctgtgataacaacactcagctgttggaaactgctgtccgaagcatctctcagcagatagggaggcctaaaaggacacggcagagtggtgtctggtgggtcctctcctgacatttcttctctctctggtcaaatgctggatgcacacatatagtggctctgagacttcctatctgggtgagctcaggcagttctagggacctctctgagccctagtttcatgtcctgtacaacagtagtcattcctactgcacatggttcttgagaagattggaccagaacatgtagctctggctcctggcccagacctgatcaacactcagcaaatagtggacactgatgctgttaggagaacagagcatccatatgaagggcggttccctgagctggggagaccagtgacaactgtaagtctgggttcagagcatgagtcgggggacggagaaggcccctgggcatctggccctgggtggctgagccctgggaatcctgcttttcccagagatgtgcttgtgcccagtgtgctcatgttttaaatgccagcacctactccaggaaaatgatgggtatttcaatatctgctcacattatgcatatttaaatatgaatttaaatactgtttaattctcctagggatgtgttgtcatttaaaagaggttgtgattagcatgaaggactggggacaggagcaggagatggcagagcagctgtaggcactgatgtaatgcctccagctttatgaggacgggcccaaccaggcttcacccatttggggccctcaagcgggagcgtcagtggcagccctcgccatcgtccgtctgttgaatgtattgccacatggccacattatgccccaggagccatgtgttggaggacagtatccttaggcttctcagaaattccacatgggagcctcaaatggacatgcttttcttgaaaacaaaaatatttgtaaaaatgtaacaatgggagtcgtttaatctcaagtctcccctataagcaaaaatagataaaattatgaaatgtaagatgtaaattattctgtttcttagctgatccttaatcttgatgatattttcaaaacaaatgaataataaagacatgagaaaaggtttcctttaaaaagtcgtggttctcgccaggcgcagtggctcatgcctgtaatcccagcaccttaggaggccaaggcaggcggatcatgaggtcaagagatagagaccatcctggccaacatggtgaaaccctgtctctactaaaaatgcaagaattagctgggcatggtggcgcatgcctgtagttccagctactcgggaggctgaggcaggatttaaatactgtttgaacccaggaggcggaggttgcatgagccgagatcgcaccactgtactgcagcctgacaacagagtgagactctgtc

SEQ ID NO: 15930 - DNA, 3273 bp, Homo sapiens
  CDS (188)..(2968)
cttttttgctgtcgccgcccccactgaagcaagagctccccggctccactgaaacaccagctcatttaagctttccccaacgaccggccctccgggacgatacctaacaacgaccggcgcccgcatctggaataggctggcgagatacttagtatccgagggctcgggacttggcgccatcgaggtcatggggacccaggatccagggaacatgggaaccggcgtcccagcctcggagcagataagctgtgccaaagaggatccacaagtttattgccctgaagagactggcggcaccaaggatgtgcaggttacagactgtaagagtcccgaagacagccgacccccaaaagagacggactgctacaatccggaggactctgggcagctgatggtttcctatgagggtaaagctatgggctaccaggtgcctccctttggctggcgcatctgtctggctcatgagtttacagagaagaggaaaccctttcaagctaacaacgtctccctaagcaacatgataaagcatataggcatgggcttgaggtacctgcagtggtggtaccggaagacccatgtggaaaagaagacacctttcatcgacatgatcaattctgtacccctaagacagatttatggttgtcccttgggtggcatcgggggaggcactattacccgtggctggagaggccagttctgtcgttggcagcttaaccctggaatgtatcagcaccggacagtcatcgctgaccaattcacagtgtgcctgcgtcgggaagggcagacagtgtaccagcaagtcctgtccctggagcgcccaagtgtcctccgcagctggaactggggcctgcgtgggtactttgctttctaccatgccctctatccccgagcctggactgtctatcagcttcctggccagaatgtcaccctcacctgccgtcagatcacacccatcttgccccatgactaccaggacagcagcctgcctgtaggagtctttgtgtgggatgtggaaaatgaaggggacgaagctctagatgtgtccatcatgttctccatgcggaatggactgggtggtggagacgatgccccagggggtttgtggaatgagcccttctgtctggagcgtagcggggaaactgtccgggggctgctcctgcatcatccaacccttccaaacccctacacgatggctgtggctgcacgagtcacggcagctaccacggtaacccacatcacagcctttgaccctgacagcacggggcagcaggtgtggcaggatctacttcaggatggacagctggactctcccactggccaaagcacccctacgcagaaaggagtaggcattgctggagctgtgtgtgtttccagcaagttgcgacctcgaggccagtgccgcctggagttttcactggcttgggacatgcccaggatcatgtttggagctaaaggccaagtccactacaggcggtatacaaggttctttggccaggatggagatgcagcacctgccctcagccactatgcactgtgccgatacgcagagtgggaagagaggatctcagcttggcagagcccggtattggatgacagatcactgcctgcctggtacaaatctgcgctgttcaaagaactatacttcctggctgatggaggcacagtgtggctggaagttcttgaggactccctaccagaggagctgggcagaaacatgtgtcacctccgccccaccctacgggactacggtcgatttggctaccttgagggccaggagtaccgcatgtacaacacatatgatgtccacttttatgcttcctttgccctcatcatgctctggcccaaacttgagctcagcctacagtatgacatggctctggccactctcagggaggacctgacacggcgacggtacctgatgagtggggtgatggcacctgtgaaaaggaggaacgtcatcccccatgatattggggacccagatgatgaaccatggctccgcgtcaatgcatatttaatccatgatactgctgattggaaggacctgaacctgaagtttgtgctgcaggtttatcgggactattacctcacgggtgatcaaaacttcctgaaggacatgtggcctgtgtgtctagctgtgatggaatctgaaatgaagtttgacaaggaccatgatggactcattgaaaatggaggctatgcagaccagacctatgatggatgggtgaccacaggccccagtgcttactgtggagggctgtggctggcagctgtggctgtgatggtccagatggctgctctgtgtggggcacaggacatccaggataagttttcttctatcctcagccggggccaagaagcctatgagagactgctgtggaatggccgctattacaactatgacagcagctctcggcctcagtctcgtagtgttatgtctgaccagtgtgctggacagtggttcctgaaggcctgtggcctaggagaaggagacactgaggtgtttcctacccaacatgtggtccgtgctctccaaactatctttgagctgaacgtccaggcctttgcaggaggggccatgggggctgtgaatgggatgcagccccatggtgtccctgataaatccagtgtgcagtctgatgaagtctgggtgggtgtggtctacgggctggcagctaccatgatccaagagggcctgacttgggagggcttccagacagctgaaggctgctaccgtaccgtgtgggagcgcctgggtctggccttccagaccccagaggcatactgccagcagcgagtgttccgctcactggcctacatgcggccactgagcatatgggccatgcagctagccctgcaacagcagcagcacaaaaaggcctcctggccaaaagtcaaacagggcacaggactaaggacagggcctatgtttggaccaaaggaagccatggcaaacctgagcccagagtgagccgtctgaactgtgggagggaagtgctaacagcccagcctccagcctggcctttcctccttcccctctgaacctcctgcaaccctgagccatcaggacaatcataccccttcccttctctccacccaattgtgccagtaaatgggggttgagggtgacctaggcagcattagaatcacttatttatttctttcctcacctgttccctgactgcgtgaaatgttcagggtggtcagttgatttccccaggtacattcatggtgtgacagacacatgggtacaaataaaagacccagaaagcc

SEQ ID NO: 15931 - protein, 927 aa, Homo sapiens [sequence omitted]

SEQ ID NO: 15932 - DNA, 1875 bp, Homo sapiens
  CDS (17)..(676)
tgtgtctctcccgaccatggagggggtcgcggtggtgacggcgggcagcgtaggcgctgccaaaaccgagggagctgcagccttgccgcctccgcctccgcctcctgtctccccgcccgccctcacccctgcacccgcagcgggtgaggagggaccggcgcctctgtctgagacgggggctcccggctgctccggctcccggccccctgagctggagccggagcgcagcctgggccgcttcagaggccgcttcgaggacgaggacgaggagttggaagaagaagaggagctggaggaggaagaagaggaggaggaggaggacatgagtcacttctcgttgaggctggagggaggccggcaggactcggaggacgaggaggagcgcctgattaatctctctgagctgaccccatacatcttgtgttccatttgcaaaggttacttaatagatgcaactaccatcacagaatgtcttcataccttttgtaaaagctgcatcgtaagacatttttactacagcaacagatgtccaaaatgcaatatagtagtacatcagacacaacctctttataacataaggttggaccgacagttacaagacatagtgtacaaattagtgatcaatctagaggaaatctgtgttttatcattttttaggagaaaaaaagcaaatgcatgatttctataaagaaagaggtctagaagtacctaaacctgctgttccacagccagtcccttcaagcaaaggaagatctaaaaaagtcctagaatcagtgtttcgtattccacctgaacttgatatgtctttattactggagttcattggtgctaatgaaggcacgggacattttaagccattggaaaagaagtttgttcgagtttcaggagaagcaactattggacatgtagaaaaattcctcagaagagaaatgggtcttgatccagcttgtcaggtagatataatctgtggtgatcacctgttggagcagtatcaaactctaagggaaatccgacgtgcaataggtgatgcagcaatgcaggatggtctgcttgtccttcattatggtcttgtggtttctcctctgaagataacttgaagattctaggcacattatgaggagggaaacaaaggaggcttctgcaggactgcatctcaccaaagatttccatgaaatgtaattgctaccactttgctgttcaagacataacttacctatttttagcaccaagaattatagcgtttataagtacaacttggaacgatggaatgcatctgttactagagactgtatataaaaagcagccaaagctcaggggaaatttttcaaaaattgaattttaaaatttcttatgattttaaataccttgacattgattttgcttcccatctttgaagtaattggttagttttctttgttcagccatttcaagttggtggttgggatatctgctctctgggatggcatcagttgggcagtcatctttttggaagagaagtgtgcttttgagtggaagattcaaagccagtctttgttaaactgcagggtgtactctcaaagaccaaaactattggccacttttgtatgttgccagcatattttgaacttgtacctttttttatactagcaacactacaaaggagaagttactcatttcaaaatggatgaattgttattatgtgtgaagagactctgattttatgatctgtgccataaaatttcagtgtaataagacttcttcaatacatcttccaataaggggtgcttctttgtgacagtatttttatttctgacattcattttatttgggtacatagtgtggttgttgataccttgcaacagtattgcttctgaaagtaataaaaaattttaggag

SEQ ID NO: 15933 - protein, 220 aa, Homo sapiens
MEGVAVVTAGSVGAAKTEGAAALPPPPPPPVSPPALTPAPAAGEEGPAPLSETGAPGCSGSRPPELEPERSLGRFRGRFEDEDEELEEEEELEEEEEEEEEDMSHFSLRLEGGRQDSEDEEERLINLSELTPYILCSICKGYLIDATTITECLHTFCKSCIVRHFYYSNRCPKCNIVVHQTQPLYNIRLDRQLQDIVYKLVINLEEICVLSFFRRKKANA

SEQ ID NO: 15934 - DNA, 2088 bp, Homo sapiens
  CDS (24)..(1175)
acacctccctttctcctgcagccatggatgccgctctgctcctgaacgtggaaggggtcaagaaaaccattctgcacgggggcacgggcgagctcccaaacttcatcaccggatcccgagtgatctttcatttccgcaccatgaaatgtgacgaggagcggacagtcattgacgacagtcggcaggtgggccagcccatgcacatcatcatcggaaacatgttcaagctcgaggtctgggagatcctgcttacctccatgcgggtgcacgaggtggccgagttctggtgcgacaccatccacacgggggtctaccccatcctatcccggagcctgaggcagatggcccagggcaaggaccccacagagtggcacgtgcacacgtgcgggctggccaacatgttcgcctaccacacgctgggctacgaggacctggacgagctgcagaaggagcctcagcctctggtctttgtgatcgagctgctgcaggttgatgccccgagtgattaccagagggagacctggaacctgagcaatcatgagaagatgaaggcggtgcccgtcctccacggagagggaaatcggctcttcaagctgggccgctacgaggaggcctcttccaagtaccaggaggccatcatctgcctaaggaacctgcagaccaaggagaagccatgggaggtgcagtggctgaagctggagaagatgatcaatactctgatcctcaactactgccagtgcctgctgaagaaggaggagtactatgaggtgctggagcacaccagtgatattctccggcaccacccaggcatcgtgaaggcctactacgtgcgtgcccgggctcacgcagaggtgtggaatgaggccgaggccaaggcggacctccagaaagtgctggagctggagccgtccatgcagaaggcggtgcgcagggagctgaggctgctggagaaccgcatggcggagaagcaggaggaggagcggctgcgctgccggaacatgctgagccagggtgccacgcagcctcccgcagagccacccacagagccacccgcacagtcatccacagagccacctgcagagccacccacagcaccatctgcagagctgtccgcagggccccctgcagagccagccacagagccacccccgtccccagggcactcgctgcagcactgagccccctgaggcccacagccacccaggcagggagcaagtggcctggtcacttctggttcgattgaccaggatcgtggtgtcactttttaaaatttaaaattaatttttgaaatcaaagtcagacacacccatggtaaaaaaaaaaaaaaaaacaatcccaagggtacagaagagcttatgaataaaagtagttttctcctctacccctctcattccttccgtgccatggttttaattgaccctgttttttaattcttctggtagttttctctatttccaagtaatctgtttaaatcagtttctagattttaccccatgtcaatgacaaatgaggatttgatgctctgatcctttctcatgcctgatacccctccctgtctccccattttggatagttacatttgggggtcatctcggtgatttttgtaactttacgtaggacacttagagctctctagaatcccactgactttagtgggtcttgatgtagggtgggcaagccccgacactggagcttagcctgagagggttcttggcttcccccaggaaagatttcaaaggcaagcgccagtggtagggtagaagaaaacagctgtggtcgggcacggtggctcacgcctataatcccagcactttgggaggccgaggcgggtggatcacctgaggtcaggagttccagaccagcctggccaacatggtgaaacctcatctctactaaaaatacaaaaaaactagctgggcgtggtggcgggcgcctataatcccagctacttgggaggctgaggcaggagaattgattgaacctgggaggcggaggttgcagtgagccaagatcacgtcattgcactccagcctggtcaacaagagtaaaacttcatctcaaaaaacaaaacaaaacaaaaacaacaac

SEQ ID NO: 15935 - protein, 384 aa, Homo sapiens
MDAALLLNVEGVKKTILHGGTGELPNFITGSRVIFHFRTMKCDEERTVIDDSRQVGQPMHIIIGNMFKLEVWEILLTSMRVHEVAEFWCDTIHTGVYPILSRSLRQMAQGKDPTEWHVHTCGLANMFAYHTLGYEDLDELQKEPQPLVFVIELLQVDAPSDYQRETWNLSNHEKMKAVPVLHGEGNRLFKLGRYEEASSKYQEAIICLRNLQTKEKPWEVQWLKLEKMINTLILNYCQCLLKKEEYYEVLEHTSDILRHHPGIVKAYYVRARAHAEVWNEAEAKADLQKVLELEPSMQKAVRRELRLLENRMAEKQEEERLRCRNMLSQGATQPPAEPPTEPPAQSSTEPPAEPPTAPSAELSAGPPAEPATEPPPSPGHSLQH

SEQ ID NO: 15936 - DNA, 1708 bp, Homo sapiens
  CDS (614)..(1411)
atgctgccggcgggctgctcgcgccggtgaggcctgcgcggcaggagggggtgggaggatgcgggcgggccggtagccaggcgcggggcccgaggcccgacgctggccgaggtgctgagccgccggtgcgtcccccaggctggtggccgagctgcagggcgccctggacgcctgcgcacagcgacaattgcaattggagcagagcctgcgcgtttgccgtcggctgctgcatgcctgggaaccaactgggacccgggctttgaagccacctccagggccagaaactaatggagaggacccccttccagcatgcacacccagtccacaagacctcaaagagttggagtttctgacccaggcactggagaaggctgtacgagttcgaagaggcatcactaaggccggagagagagacaaggcccccagcctgaaatctaggtccattgtcacctcttctggcacgacagcctccgccccaccgcattccccaggccaagctggtggccatgcttcagacacgagacccaccaagggcctccgccagaccacggtgcctgccaagggccaccctgagcgccggctgctgtcagtgggggatgggacccgtgttgggatgggagcccgaacccccaggcctggggcgggcctcagggaccagcaaatggccccatccgctgctcctcaggccccagaagccttcacactcaaggagaaggggcacctgctgcggctgcctgcggcattcaggaaagcagcttcccagaactcgagcctgtgggcccagctcagttccacacagaccagtgattccacggatgccgccgctgccaaaacccagttcctccagaacatgcagacagcttcaggcgggccccagcccaggctcagtgctgtggaggtggaggcggaggcggggcgcctgcggaaggcctgctcgctgctgagactgcgcatgagggaggagctctcagcagcccccatggactggatgcaggagtaccgctgcctgctcacgctggaggggctgcaggccatggtgggccagtgtctgcacaggctgcaggagctgcgtgcagcggtggcggaacagccaccaagaccatgtcctgtggggaggccccccggagcctcgccgtcctgtgggggtagagcggagcctgcatggagcccccagctgcttgtctactccagcacccaggagctgcagaccctggcggccctcaagctgcgagtggctgtgctggaccagcagatccacttggaaaaggtcctgatggctgaactcctccccctggtaagcgctgcacagccgcaggggccgccctggctggccctgtgccgggctgtgcacagcctgctctgcgagggaggagcacgtgtccttaccatcctgcgggatgaacctgcagtctgagcctttcccatgctgccctcggcctgttcagatggggattgggggtgtcttccctggcactgtgctcggggacccagagatgcctgtgcttccctgggaaacctggtgaactggaccaggtggcctcactggctcttctcaggacaactaagcctgctggtcagggctggctttcagccttcctaaggctcctggactccagaggccagcggggagcctttcctggctccctctgttttctctcactgtagaccaaagagccgcttgtgtgatattaaagccactttagaaagc

SEQ ID NO: 15937 - protein, 266 aa, Homo sapiens
MGARTPRPGAGLRDQQMAPSAAPQAPEAFTLKEKGHLLRLPAAFRKAASQNSSLWAQLSSTQTSDSTDAAAAKTQFLQNMQTASGGPQPRLSAVEVEAEAGRLRKACSLLRLRMREELSAAPMDWMQEYRCLLTLEGLQAMVGQCLHRLQELRAAVAEQPPRPCPVGRPPGASPSCGGRAEPAWSPQLLVYSSTQELQTLAALKLRVAVLDQQIHLEKVLMAELLPLVSAAQPQGPPWLALCRAVHSLLCEGGARVLTILRDEPAV

SEQ ID NO: 15938 - DNA, 2475 bp, Homo sapiens
  CDS (378)..(1550)
ctccccccagtcggcggcgcttggtgccgcccgggagaaccaggtcatcggtcggttcccgtgaaaacaaaaacaatcggccgcgccgtcgcaggcacccgaacgtcgcgagcggggcctggggacgcggagccgagtgcagcgagcgaacgggagcagcggcgactcgccggggggctagggcgccatggggcaggcgggctccggctgcgcggggctcccccggcgccgcggctagtgcgcccgccgcctcggccgcctcagcctcccgcgccgcccgcttggggaacgaggagcaggacgcggcctcggtggggcccgggccgaacggctgcggacacctgggcgccgaggagccgagcgccgccgtctccggcatggatcagtgcgtgacggtggagcgcgagctggagaaggtgctgcacaagttctcaggctacgggcagctgtgcgagcgcggcctggaggagctcatcgactacaccggcggcctcaagcacgagatcctgcagagccacggccaagatgctgaattatcagggacactttcacttgttttgacacagtgctgtaaaagaataaaggatactgttcaaaaattggcctccgaccacaaagacatccacagcagtgtttctcgggttggaaaagccattgataagaattttgattctgacattagcagtgtgggaatagatggctgctggcaggcagacagccaaaggcttctcaatgaagtgatggtggagcacttctttcgacaaggaatgctggatgtggctgaggagctctgtcaggaatctggtctttctgtagacccaagtcagaaggaaccatttgtggagttaaatagaatattagaggcattaaaggtcagagttctgagacctgctctggagtgggcagtgtcaaaccgggaaatgcttatagctcaaaacagctccttggaatttaagctacacagactgtattttattagcttgttaatgggtggaaccacaaatcagcgagaggcattacaatatgctaaaaattttcagccatttgccctaaatcatcaaaaagacattcaggttttgatgggaagccttgtgtacctgagacaagggattgagaactcaccatatgttcacctacttgatgcaaaccagtgggctgatatctgtgacatctttacacgggatgcttgtgccctcctggggctctccgtggagtcccctctcagtgtcagtttctcagcaggttgtgtggcgctgccagctttaattaacatcaaagccgtgattgaacagaggcagtgtactggagtttggaaccagaaagatgaattacctattgaagtggaccttggtaaaaagtgctggtatcactctatatttgcctgccccattcttcgtcagcaaacaacagataacaatccacccatgaaattggtctgtggtcatattatatcaagagatgccctgaataaaatgtttaatggtagcaaattaaaatgtccctactgtccaatggaacaaagtccaggagatgccaaacagatatttttctgaagagataactttagtttgcaatttgtaagtgaaactgaatcgtgggtgcatttcagaagagaacgttccatataatgcagctaaccaaggactcctgtgtttctataagctaatgctccagaaactttgccaacctgttagtgtacacacactgaggggagtgctcccggtgaatattatcatagggctttattatattcttggtcttcatttctgatcaagtaaatacaccagcagttgtcattcaatgcaggtttttgtacttaattatatggtgatttttttactttttaagagcagaaacggaaattgacctccccgccatgtgtttaatattcctcctgcttttacttttgtcattttcttgataatcgtaagccttgagagtgtttgtgaaaaagttttatttcctgttatgtatacataattaaatgaaaattcttcagaaaaagtttgataaattgaattgtggttatgaaactaatttgcatttttatttgcttaagaaagaaagctgtgatagattccagatatgctttttgatgttttcctctgctccagctccaagaagtcagcacacctgcattttagctctgcatgcagccccagcaggctgcgtgtttaagaatttcattgtttaactggctggtgtgagaagtcttccgttagcatagagtggaaggagtactattgtttggttgggtttttgtttgtttgttttttgtttttgctttcaaaaacaaaaacctgtaagctcccttccctctctctttcttgtcatttggtctctgcacatgccagctccccttctccttctgccataaatggaattaacctaaagccctcaccagaagcagacgctggcactgtgcttcctgtgcagtctgcagaaccgtaaaccaaataaatctcctttcgttat

SEQ ID NO: 15939 - protein, 391 aa, Homo sapiens
MDQCVTVERELEKVLHKFSGYGQLCERGLEELIDYTGGLKHEILQSHGQDAELSGTLSLVLTQCCKRIKDTVQKLASDHKDIHSSVSRVGKAIDKNFDSDISSVGIDGCWQADSQRLLNEVMVEHFFRQGMLDVAEELCQESGLSVDPSQKEPFVELNRILEALKVRVLRPALEWAVSNREMLIAQNSSLEFKLHRLYFISLLMGGTTNQREALQYAKNFQPFALNHQKDIQVLMGSLVYLRQGIENSPYVHLLDANQWADICDIFTRDACALLGLSVESPLSVSFSAGCVALPALINIKAVIEQRQCTGVWNQKDELPIEVDLGKKCWYHSIFACPILRQQTTDNNPPMKLVCGHIISRDALNKMFNGSKLKCPYCPMEQSPGDAKQIFF

SEQ ID NO: 15940 - DNA, 2103 bp, Homo sapiens
  CDS (77)..(1915)
actgagtgagcaactgtatgatgtgggctatcgggatatagtgaacatcgacatcagtgaggttgtcatcaagcaaatgaaggaatgtaatgccacccgacggccccagatgagcttcttgaagatggacgtgacgcagatggagtttcctgatgcctcgttccaggtggtgttggacaagggcaccctggatgctgtcctgacagatgaggaagagaagaccttacaacaggtggacaggatgctggctgaggttggccgtgtcctgcaggtgggcggtcgctatctctgcatctccctggctcaggctcacatcctgaagaaagcagtgggccacttctcccgggaggggtggatggtgagggtgcaccaagtggccaacagccaggaccaggtgttggaagcagagcctcagttctccttgcctgtctttgccttcatcatgaccaagttcaggccagtccctggctctgcccttcagatctttgagctgtgtgctcaggagcagcgcaagcctgtgcggctggagagtgccgagcggctggccgaggcggtgcaggagcgacagcagtatgcctggctgtgcagccagctgcgccgcaaggccaggctggggagtgtgtctctggacttgtgcgatggggacacgggggagccacgctacaccctccacgtggtggacagccccactgtgaaaccatcgcgggacaatcattttgcgattttcatcatccctcagggccgggagaccgagtggctctttggcatggatgagggccggaaacagctggcggccagtgctggcttcaggaggttgattacagtggcccttcaccgaggtcagcagtatgaaagcatggaccacatccaagctgagctgtcagctagagtcatggagctggccccagctgggatgcccacccagcagcaggtcccctttctgtctgtgggtggggacattggggtccggaccgttcagcaccaagactgcagccccttgagcggtgactatgtcattgaggatgtgcaaggggatgacaagcgatacttccgtcgactgatcttcctcagcaacaggaatgtggtgcagtccgaagccaggttgctgaaggatgtgtctcacaaagcccagaagaagcggaaaaaggacaggaagaagcagcggcctgctgatgcggaggacctccctgcagccccggggcagtccattgataagagttacctgtgttgtgaacaccacaaagccatgatcgctggccttgccctgctgagaaacccagagctactcctagagatcccactggcattgttggtggtaggcctgggcgggggcagcctccccctctttgtccacgatcattttccaaagtcctgcattgatgctgtggagatcgatccctccatgttggaagtggccacccagtggtttggcttctcccagagtgaccgaatgaaggtccacattgcagatggcctggactatatcgccagcttggcaggaggaggagaagcacggccttgctacgatgtcataatgtttgatgttgacagtaaggacccaacactgggaatgagttgtccgcccccagcatttgtggagcaatcttttctacagaaggttaaaagcatcttgactcctgaaggtgtttttattctcaaccttgtgtgccgagacttggggctaaaagactcagtgctggctgggctcaaggcagtgttccccctcctatatgtccggcgaattgagggtgaagtgaatgagatcctgttctgtcagctgcaccctgagcaaaaacttgccacaccagagctcctagaaacagcccaggctttggagcggaccctgaggaagcctgggaggggttgggatgacacgtatgtcttgtcagatatgctcaagacggtgaaaattgtgtgactgcttaggccaagcagccctcctgcctagactgaccttggactcccagcctgccagagaatgaaaaaatacaacgcacagtacttttgaagcttcgtatttttcttggtttcacactcagctacatgtgacctccagcttggtgaggttgcctgaagattagggaaaataaaaatgtccttccc

SEQ ID NO: 15941 - protein, 613 aa, Homo sapiens [sequence omitted]

SEQ ID NO: 15942 - DNA, 1475 bp, Homo sapiens
  CDS (41)..(1393)
aagccggagtctagagctccgggcgcggggaggcgcggccatggcagctccggagccgctgtccccggcgggcggtgcgggcgaggaggcgccggaggaggacgaggacgaagcggaggccgaggaccctgagcggccgaatgcgggagcgggcggtggacgcagtggcggcggcggcagtagcgtcagcggaggaggcggcggcggcggggccggagcggggggctgcggcgggcccgggggcgcgctcaccaggcgcgcggtcacactgcgggtgctcctcaaagacgcgctgctggagcctggcgccggggtgctgtccatctactacctggggaagaagttcctgggcgacctgcagccagacggaaggatcatgtggcaggagaccgggcagaccttcaactcacccagcgcctgggccacccactgcaagaagctggtgaaccctgccaagaagtcgggctgtggctgggcctctgtcaagtacaaaggccagaaactggacaagtacaaggccacctggctccggctgcaccagctgcacacgcctgccacggctgctgatgagagcccagccagtgaaggggaggaggaggagttgctgatggaagagaaggaggaggacgttctggcgggggtctcagcagaggacaagagtcggagaccactggggaagagcccttcagagcctgcccacccggaggccacaaccccagggaagcgggtggacagcaagatccgggttccggtccgctactgcatgctgggcagccgcgacttggccaggaacccccacaccctggtggaagtaacatcctttgcagccatcaacaagttccagccgttcaacgtggctgtttctagcaacgtgctgttcctgctgatctaccagagcctgttcctgcggggcctgtccctggtgggctggtaccacagccacccacacagcccggcgctgccatctctgcaggacatcgacgcacagatggactaccagctgcggctgcagggctccagcaatggcttccagccctgcctcgccctgctctgctccccttactattctggcaacccaggccccgagtccaagatctcgcctttctgggtgatgcctcctcccgagcaaaggcccagtgactatggcatccccatggatgtggagatggcctacgtccaggacagcttcctgaccaatgacatccttcacgagatgatgctgctggtggagttctacaagggttcccctgacctcgtgaggctccaggaaccctggagccaggagcacacctacctcgacaagcttaagatctccttggccagcaggacgcccaaggaccagagcctgtgtcacgtcctggaacaggtgtgcggcgtcctcaagcaggggagctgagccttccagggcagggtgggctccagttgtcttgagggtccggatgggctcaggtaataaagaaacggaagcagcagcc

SEQ ID NO: 15943 - protein, 451 aa, Homo sapiens
MAAPEPLSPAGGAGEEAPEEDEDEAEAEDPERPNAGAGGGRSGGGGSSVSGGGGGGGAGAGGCGGPGGALTRRAVTLRVLLKDALLEPGAGVLSIYYLGKKFLGDLQPDGRIMWQETGQTFNSPSAWATHCKKLVNPAKKSGCGWASVKYKGQKLDKYKATWLRLHQLHTPATAADESPASEGEEEELLMEEKEEDVLAGVSAEDKSRRPLGKSPSEPAHPEATTPGKRVDSKIRVPVRYCMLGSRDLARNPHTLVEVTSFAAINKFQPFNVAVSSNVLFLLIYQSLFLRGLSLVGWYHSHPHSPALPSLQDIDAQMDYQLRLQGSSNGFQPCLALLCSPYYSGNPGPESKISPFWVMPPPEQRPSDYGIPMDVEMAYVQDSFLTNDILHEMMLLVEFYKGSPDLVRLQEPWSQEHTYLDKLKISLASRTPKDQSLCHVLEQVCGVLKQGS

SEQ ID NO: 15944 - DNA, 3383 bp, Homo sapiens
  CDS (107)..(448)
gtccggctccggcggcggcggtcggtgctgcgagagcggcggcggcggcgcgggtcggcagcgggagggcgcgcggccgagcggaggcggagtcggcgccgagaacatggctggaggcaaagctggaaaggacagtgggaaggccaaggctaaggcagtatctcgctcacagagagctgggctacagtttcctgtgggccgcatccacagacacttgaagactcgcaccacaagccatggaagggtgggtgccactgctgccgtgtacagtgctgcgattctggagtacctcactgcagaggtgctggagctggcaggtaatgcttctaaggatctcaaagtaaagcgtatcactccgcgtcacttgcagcttgcaatccgtggtgatgaagagttggattctcttatcaaggctaccatagctgggggtgagaagagaaggtgttcttagatcagaagatgccattgtattaggtgacggcaaggttttgctgatttagtggaacaagattctactgggatgtgtgctgagctgaaccaaggaactgcccgaatgtgctgaacaaggacatttgcttctcagatacgtgaattcaattttaagcaagattcttgatctgcttcagagcagctttgatttaaagtaatttcagagcacttttccttgcatgagtaattttctgaatgtataaaatattctatttatgtttgaccttttggataaactgtgttgctgcagtgttggtccacactaccatcctaagtgaagacttagtaagtctgaggatctccaggcactggaaagagcgagaacctgggagtgaaagggttatagttagtgttcatttttcgggttttgtttcatagggagtcctgagtggggtaacctgaaatgttttaacagttgaagatcatcccattcctatccccagtaaaaataggcctttccacaatcttctaccagttaacttagcttttttttttttttttccttaatagagtctcattcttgtcacccagactggagtgcgatggcacgatcttggctcactgcaaccctccctcccgggttccagcgattctcctgcctcagcctcccaagtagctgggattacaggcgcacgccaccatgcccagctaatttttgtatttttagtagacgtggggtttcaccatgttggccagactggtctcaaactcctgacctcaggcgatccgcccgtctaagccttccaaagtgctgggattactggcaggaaccaccaggcccagccaaccagcatttcttaaggtgaaaatacatggtgttaatttatattttgagtgagacccagtccagctgctataactgcttggacacttggcagaggacagagtactgcaaaagtgtctaagggagacagcattttgccttgggtgctgtagatgtacaagagaggttccaggagggggtgataggcagaattttggtccccatcaccttccctgcccagtgttatgcctatgaatgtgttacattatgtggtaaaagggactttgcagatgtaactaaaatttctaaaatagagatattatcctggattacctgggggaacccagtgtaattacatgaacccttaaaaatggaagaggatgcaggagtcagattcaaaggaaggcccaaggtgctattgctgacttgaagatagaggggccatgtggaaatcaagagaaggaagtgaatccttccagtgagcttggaagagagcaccttgaggcacagatgagaagcttggccttacctgatgccttgattttagcctggtgagaccccgagcatataaatttgctgtgctatgccacacttctcacctacagaaacttagtttaaagccactaagtttgtggtaatttgttggctttaggcccctgagggtagagatttatggcttgtgttacaagtagagagcagtggagagttgggctttgtaattctttcaagggtgattgtagttctggagtcctatctacctgggttcagatctttgttggccagtccctggctgtgtgacttcactgctttaagcctctgtcttcattcttaaagtggcgatgatagtacctacctcactctgatctctgaatgagaacacatgtaagacacttagcacagttcctggtgctcaaagagttccaacacctgaaagcaccatggccctgtttgtttttcagtcaagatttctaaaagccgttattaccagaggttcagtgagaacatgggcagggtaaactcaaaatggagaacataaaaactgggactcccagaccagtcacttagaagactgctgcaggaagtaccaaggtcgttaagaatcagtaataataataagtaatgtgtgaatccattagaatgttgagaagtagacctttgacatttcagaaaaatgtatatctcagacacagccatatgtattgttatccctgagttggaagagcatcacagggcatagtttcacaaaagcttcaaaaaatatactaattgctggtaatatgtgaactaacagaaaaaaatagccatgttaaaataggagtgcctgacaattagctctattcatcttgtctcctagctgtaagcaccctagattcaaattatgcacctagaaaactaaattactatgtatgttataggcctttgaaatggatacatgaaaatcagtgaaatcagaatgaacgtttcgcctgccaaagatatgtatttttataagtgatacaagggccccatgagctccatggccacatctgtacaaaacaggccctcctttcaggaactggtctcgagagagcaaaggggtcaactccctaaatggcagctgagacagtcctccctggtggcatggccctgtttcctgttgatatggtgatagttggagagtcaaatttttaccagaatttgtgaatatcatctctggttaatgattacacaaaaccttttaaaattttaaaaaattatttctaattctataaataaactctgcagttgtacagccactgtacagctaacatctcaacactggaaatgaggctggtttcttccagtttggctcagattcttcagggaagcccagttaagacaaacagctctctatactcaatccttactttgctgagaagatacaggcctgcccactcgctcccacctgctcttcatgaggagtcctttattcctgcatgtttcctgttctttgggacctttaggagctaacctccacagatgctgatagtctgtagagtcaggaataccatgtaacatgttgaagtagactaaagattagttctttggcaatagcccagtctggacttactatgtacttttgaaaataaaactgcttatttgtaaactctgt

SEQ ID NO: 15945 - protein, 114 aa, Homo sapiens
MAGGKAGKDSGKAKAKAVSRSQRAGLQFPVGRIHRHLKTRTTSHGRVGATAAVYSAAILEYLTAEVLELAGNASKDLKVKRITPRHLQLAIRGDEELDSLIKATIAGGEKRRCS

SEQ ID NO: 15946 - DNA, 1837 bp, Homo sapiens
  CDS (115)..(528)
ttttcctgaccccaaccatcctgcccagtctccgcttccccgtcttgtacacccctaactcctgaggctcctccgaatcacgcgagtggaagcggagaagctcaagtggccgccatgtcagaggcttatttccgagtggagtcgggtgcgctggggcctgaggagaactttctttctttggacgacatcctgatgtcccacgagaagctgccggtgcgcacggagaccgccatgcctcgccttggcgctttcttcctggagcggagcgcaggcgccgagactgacaacgcggtcccacagacttttatcggacgttttcgccgcatcatggactcctcacagaatgcttacaacgaagacacttcagccctggtagccaggctagacgagatggagaggggcttatttcaaacagggcagaaaggactgaatgactttcagtgttgggagaaggggcaggcttctcagatcacagcttccaacctcgttcagaattacaagaagagaaaattcactgatatggaagactgaaagccggaagaacacagaatggctcctcacagacgtatccctccgtgtgtccttgataggagctggttgaccttgtacagaaccagaatcctgtcccatttcatggcttatttcctgtggccatagagaattatagggaactggacatgctggaggatgtgggtgtccctggctctgtgagtcttccaggaccgtcccaccctgctgacccacagcccaggccctttaacccaagaacccatggccaaggagaaatcaaagtccttcctaaataagaatcactgccatataatatatcacagtagagttgcaactgagattccttgtgtctgggagtttggacagcttcagatgtacagtttcactagccacaaagcacaggtacaaactgggtcatcgcctgttcacaaaatgctctcttgatcttatttgcctcatcttcctcatggttgtacagaggatagcaccccaccatgccagcctgacttggagatatctcctgctgcctgcctgcagggagttaccccagtttccaaaaacagtcgcccagataaaggaggaaaagggaaaggcagacgaatggcatggcttttactaaagaaaagatgttggcctcatactctatactcagggcttaatgaactggaatctgcataactcagcagtcaacccagaagggaaatggttaaactgagcttgttattgcctcggagagcctaagagcacccgcacacttaattctactccctgtctagaaaagctgtcagggagtcgtttggaattgcaatgtagttattaagggctgttaaccagcctgcattacatctggaagtcaggacttgggtgctgactatgaagggccctgttttcaaaatctaacattgcaagtgtaaatgggcaagaagcctccgttgtgcttttttttcctcttcagtaacttttgcaacattattgcatagaagatccctgaccatttactaggaacctggttaagcaagcactaatctcttttcctggagatcaaggatgcaacctcaggttgagaaagaaacagggttccctgggcccattagactgtttgcagggcatcactgcttccccctgacacctcacaactagcaaaaattgtctttgtctttggaaattatagagggatttgggtatccagattgtgcagatgcaaacttaggctgtcttgatgcaaacttagaaccacagaaatgcttttaaaatgcctgttttaagatggaattgttgtttttataatttgattttagtgctaaataaatgattggctttgtacatg

SEQ ID NO: 15947 - protein, 138 aa, Homo sapiens
MSEAYFRVESGALGPEENFLSLDDILMSHEKLPVRTETAMPRLGAFFLERSAGAETDNAVPQTFIGRFRRIMDSSQNAYNEDTSALVARLDEMERGLFQTGQKGLNDFQCWEKGQASQITASNLVQNYKKRKFTDMED

SEQ ID NO: 15948 - DNA, 1750 bp, Homo sapiens
  CDS (158)..(1492)
acttccggtcgtgggccatgccgggggcgggcccggaaccgccacggctagaagaagtcttcacttcccaggagagccaaagcgtgtctggccctaggtgggaaaagaactggctgtgacctttgccctgacctggaagggcccagccttgggctgaatggcagcacccacgcccgcccgtccggtgctgacccacctgctggtggctctcttcggcatgggctcctgggctgcggtcaatgggatctgggtggagctacctgtggtggtcaaagagcttccagagggttggagcctcccctcttacgtctctgtgcttgtggctctggggaacctgggtctgctggtggtgaccctctggaggaggctggccccaggaaaggacgagcaggtccccatccgggtggtgcaggtgctgggcatggtgggcacagccctgctggcctctctgtggcaccatgtggccccagtggcaggacagttgcattctgtggccttcttagcactggcctttgtgctggcactggcatgctgtgcctcgaatgtcactttcctgcccttcttgagccacctgccacctcgcttcttacggtcattcttcctgggtcaaggcctgagtgccctgctgccctgcgtgctggccctagtgcagggtgtgggccgcctcgagtgcccgccagcccccatcaacggcacccctggccccccgctcgacttccttgagcgttttcccgccagcaccttcttctgggcactgactgcccttctggtcgcttcagctgctgccttccagggtcttctgctgctgttgccgccaccaccatctgtacccacaggggagttaggatcaggcctccaggtgggagccccaggagcagaggaagaggtggaagagtcctcaccactgcaagagccaccaagccaggcagcaggcaccacccctggtccagaccctaaggcctatcagcttctatcagcccgcagtgcctgcctgctgggcctgttggccgccaccaacgcgctgaccaatggcgtgctgcctgccgtgcagagcttttcctgcttaccctacgggcgtctggcctaccacctggctgtggtgctgggcagtgctgccaatcccctggcctgcttcctggccatgggtgtgctgtgcaggtccttggcagggctgggcggcctctctctgctgggcgtgttctgtgggggctacctgatggcgctggcagtcctgagcccctgcccgcccctggtgggcacctcggcgggggtggtcctcgtggtgctgtcgtgggtgctgtgtcttggcgtgttctcctacgtgaaggtggcagccagctccctgctgcatggcgggggccggccggcattgctggcagccggcgtggccatccaggtgggctctctgctcggcgctgttgctatgttccccccgaccagcatctatcacgtgttccacagcagaaaggactgtgcagacccctgtgactcctgagcctgggcaggtggggaccccgctccccaacacctgtctttccctcaatgctgccaccatgcctgagtgcctgcagcccaggaggcccgcacaccggtacactcgtggacacctacacactccataggagatcctggctttccagggtgggcaagggcaaggagcaggcttggagccagggaccagtgggggctgtagggtaagcccctgagcctgggacctacatgtggtttgcgtaataaaacatttgtattt

SEQ ID NO: 15949 - protein, 445 aa, Homo sapiens; identical to SEQ ID NO: 13712

SEQ ID NO: 15950 - DNA, 2894 bp, Homo sapiens
  CDS (872)..(1477)
ctctgccagccccgggctgggaagaagcagctacctcggaggcagggcgcgcaggcgggcggcgatgagagggggcgcagccgcagccccgcgctggggagcccaccgctaaccctgcaccccacccacccctgcacaaaagagctggcgggcgctggccacgtcgccctgggtgaccttcctcggatgcagaatccgcccctgcgagcatcctcttcctcctaggctctgaaggcccggggagcgtgagcgatgcccagctgcacccgggcagggctcgcctttgtttgccagtaaggaggagaggctgtctcggctgcagaggggtcatccctgcttcaagccagtgcctcttcccagctcccatggggaccaccgaagccacgctccggatggaaaacgtggacgtgaaggaggaatggcaggacgaagatcttcccaggccactcccagaagagacgggggtggaactgcttggcagcccggtggaagacacatcctctcctcccaacacgctaaatttcaacggagcgcatcgtaagaggaagacgctggtggccccagagatcaacatttctctggatcagagtgaggggtccctgctgtccgatgacttcttggatacccctgatgacctggatattaacgtggatgacatcgagacccccgatgagaccgactcgctggagttcctggggaatggcaacgaactggagtgggaagacgacacccccgtggccaccgccaagaacatgcccggggacagcgcggatctatttggggacggcacgacggaggacggcagcgccgccaacgggcgcctgtggcggacagtgatcatcggggagcagagcaccgtatagacctgcacatgatccggccttacatgaaagtggtcacccacggagggtactacggcgaaggcctcaacgccatcatcgtcttcgcagcctgcttccttccagacagcagcctccccgactaccactacatcatggagaacctcttcctgtacgtcatcagcagcttagagctcctggtggctgaggactacatgatcgtgtacctgaacggtgccacgccccggcggaggatgcctggaatcggctggctgaagaagtgctaccaggtgatcgaccggaggttgcggaaaaacctgaagtccttgatcatcgtccacccctcgtggttcattcggactgtgctggccatctctcgccctttcatcagcgtcaagtccatcaacaagatccagtacgtgcacagcttggaagacctggagcaactcatccctatggaacacgtccagatcccagactgcgtcctgcaatacgaagaggaaagactgaaggccaggagggagagcgcgaggccccagccggagtttgtgctgcccaggtctgaagagaagccagaggtggcaccagtggaaaacaggcctgctctggtctcagaagatcaggaaacaagcatgtcctgaggcgacgtgagcataacaaaggacatggaagaagattccagatgccagaaaacctctgtcagacgcccactggccccagatctcatcctgcctcatcctgagtcccaatcttccaagggtgccagcccctccgttcatctctgaaacccagcatccttttcagctgcttggaaacattgtattttttttttttaacgatgcagtatttgtgcgttccagaaaagggcccagctctgagcccctcacccttccacactcacgaactctcagccgaggaaggcaagaagcgcagggggtggcccgcgtggcgtcggtggcctccgctcctgctcgcagcccctgtggtcagagctggatacaagattcaagacccttctcttgcttgtcacccgctccaggttggagccacagacacccaccgccaccccggctgggtctgcgtcctttcctgtgcctttccctccagaatgcggcctcagacctagaagctcaacccccctatgagggccacgtcctggggtagctcctgacctccgaccttatgtccaaatttcacacccatggtttttcatttgacccgcccccttctcgctcataatgacacccagctcctttgagaggatcagagcccattgcacaagaagagccgctgccaaccatccttgtcctccgattgcaaaatgacaccccagtaatctagaacattctcaagcccctttaactcagatgtcaagccaccgggcaaaccccgtcaatacctcccaccaaggaatgagatatgtggacctcactgctcccccaacccagcgtcaggctgggacacgccaacgctgttccgggttggaacagcagaggctcagaaactggctctgaaataggcagacctagcaagaggaagatacagggtatcgggcgtttgagtgtttcagaagtcattcgggaagataaatccagtgcgctggccgcagccacctgcattcaaagcttggaccagcgggttcttgttcgggaggcaaatttccctaggaaaaagaagacagacttttctaatgtggtccaaatgcggatcactggtcagatggactctagaagcactgagctccctgtctctggaagtatttaagaaaaggctgggccaggcacgatggctcacgcctgtaatcccagactttgggaggtcgaggcaggcggatcacctgaggtgaggagtttgagaacagcctggccaacatggtgaaacctcatctctactaaaaatacaaaaattagccaggcgtggtggcaggtgcctgtaatcccagctacttgggaggctgaggcatgagaatcacttaaacctgagaggcagaggttacagtgagccaagatcgtgccactgcattccagcctgggcgacagagcaagactctgtctc

SEQ ID NO: 15951 - protein, 202 aa, Homo sapiens
MIRPYMKVVTHGGYYGEGLNAIIVFAACFLPDSSLPDYHYIMENLFLYVISSLELLVAEDYMIVYLNGATPRRRMPGIGWLKKCYQVIDRRLRKNLKSLIIVHPSWFIRTVLAISRPFISVKSINKIQYVHSLEDLEQLIPMEHVQIPDCVLQYEEERLKARRESARPQPEFVLPRSEEKPEVAPVENRPALVSEDQETSMS

SEQ ID NO: 15952 - DNA, 2617 bp, Homo sapiens
  CDS (25)..(2412)
cctcgatcccctcgccgcggtcccatggaggaggaggcgagccgcagcgccgcggcgacgaacccagggagtcggcttacccgctggccgcctcctgacaagcaggagggatccgcggtggacccagggaagcggaggagcctggcggccaccccctcttcctcacttccctgtactctcatcgctctcggcctccgacacgaaaaggaagcaaatgagctgatggaagatctgtttgaaactttccaagatgagatgggattctccaacatggaagatgatggcccagaagaggaggagcgtgtggctgagcctcaagctaactttaacacccctcaagctctacggtttgaggaactactggccaacctactaaatgaacaacatcagatagcgaaggaactatttgaacagctgaagatgaagaaaccttcagccaaacagcagaaggaggtagagaaggttaaaccccagtgtaaggaagttcatcagaccctgattctggacccagcacaaaggaagagactccagcagcagatgcagcagcatgttcagctcttgacacaaatccaccttcttgccacctgcaaccccaatctcaatccggaggccagtagcaccaggatatgtcttaaagagctgggaacctttgctcaaagctccatcgcccttcaccatcagtacaaccccaagtttcagaccctgttccaaccctgtaacttgatgggagctatgcagctgattgaagacttcagcacacatgtcagcattgactgcagccctcataaaactgtcaagaagactgccaatgaatttccctgtttgccaaagcaagtggcttggatcctggccacaagcaaggttttcatgtatccagagttacttccagtgtgttccctgaaggcaaagaatccccaggataagatcctcttcaccaaggctgaggacaacaagtaccttctaacctgcaagactgcccgccaactgacagtgagaatcaagaacctcaacatgaacagagctcctgacaacatcattaaattttataagaagaccaaacagctgccagtcctaggaaaatgctgtgaagagatccagccacatcagtggaagccacctatagagagagaagaacaccggctcccattctggttaaaggccagtctgccatccatccaggaagaactgcggcacatggctgatggtgctagagaggtaggaaatatgactggaaccactgagatcaactcagatcaaggcctagaaaaagacaactcagagttggggagtgaaactcggtacccactgctattgcctaagggtgtagtcctgaaactgaagccagttgccgaccgtttccccaagaaggcttggagacagaagcgttcatcagtcctgaaacccctccttatccaacccagcccctctctccagcccagcttcaaccctgggaaaacaccagcccaatcaactcattcagaagcccctccgagcaaaatggtgctccggattcctcacccaatacagccagccactgttttacagacagttccaggtgtccctccactgggggtcagtggaggtgagagttttgagtctcctgcagcactgcctgctatgccccctgaggccaggacaagcttccctctgtctgagtcccagactttgctctcttctgcccctgtgcccaaggtaatgatgccctcccctgcctcttccatgtttcgaaagccatatgtgagacggagaccctcaaaaagaaggggagccagggcctttcgctgtatcaaacctgcccctgttatccaccctgcatctgttatcttcactgttcctgctaccactgtgaagattgtgagccttggcggtggctgtaacatgatccagcctgtcaatgcggctgtggcccagagtccccagactattcccatcgccaccctcttggttaaccctacttccttcccctgtccactgaaccagccccttgtggcctcctctgtctcacccttaattgtttctggcaattctgtgaatcttcctataccatccacccctgaagataaggcccacatgaatgtggacattgcttgtgctgtggctgatggggaaaatgcctttcagggcctagaacccaaattagagccccaggaactatctcctctctctgctactgttttccccaaagtggaacatagcccagggcctccaccagtcgataaacagtgccaagaaggattgtcagagaacagtgcctatcgctggaccgttgtgaaaacagaggagggaaggcaagctctggagccgctccctcagggcatccaggagtctctaaacaactcttcccctggggatttagaggaagttgtcaagatggaacctgaagatgctacagaggaaatcagtggatttctttgagctaggagaataagagtctggagactgggagccttcacttcggcctccgattggtggcgcatagggtgtaaccaataggaaacccctaaagggtacttaaaccccagattttgcaactggggctcttgagcagcttgctttagcctgctcccactctgtggaatatacttttgcttcaataaatctgtgcttttattgcttc

SEQ ID NO: 15953 - protein, 796 aa, Homo sapiens [sequence omitted]

SEQ ID NO: 15954 - DNA, 2301 bp, Homo sapiens
  CDS (23)..(1399)
aagagacgccgccgctgcccggatgttgcgatggctgatcgggggaggccgagaaccgcagggactggccgagaaatctcctttacagacaataggtgaagaacaaacccagaatccctacactgaactgctagtactgaaggctcatcatgatattgtacgatttctggtacagttagatgactacagatttgcatctgctggtgatgatggaattgtagttgtgtggaatgcccagacaggggaaaaacttttagaactgaatggacacactcaaaagataacagctattattacatttccttccttggaatcttgtgaagagaaaaatcaactcatcttgacagcctctgctgatagaacagttattgtgtgggatggtgatactaccagacaagttcagagaatatcatgcttccagtctactgtaaagtgtttaactgttcttcagagactagatgtttggctttctggtgggaatgacctgtgtgtgtggaaccgaaaattagatctcctgtgtaagactagccacctttctgatacaggtattagtgctttggttgaaatacctaagaactgtgttgtggcagcagttggcaaagaactgataattttcaggttggtagcacccacagaaggatcactagaatgggatattcttgaagttaagcgcctccttgatcaccaggataatattctctcattgattaatgtcaatgatttgagttttgtcaccggctcccacgtcggagagctgatcatctgggatgccctggactggaccatgcaggcctatgagcgcaacttctgggacccatctccacaactggacacccaacaagaaataaaactctgtcaaaaatcaaatgacatttctattcatcatttcacatgtgatgaagagaatgtatttgctgcagttggaaggggtttatacgtgtatagccttcaaatgaagcgtgtgattgcctgccagaaaactgcacatgactccaatgtcctgcacattgccagacttccaaacaggcagttaatctcatgctcagaagatggcagtgtacgcatttgggagttaagagaaaaacagcagcttgcagctgagcctgtaccaacaggtttttttaacatgtggggatttggaagagtcagcaaacaagccagccaacctgttaaaaagcagcaagaaaatgctacttcatgttcactggagcttattggagatttgattggacactcatcatctgtggagatgtttctatactttgaagatcatggactagtgacgtgctccgctgatcatctcattattttgtggaaaaatggagagcgagaatctggattgcgcagtttaagattatttcaaaaattagaggagaatggtgacttataccttgctgtctagtttaaggaattaaaaatacacatgcatgaaccttgaacatcaaatatcgggtactactctgaaaaccattaatatattgatcacttaaattggtaattttttttgtcagtccataaaattctacatgtttaaattttttgtggacctaccaaccaggaacatgttgcttctcaggtcctagtatatcctccaaagaatataccacaagtttttccatttgactttgagctgctgttgaagtggtgagtgctgtgttttgagcttattttgaacctagatccttgtgaaaggtacaaatagaggtaatagttaagttatggcatttattagaagttttattatttggcttcctttagaattattgtgaagtttaaaaatagcctttctcctgcaaattttcctagtctttagtaactgttagtgttctatatagcacaaacttgaatctctcagccaaaaaagggaacatatatactgtttaagtatggcaagttttctttggtaccaatttgtttagataattttaaaaatgttttttagttctagctactaaaacctgtatgaactcaaatggataggcatcttgtgagggtgtgtttttcccagtgtgaattggcttgaagagccatgggctaaatgggtactagaacaacaactgcccctcatgtacgccaaggatgagctctagatcatttgagaggcacagtgtttccggagtcagggactgcagctgagcgcaactgccccatctgaccactgactcaaatacgaactgcttgagacagacttcttttatgtagttctttgcagtgtccattgagacactataaccagccttgtaacaatatgttttctccttttggtgctaaaaaataaaaatattagaaagtagtctacac

SEQ ID NO: 15955 - protein, 459 aa, Homo sapiens; identical to SEQ ID NO: 12399

SEQ ID NO: 15956 - DNA, 1786 bp, Homo sapiens
  CDS (11)..(346)
gggttggaagatggcgtctcccacagacgggacagatctggaagcatctttgctaagttttgaaaaacttgaccgtgcctcaccagatctttggccagaacaattaccaggtgttgctgaatttgcagcttccttcaaaagtcctattactagttctccacccaaatggatggctgagatagaacgtgatgacatcgacatgttgaaagaactggggagtctcaccacggctaatttgatggagaaggttcgaggcctacagaacctagcctatcagctggggctggatgagtccagagagatgacacgggggaaattcctcaatattctagagaagcccaagaagtagcagctgcttgcggacaggatgtcctggggtccgaaaccaagctcccttcccggtgcacctctaacaatgcacacctcactgcttgcttgggagaggccagagggtgtacctccaggactgccctctcccctgctcctggcactctacacgtctgaggacattcagcagcaagagaagaatctgctctacccaaggatcattgcagttactcaatcaactttcagacttgaaccttcttagcctcggatattggtaacagctgagggcatatcattcttaaaggtcgaagtcctgctttctcatttctggaagtgattcaggagccccaggatcttacggttgatttgactcagtcatggcagtcagttgtgacatgttgattggatgggttcttttgaattgttcttgatctcttagaaagtgtttacgatgtgaggagaccagagaccaagtagattctggaccagaccatgcagcctgacctgtgaactctccagtatatactaagttcccagaatccccagctgaagaaaccagaatcttctcgaaatgtatatctgttttttaaaacttctatacctcttatgatagtcccatttgcttttcattccttacttcccagccccaccttctagttctgacttcgggcagagggatccctgagtccctcctggaattagcttgtatagtgaaaggcccatccaaggttgtctaaagaccaatgtgaaggtgacagaaaggacttttgagttctaattaatctgttacagcttcaagcaagaaagtcagtatagcctgaaagacaagagaaacgggatggtttataggagttcccatttggttgaaagctagaagccctaattgaccttaaagtaacatgctatgggatggtgggattgtcccctctgacagcacatatgaaatagttcatctatataatagaaacgcacacacacgaaagagaatcttctgacttaaatacaactttcatggagttcttcaccacttatctgtctctgttaaaatctgaaaatctagcccatggctaaaatctattatatgtgttctccatatttcttgtataagccagtccccagcatctgatgttttgagaagtgcatggagtttcctaaactttgcacagaagaatatcctggggccgggcatggtggctcacgcctgtaatcccagcactttgggaggccgaggcaggtggatcataggtcaaaagatcgagaccatcctggccaatatggtgaaaccctgtctctactaaaatacaaaaattagctgggcatgatggtgcatgcctatagtcccagctacttgggggcctgaggcacgagaatcgcttgaattcgggaggtggaggttgcagtgagccgaaattatgccactgcactccagcctgggcaacagagtgagactctgtctcag

SEQ ID NO: 15957 - protein, 112 aa, Homo sapiens
MASPTDGTDLEASLLSFEKLDRASPDLWPEQLPGVAEFAASFKSPITSSPPKWMAEIERDDIDMLKELGSLTTANLMEKVRGLQNLAYQLGLDESREMTRGKFLNILEKPKK

SEQ ID NO: 15958 - DNA, 1508 bp, Homo sapiens
  CDS (45)..(803)
gagttgtggctgaggaccccggcggcagacgcaggttcgggaccatgagttggattccttttaagattgggcagcccaagaaacagattgtgcccaaaacagtggagagagactttgaaagggagtatggaaaacttcagcagctggaagagcagacccggaggctgcagaaagacatgaagaagagcaccgacgcagacctggccatgtcaaaatctgccgtgaagatatccttggacttactctccaatcccctctgtgagcaagaccaggaccttctgaacatggtgacggccctggacacggccatgaagcggatggatgccttcaatcaggaaaaggtgaaccagatccagaagactgtgatcgagcccttaaaaaagttcggcagtgtcttcccgagcctcaacatggctgtgaagaggcgggaacaggccttgcaggactacaggaggctgcaggccaaggtggagaagtatgaggaaaaggagaagacggggccagtgctggccaagctccaccaggcacgagaggagctgcggcctgtgcgggaggactttgaagccaagaacaggcagctgctggaggagatgccgcgcttctacggcagccgcctcgactacttccagcccagctttgagtccctcatccgagctcaggttgtgtactactcggaaatgcacaagatctttggagacctgtcccatcagcttgaccagccaggccactccgatgagcagcgggagcgggagaacgaggccaaactcagtgagctccgggccctctccattgtggccgatgactgaatccccgtcactcttggaggactcctgtgacgtggtcagcctcattcatccttgcccttctcagggctagctgctcctctcacaggctggggacagaggtggccctggttcacttgccggccctttgcaatgaatgactcttcctgagcctggcaccaggagccctaggcaggccgccgtctccccactcacagccccagcaggtaagcagtgtagacaaacccttggggcttttttatttggagaaccgtccagcatgcatcctggcccacggcctgagcaagctgcagcccttctgaggccatgggcttcgttggctaagttgggggtcttagccttgcatgcgttgtgggcatcaaatctacctccaaaagacccatcctggggagccctctggcccctcgttgccttttcacttcaaaacctcttttttctgggagaggccctgaaccctgtgcgggagagctggtcctccagccctggcaggccctcagccagcttcccagcaagacaaagggcacccttgtggctttgggacctaagtggttggggttcccgaggtcactgaggactggtacctcgggaacgcaagctgtcagtggaactgtcccacaagaattcacaggtctcaaagcaggaacagtgggtttgtgtctcacctgagtatctggaattttattttttcaagtaaaattttcaatg

SEQ ID NO: 15959 - protein, 253 aa, Homo sapiens
MSWIPFKIGQPKKQIVPKTVERDFEREYGKLQQLEEQTRRLQKDMKKSTDADLAMSKSAVKISLDLLSNPLCEQDQDLLNMVTALDTAMKRMDAFNQEKVNQIQKTVIEPLKKFGSVFPSLNMAVKRREQALQDYRRLQAKVEKYEEKEKTGPVLAKLHQAREELRPVREDFEAKNRQLLEEMPRFYGSRLDYFQPSFESLIRAQVVYYSEMHKIFGDLSHQLDQPGHSDEQRERENEAKLSELRALSIVADD

SEQ ID NO: 15960 - DNA, 1767 bp, Homo sapiens
  CDS (28)..(459)
gcgcgccgctttctgttgccgggcgcaatggcggatacgctggagtcctcgctggaggacccactgcggagctttgtgcgagttttggagaagcgggatggtacagtgctacgactacagcagtatagctccggtggcgtgggttgcgttgtgtgggacgctgccattgtcctttctaaatacctggaaacgcccgagttttctggcgacggggcccacgcgctgagccggcggtcggtgctggagctgggttcgggcaccggggccgtggggctcatggctgctaccctcggggctgatgttgtagtcaccgatcttgaggaattgcaagacttgctgaagatgaatattaatatgaacaagcatcttgtcactggttctgttcaagccaaggggggaagaaatagaaggctttccttctccacccgacttcatactgatggccgactgcatatactatgaagagtctttggagccattgctgaaaactctaaaagatatcagcggatttgaaacttgtattatatgttgttatgaacaacgaacaatggggaaaaattcagaaattgagaaaaaatattttgagctccttcagctagattttgactttgaaaaaattcctttggaaaaacgtgatgaagagtatcgaagtgaagatattcatattatatacatcagaaagaaaaaatcgaaatttccatcgtgaagcctttaatcatcttacccaaggctctaacaacctgggtaaactaaagatgtgaatagagcatgtgaatacagcatgggaagattgtgttcacagatttttttttccggcacgtccttagagatccgatgtatagatgatgaccaccaggggctgtctgcaatacgaaaaattcctgcttgcctgcctgcctgccaatggccctgaatccagcttaggttacttagttcagcatcaagttcttcttaaatgttgggaatcagttattcaaataaaaattggtattgaggcgaggctgaaatctgccaaaaacagccaacatgatttgactggaccttttacaggaagctagagataaatttctgaagagaactatctgctattatataataatgttttaaattcaaactagtaaattttagtttgtcttcagagtttaaaaggttttcattttgtacataattatacaatatttatcatttgtattttccacttcatttcttttaaaatatctttaatactgaaatgttcttttaattttaaaaagaactgagatattgtcttgtatacttatattggccaaagttttcttttcctccaccatacatgtctatgtgatttaatcagtaaattgtactgtaatgagttgctaagaagacaaatcagaagattggaggaacaaaagatatctttacagatttttcatttgagcatggagtgagaatagaaagaccagtttcaggcttatgcacttacgtggctcatgcactttatgtatatgttccaggaaaatctggcttaaaaatactggtattgtttacatgaagcagtgaaaggtttttgaataactacaaatgtagttctatatgtatataccaaatgaatttctgttctgtgtctctctgttttatgttatgaagccattcgctcatatacaataatctgtcaaggactttaatcatacttgttccaaagagtagtaaccggatggaattctggtatttacaggcattggtgctagatggtacattttatgtgttaaaataaacattgtttttgag

SEQ ID NO: 15961 - protein, 144 aa, Homo sapiens
MADTLESSLEDPLRSFVRVLEKRDGTVLRLQQYSSGGVGCVVWDAAIVLSKYLETPEFSGDGAHALSRRSVLELGSGTGAVGLMAATLGADVVVTDLEELQDLLKMNINMNKHLVTGSVQAKGGRNRRLSFSTRLHTDGRLHIL

SEQ ID NO: 15962 - DNA, 1487 bp, Homo sapiens
  CDS (47)..(1165)
aaaatggcggcggcggcgacggccgggcgctcctgaagcagcagttatggagcttccctcagggccggggccggagcggctctttgactcgcaccggcttccgggtgactgcttcctactgctcgtgctgctgctctacgcgccagtcgggttctgcctcctcgtcctgcgcctgtttctcgggatccacgtcttcctggtcagctgcgcgctgccagacagcgtccttcgcagattcgtagtgcggaccatgtgtgcggtgctagggctcgtggcccggcaggaggactccggactccgggatcacagtgtcagggtcctcatttccaaccatgtgacacctttcgaccacaacatagtcaatttgcttaccacctgtagcacccctctactcaatagtccccccagctttgtgtgctggtctcggggcttcatggagatgaatgggcggggggagttggtggagtcactcaagagattctgtgcttccacgaggcttccccccactcctctgctgctattccctgaggaagaggccaccaatggccgggaggggctcctgcgcttcagttcctggccattttctatccaagatgtggtacaacctcttaccctgcaagttcagagacccctggtctctgtgacggtgtcagatgcctcctgggtctcagaactgctgtggtcacttttcgtccctttcacggtgtatcaggtaaggtggcttcgtcctgttcatcgccaactaggggaagcgaatgaggagtttgcactccgtgtacaacagctggtggccaaggaattgggccagacagggacacggctcactccagctgacaaagcagagcacatgaagcgacaaagacaccccagattgcgcccccagtcagcccagtcttctttccctccctcccctggtccttctcctgatgtgcaactggcaactctggctcagagagtcaaggaagttttgccccatgtgccattgggtgtcatccagagagacctggccaagactggctgtgtagacttgactatcactaatctgcttgagggggccgtagctttcatgcctgaagacatcaccaagggaactcagtccctacccacagcctctgcctccaaggcattcgatgcgtgtttaatgatgatgactccgcaagccctctgacattgtgatcacctcagtttcccagctctggcccggtgacccctcagccaacagccctaacatttgccaagtcttcctgggcccggcaggagagcctgcaggagcgcaagcaagcactatatgaatacgcaagaaggagattcacagagagacgagcccaggaggctgactgagctcaaaggaacaggatggcacccagagccgcaggacggagactgggggcagccctcacccaactcacaacaggctggatgggtgggtggtaaaaagggaaggatgaggctcccccaatgtcacattaaattcatggttttcattc

SEQ ID NO: 15963 - protein, 373 aa, Homo sapiens
MELPSGPGPERLFDSHRLPGDCFLLLVLLLYAPVGFCLLVLRLFLGIHVFLVSCALPDSVLRRFVVRTMCAVLGLVARQEDSGLRDHSVRVLISNHVTPFDHNIVNLLTTCSTPLLNSPPSFVCWSRGFMEMNGRGELVESLKRFCASTRLPPTPLLLFPEEEATNGREGLLRFSSWPFSIQDVVQPLTLQVQRPLVSVTVSDASWVSELLWSLFVPFTVYQVRWLRPVHRQLGEANEEFALRVQQLVAKELGQTGTRLTPADKAEHMKRQRHPRLRPQSAQSSFPPSPGPSPDVQLATLAQRVKEVLPHVPLGVIQRDLAKTGCVDLTITNLLEGAVAFMPEDITKGTQSLPTASASKAFDACLMMMTPQAL

SEQ ID NO: 15964 - DNA, 1609 bp, Homo sapiens
  CDS (574)..(1299)
gtgacagatggcacagaaaccgctgcgcctcttggcttgtggagatgttgaaggaaagtttgatattttattcaatagagttcaagcaattcagaagaaaagtggaaactttgatctgctgttgtgtgtaggaaatttctttggctccacccaagatgctgaatgggaggagtataagactggcatcaagaaagggagaagtggataccaaaaaatgtggttctgctttggtttccagtcttgccacgggcttgaaaccaagataccattttgctgctttggaaaagacctattatgagaggcttccatatcgaaaccatatcattctacaggaaaatgcacagcatgccacccggtttatagctctggcaaatgttggaaatccagaaaagaaaaagtatctttacgcgttcagtattgttcccatgaagctaatggatgcagcagaactggtaaaacagcctccggatgtcactgaaaacccttacagaaaatctgggcaggaagcatccataggaaagcaaattcttgcccctgtggaagaatcagcctgtcagtttttctttgatttaaatgaaaagcagggaaggaagcgttcatccacaggtagagatagcaaatcttctcctcatccaaagcagcctcgcaaacctccctccaggaccctgctggttttgccttgctagccctgaagtggaaaaacatttggtggtcaacatcggcacacattgctaccttgccctggccaaaggaggcttatctgatgaccatgtcctcatcctgcctattggacactaccagtcagtggtggagctttcagcagaggtggtagaagaggtggagaagtataaggccactctgagacggttctttaagagtcgagggaaatggtgtgttgtatttgagagaaattataagagccatcacctccagctacaggtcattcctgtcccaatcagctgctctactactgatgacattaaagatgccttcattacccaggcacaggagcagcagatagagctgttggaaatcccagagcactctgacatcaagcagattgcacagccaggagcagcatatttttatgttgaacttgacacaggagaaaagcttttccacagaattaaaaagaattttcctttgcagtttggaagggaggtcctggccagtgaagccatccttaatgttcctgataagtctgactggaggcagtgtcagatcagcaaggaagacgaggagaccctggctcgccgcttccggaaagactttgagccctatgactttactctggatgactaaaacaaagggaagaactttttatgaactccacaggaagtagtaaagcttttttttttttttaattaaaagaattttttttgagacaaagtctcgctctgtcacccaagcaggattgcagtgagccaagatcgctccattgcactccagcctgggtgacagtgaaactccatctcaaaaataaaagaataaaagtatgtctgtcatccagctcctatgtctgttatccagctccaagtacagcttgtgtatatcaacattttcaaaaacctttaaactaccaaatgaaatccagatgtttttccatggt

SEQ ID NO: 15965 - protein, 242 aa, Homo sapiens
MKSREGSVHPQVEIANLLLIQSSLANLPPGPCWFCLASPEVEKHLVVNIGTHCYLALAKGGLSDDHVLILPIGHYQSVVELSAEVVEEVEKYKATLRRFFKSRGKWCVVFERNYKSHHLQLQVIPVPISCSTTDDIKDAFITQAQEQQIELLEIPEHSDIKQIAQPGAAYFYVELDTGEKLFHRIKKNFPLQFGREVLASEAILNVPDKSDWRQCQISKEDEETLARRFRKDFEPYDFTLDD

SEQ ID NO: 15966 - DNA, 1886 bp, Homo sapiens
  CDS (60)..(1619)
gcggagagcgcgggccgttttctttcctggtgtcccgtcgcggcttgggacccggcaagatgggcaagaagggcaagaaggagaagaagggccgcggcgcggagaagacggccgccaagatggagaagaaggtgtctaagcgctcgcggaaggaggaggaagacctggaagcgctcatagcccatttccagacactcgatgccaagaggactcagactgtggaacttccgtgccccccaccctcaccaaggttaaatgcctccctctcggttcatcctgagaaagatgagttaatcctttttggaggtggatatttcaacggccaaaaaacttttttgtataacgagctctatgtctacaataccagaaaggacacctggaccaaagttgacatacccagtccacctccgaggcgctgtgctcaccaggcggtggtagtgcctcaaggtggcggacagctgtgggtctttggaggggagtttgcctctcccaacggagagcagttctaccactacaaggatctctgggtcctgcatttggccaccaagacctgggaacaagtcaaatcaacaggcggtccttcgggtcggagtggacatcggatggtggcctggaagagacaattgatcctgtttggtggcttccatgaaagtacacgggattacatctactacaacgacgtgtatgcctttaatctggacaccttcacatggagcaagctgtccccgtcagggacggggcccacacccagatcaggctgccagatgtccgtcactccccagggcggcatcgtcgtctatgggggctactcgaaacagagagttaagaaagacgtggacaagggcacacggcactcagacatgttcctgctgaagccagaggacggaagagaagacaagtgggtttggactcggatgaacccttcgggggtcaagcccaccccacggtctggcttttccgtggccatggccccgaatcaccagacactgttcttcgggggtgtctgtgacgaggaagaggaggagagcctgtcgggcgagttcttcaacgatctgtacttctacgacgccaccaggaaccgttggtttgagggacagctgaagggacccaagtctgaaaagaagaaacgcaggcggggcagaaaagaggagcccgaaggtggtagcaggccggcgtgtgggggagctggcacccaggggcctgtgcagctggtcaaggaggtggtggccgaggatggcaccgtggtcaccattaagcaggtgctcaccgcgccaggctcggcggggcagccccggtctgaggacgaagacagccttgaggaggccggcagccccgcacctgggccgtgtccacgctccaacgccatgctggctgtgaagcatggggtgctctacgtctatgggggcatgtttgaggccggcgaccgccaggtcaccctcagcgacctgcactgcctggacctgcacaggatggaggcgtggaaggccttggtggagatggacccagaaactctggagtggctggaggagacggactcggaagaggacagtgaggaggttgagggcgccgagggtggggtcgacgacgaagacagcggagaggagagcggtgcggaggactgagaagagcccctgccaggggcgcctggcaagtgctgtgcccacgtccgcccaggacccagccgtgttgagtgaagctcttggggccagcgtgcgtcctgacgcacaggagagagctgaaggtgggtggcccaggccagggtgtgaactttctcccatggtttagtctctgacgcggcactgggccggaagttcaactgagtgcagtgcaggtggattccctcagcagcctgtgtgttgtgtgaaataaattggacttgaaacaag

SEQ ID NO: 15967 - protein, 520 aa, Homo sapiens [sequence omitted]

SEQ ID NO: 15968 - DNA, 3072 bp, Homo sapiens
  CDS (123)..(2090)
gtggttaggcggctccccggcggctcctccgcggcggtgacggcgaccgcactccccgcttcccgctccccgcgctcctccgcccgggtccgccagccgaggccgctcccgagcgtcggaagatgccggccgtgtccaagggggacgggatgcggggcctggcggtcttcatctcggatacccgcaactgtaaaagtaaagaagcagaaataaaaaggataaacaaggaactggcaaatatcagatcaaaatttaaaggtgacaaggctcttgatggctatagtaaaaaaaagtacgtctgcaagttgctcttcatctttctccttggtcatgacattgactttggacacatggaggctgtgaacctgctgagttcaaacagatacacggaaaagcagatcggctaccttttcatctctgtgttggtgaactcaaacagtgagctgatccgcctgatcaacaacgccatcaagaatgacctggccagccgcaaccccaccttcatgggcctggccctgcactgcatcgccagcgtgggcagccgggagatggccgaggccttcgccggggagatccctaaggtcctcgtagccggagacactatggacagcgtgaagcagagcgcggccctgtgcttgctgcgcctgtacaggacgtcccccgatcttgtccccatgggcgactggacatcccgagtggtgcacctgctcaatgaccagcacttgggtgtggtaactgcagccacaagtctgatcaccactttagcacagaagaacccagaagagtttaaaacctccgtgtctctggctgtctctaggctaagcagaatcgtgacgtctgcatccacagatctccaggattacacttactattttgtcccggctccctggctgtctgtcaaactgctgagactgctgcagtgctacccacccccagaagaccctgcagtgcgaggccgcctgactgagtgcctggagaccatcctgaacaaagcccaagaaccgcccaagtcgaagaaggtccagcactccaacgcgaagaatgccgtgcttttcgaggccatcagcttaatcattcaccatgacagtgagccgaacctgctcgtccgtgcctgcaaccagttgggccagtttctgcagcaccgcgagaccaacctgcgctacctggccctggagagcatgtgcacgctggccagctctgagttctcccatgaggctgtcaagacgcacatcgagacggtcatcaacgccctgaagactgagcgggacgtgagcgtgcggcagcgggccgtggacctcctctacgccatgtgcgaccgcagcaacgccccacagatcgtggccgagatgctgagctatctggagacagctgactactccatccgagaagagattgtgctgaaggtcgccatcctggctgagaagtacgcggtggactacacctggtatgtggataccatcttgaacttgatccgaattgctggtgattacgtgagtgaagaggtgtggtaccgagtcattcagatcgtcatcaaccgggacgacgtgcagggctacgcggccaagactgtgttcgaggctcttcaggctcccgcgtgccacgagaacctggtcaaagtgggcggctacatcctgggggagtttggaaacttgatagctggagacccgagatccagcccgctgatccagttccacctgctgcactccaagttccacctgtgcagcgtccccacccgcgcgctgctcctgtccacctacatcaagttcgtgaacctcttcccggaggtgaagcccaccatccaggacgtgctgcgcagcgacagccagctcaggaacgcagacgtggagctgcagcagcgtgctgtggagtacctgcggctcagcaccgtggccagcaccgacattctggcgaccgtgctggaggagatgcccccattcccggagcgggagtcctccatcttggcaaagctcaagaagaagaagggccccagcacggtgacagacctggaggacaccaagcgggacaggagtgtggacgtgaacgggggtcctgagcctgccccagccagtaccagcgccgtggtttgtttgtaaaaacaatggtgtgttgtttgaaaaccagctgcttcaaattggacttaagtctgaatttcggcagaatttaggtcggatgtttatcttttatggtaataagacctccacgcagttcctaaactttaccccaacactaatctgttcagacgaccttcagcctaacctgaacctgcagaccaagcccgtggacccgaccgtggaggggggcgcgcaggtgcagcaggtggtcaacatagagtgcgtgtccgacttcacggaggcgccagtcctcaacattcagttcaggtatgggggcaccttccagaacgtgtctgtgcagctgcccatcactctcaacaaattcttccagccgacagaaatggcttctcaggatttctttcaacgttggaagcagttgagcaatccacagcaggaagtgcagaacatcttcaaagcaaagcacccaatggacacagaagtcaccaaagccaagatcattggatttggttctgcacttcttgaagaagttgatcctaatcctgcgaatttcgtgggagctggaatcatccacacgaaaaccacccagattggatgcctgctgcgcttggagccgaacctgcaagcccagatgtaccggctcacgctgcgcacaagtaaggaagccgtttctcagagattatgtgaattgctctcagcgcagttttagtcctgaggatggaagaccaggctcgtgtgtcttgtgttgtcttcgtctgtgccgtttgccttcgtggctatcctgcagatgagcaccgtgtccagtgccacagcacaaggcgcctccccgccccaccgccccacacctctcccctttgggctggacgggaacacacgtgtgtggctcaggaggaaaagctcagcctggactgtggcagccacggcagaaggtggatcttgggatcaatttttataaaaatcgagacagttctgtggttaaatctacaaattaaagggaaattag

SEQ ID NO: 15969 - protein, 656 aa, Homo sapiens [sequence omitted]

SEQ ID NO: 15970 - DNA, 1934 bp, Homo sapiens
  CDS (37)..(1494)
agtgcagctttcagagggtccgggctcagaggggctatgattcggagggttctgccgcacggcatgggccggggcctcttgacccggaggccaggcacgcgcagaggaggcttttctctggactgggatggaaaggtgtctgagattaagaagaagatcaagtcgatcctgcctggaaggtcctgtgatctactgcaagacaccagccacctgcctcccgagcactcggatgtggtgatcgtgggaggtggggtgcttggcttgtctgtggcctattggctgaagaagctggagagcagacgaggtgctattcgagtgctagtggtggaacgggaccacacgtattcacaggcctccactgggctctcagtaggtgggatttgtcagcagttctcattgcctgagaacatccagctctccctcttttcagccagctttctacggaacatcaatgagtacctggccgtagtcgatgctcctcccctggacctccggttcaacccctcgggctacctcttgctggcttcagaaaaggatgctgcagccatggagagcaacgtgaaagtgcagaggcaggagggagccaaagtttctctgatgtctcctgatcagcttcggaacaagtttccctggataaacacagagggagtggctttggcgtcttatgggatggaggacgaaggttggtttgacccctggtgtctgctccaggggcttcggcgaaaggtccagtccttgggagtccttttctgccagggagaggtgacacgttttgtctcttcatctcaacgcatgttgaccacagatgacaaagcggtggtcttgaaaaggatccatgaagtccatgtgaagatggaccgcagcctggagtaccagcctgtggaatgcgccattgtgatcaacgcagccggagcctggtctgcgcaaatcgcagcactggctggtgttggagaggggccgcctggcaccctgcagggcaccaagctacctgtggagccgaggaaaaggtatgtgtatgtgtggcactgcccccagggaccaggcctagagactccgcttgttgcagacaccagtggagcctattttcgccgggaaggattaggtagcaactacctaggtggtcgtagccccactgagcaggaagaaccggacccggcgaacctggaagtggaccatgatttcttccaggacaaggtgtggccccatttggccctgagggtcccagcttttgagactctgaaggttcagagcgcctgggccggctattacgactacaacacctttgaccagaatggcgtggtgggcccccacccgctagttgtcaacatgtactttgctactggcttcagtggtcacgggctccagcaggcccctggcattgggcgagctgtagcagagatggtactgaagggcaggttccagaccatcgacctgagccccttcctctttacccgcttttacttgggagagaagatccaggagaacaacatcatctgagcatgtgtgctctgcactggctccactggcttgcatcctggctgtgttcacagccttgtttgctgcttccatcttccccagtactgtgccaggccttctccccctccccagtatcctctcctctcaggcaggccattgcacccatatggctgggcaggcacaggcagtgaggccgaggccgatagcgagtgatgagcgggatcctaggactgatctgtagcccatgctgatgtcacccaccagggcaatccatctggaggcctgagcaccctggcccaggactggcttcatcctggcactgaccaggaaagactgcctctgaccctcttagcagacagagcccaggcatgggagcactctggggcagcctggctcaggtttattgattttcgtctgtttaccctatccattaatcaatacatgtaattaactccttc

SEQ ID NO: 15971 - protein, 486 aa, Homo sapiens
MIRRVLPHGMGRGLLTRRPGTRRGGFSLDWDGKVSEIKKKIKSILPGRSCDLLQDTSHLPPEHSDVVIVGGGVLGLSVAYWLKKLESRRGAIRVLVVERDHTYSQASTGLSVGGICQQFSLPENIQLSLFSASFLRNINEYLAVVDAPPLDLRFNPSGYLLLASEKDAAAMESNVKVQRQEGAKVSLMSPDQLRNKFPWINTEGVALASYGMEDEGWFDPWCLLQGLRRKVQSLGVLFCQGEVTRFVSSSQRMLTTDDKAVVLKRIHEVHVKMDRSLEYQPVECAIVINAAGAWSAQIAALAGVGEGPPGTLQGTKLPVEPRKRYVYVWHCPQGPGLETPLVADTSGAYFRREGLGSNYLGGRSPTEQEEPDPANLEVDHDFFQDKVWPHLALRVPAFETLKVQSAWAGYYDYNTFDQNGVVGPHPLVVNMYFATGFSGHGLQQAPGIGRAVAEMVLKGRFQTIDLSPFLFTRFYLGEKIQENNII

SEQ ID NO: 15972 - DNA, 2330 bp, Homo sapiens
  CDS (245)..(1234)
ctactgggagaggctcctgctaggctcaggcagtgggcaagccagcgtcagcctgcgactgacctccccgcttaggcctcccgagggcgtccggcttagggaaaagacactcacagagcatgcgttgctggggaggcagcccaggacgcctgagcggcagaaaccatgtgcacaggaggtccctgggagaacctttgggagcgcccaggacctggaggctgccggcggtcggggacatcaccgaatgggtgcagtttggcaggagcctcatagtctcctcggtggccaggagccctcgacctgggacgagctgggcgaggctcttcacgctggggagatgtccttcgaatgcagggcgtgcagcaaagtgttcgtgaagagctccgacctcctcaagcacctacgcacccacaccggggagcggccctacgagtgcgcccagtgcggcaaggccttcagccagacgtcgcacttgacgcagcaccagcgcatccacagcggcgagacgccctacgcgtgccccgtgtgcggcaaggccttccggcatagctcctcgctggtgcggcaccagcgcatccacacggccgagaagtccttccgctgctccgagtgcggcaaggccttcagccacggctccaacctcagccagcaccgcaagatccacgcgggtgggcgtccttatgcttgcgcacagtgtggccgccgcttctgccgcaactcgcacctgatccagcacgagcgtacgcacacaggcgagaagcccttcgtgtgcgcgctctgcggtgctgccttcagccagggctcctcgctctttaagcaccagcgcgtgcacacaggcgagaagcccttcgcctgcccacagtgcggccgcgcctttagccacagctccaacctcacccagcaccagctcctgcacacgggcgagcggcccttccgctgcgtggactgtggcaaggccttcgccaagggcgccgtgctgctcagccaccggcgcattcacacgggcgagaagcccttcgtgtgtacgcagtgtggccgcgccttccgtgagcgcccggccctcttccaccaccagaggatccataccggcgagaagaccgtccggcgatccagggccagcctgcacccccaggccaggtctgttgccggggcatcatcagaaggtgcgccagcgaaggaaaccgagcccactcccgcctcgggcccagccgccgtctcgcagccagcggaggtctgaggtcacagatcacacctccatccccaaagaggtagcactgcagcaacatcagggggaggacgtggtggctgaactctagtggggccgagactattcagagccagtaggaggccgacagtcacagcactgcactgtggtgcggcttcatgtgatatgacagtggatgctaaggtgagagggatgcaggcatgggttgggggtggcccagagaaacttatgacagctgtacacaaactggccgctggagagatgcccgctgagggtattctcccctcaacccactgcctctgttcatccaagacttcctaggggccagcctagcagacaagagaccacaagggactggggatcagggtctgggctctgtcagccgccacctctgggaaagagaaaaggtttgggtccactgaacatcatgtttgtagacgctgacaggtggggtcctaatgagagccaacacatgctcactgccagctcctgtcctgagtactgggaagtttctcctgaagccctgtgagatggctctgtggctggtatcccgacttggaagatgaggaaactgaggcacacggcctggcctggcttcacacacatagccgactcaggagagggatgcccatgggggaacatgtgactctcagcattggaaggacagagctaggatgatggctttccggtggcactcgttcaggtttttgcccaagtctcagcttggccaaggcctgtcactgactggtttaccaaagtcgatgtgaggaggaggctttatacctgaggggatgatgttaacttcagacaagatggagctgctcacttttgccgggtttggtggccacttcacccccaaccctgtctcacccccattatccctcctcaattggaggctggacagagctgaataggaaagacttgctattgcctaaggctatgtgtgacaccctcctgaggacctccccaccccagtgtaatggcccttcatggcagggacagaaaggtggactgggggccatttgcttcctgtggccttcagcagaccaggccctgtccctacctggagcctcacctccaaggaaattcatgttctccttaatgg

SEQ ID NO: 15973 - protein, 330 aa, Homo sapiens
MGAVWQEPHSLLGGQEPSTWDELGEALHAGEMSFECRACSKVFVKSSDLLKHLRTHTGERPYECAQCGKAFSQTSHLTQHQRIHSGETPYACPVCGKAFRHSSSLVRHQRIHTAEKSFRCSECGKAFSHGSNLSQHRKIHAGGRPYACAQCGRRFCRNSHLIQHERTHTGEKPFVCALCGAAFSQGSSLFKHQRVHTGEKPFACPQCGRAFSHSSNLTQHQLLHTGERPFRCVDCGKAFAKGAVLLSHRRIHTGEKPFVCTQCGRAFRERPALFHHQRIHTGEKTVRRSRASLHPQARSVAGASSEGAPAKETEPTPASGPAAVSQPAEV

SEQ ID NO: 15974 - DNA, 1509 bp, Homo sapiens
  CDS (60)..(1142)
atgcaaataaccgtttgctgctcacaggcacacctgtacagaacaatctgttagaactcatgtcgctgttgaattttgttatgccacacatgtttagtagtagcaccagtgaaatacgaagaatgttttcctctaagacaaaatcagcagatgagcaaagcatatatgaaaaggagagaatagcacatgcaaaacaaattataaagccatttattctcagaagagtaaaagaagaggttctcaagcagttaccccccaagaaagatcgaattgagttgtgtgcaatgtcggagaagcaggagcaactctatttgggtcttttcaacagattgaaaaaatctatcaataacttggtcacagaaaaaaacacagaaatgtgcaatgtcatgatgcagttgaggaaaatggccaatcatcctttattacatcgccaatattacacagctgaaaaactcaaggaaatgtctcagcttatgctaaaggaacctacacattgtgaggctaaccctgacctgatctttgaagatatggaagttatgacagacttcgaactacatgtactttgtaaacagtaccgacacattaataactttcagttagacatggacttgattttagattctggaaaatttcgagttttaggatgcatcttgtctgaattgaaacagaagggtgatagagttgtgttatttagccaatttaccatgatgctggatatcttagaggttctattaaaacatcatcagcataggtacctcagattagatggaaagactcagatttctgaaaggattcatctaattgatgagtttaataccgatatggatatctttgtgtttctgctatcaacaaaagctggtggattaggaatagatctgacttcagcaaatgttgttatacttcacgatattgactgtaatccttataatgacaaacaagcagaagatagatgccatagagtaggccagactaaagaagtactagttataaaactaataagccaagggacgattgaagaatccatgctaaaaattaaccaacagaaattgaaactagaacaggatatgactacagtagatgaaggtgatgaagggagtatgccagcagatatagccacattactaaaaacatcaatgggcctgtgaaataagaactgtgaactctcaattgatgaggaaatatcaacttggtgcactcaaggacatttacattatgatgaccatggggtttatgaacatttataactttttataatttccatattacatttctcatagtatggacaactttttgccactaactgaattctccaaatactcacacgtgaaatttcaaaaaagaagccacaaatatgtagttctgaagatgttgaataatcattttacaaagcagttttctgaatggggattagttggtgattgtttgtaacaaatatgctaatgctttagaaatgtcagtatttttgtaattatttctacctccaaatatatatatattgtctttcactgg

SEQ ID NO: 15975 - protein, 361 aa, Homo sapiens [sequence omitted]

SEQ ID NO: 15976 - DNA, 1603 bp, Homo sapiens
  CDS (1)..(777)
atggacgcctgggtccgcttcagtgctcagagccaagcccgggagcggctgtgtagggccgcccagtatgcttgctctcttcttggccatgcgctgcagaggcatggagccagtcctgagttacagaaacagattcgacaactggagagccacctgagccttggaagaaagcttctacgcctgggtaactcagcagatgcccttgagtcagccaaaagagctgttcacctatcagatgttgtcctgagattctgcatcactgttagtcacctcaatcgagccttgtacttcgcctgtgacaatgtcctgtgggctggaaagtctggactggctccccgtgtggatcaggagaagtgggcccagcgttcattcaggtactatttgttttccctcatcatgaatttgagccgtgatgcttatgagattcgcctactgatggagcaagagtcttctgcttgtagccggcgactgaaaggttctggaggaggagtcccaggaggaagtgaaactgggggacttgggggaccagggactccaggaggaggtctgccccaactggctctgaaacttcggctgcaagtcctgctcctggctcgagtccttagaggtcatcccccacttctgctagacgtggtcagaaatgcctgtgatctcttcattcctctggacaaactaggcctctggcgctgtggccctgggattgtggggctttgtggcctcgtgtcctccatcctgtctattctcaccctaatctatccctggctacgactcaagccctgaccttccggtacaggataaggaggggacctgaattggtgagatggaatcttagatcgtcccccatgtgccagcctcattcgaattctactctttggttaaagttagaaattcagggatttaggggtggaggaagagctttggggaagatgaggtaaggaaagatgactcgtgaagttaataggatgtctctaatttctagatgtgcctgagcttctgttcttttcctctttctttgtgtctctcttgaatatatttactttgtgtctcttaactctgtttaaggttctgtgtctatgcatctctctctttcttttttcaaccttctcattctcctatccagggatttaatcagcagaattactttttgataggggaggtataaggtttggcctgtaaggttctaactgccttcttttttctcacagaggtggcttatggcagatttttcctccttcaaactccaaacataatttttaagactatgtgccagtggactcttcccttatatctctgcaccacaagttgttggatgtttcctcttcctcccttatgtctacctcaccaacctcgctcatcatttggcccttatccttccttgtacacctaccttcagatttctgcttacactttgatttcagagctttattccccagtctgttcttactcctttgtcgcttatccagaatgatgctatgtgtagcatcttgctgtaaatcctgtacaatgattctgtgtaaatagctgtggcctatgccaataatgaagagcaagcctttcaggtaagcaaattaaagttcagtttgctcatcgaaaaaaaaaaaag

SEQ ID NO: 15977 - protein, 259 aa, Homo sapiens
MDAWVRFSAQSQARERLCRAAQYACSLLGHALQRHGASPELQKQIRQLESHLSLGRKLLRLGNSADALESAKRAVHLSDVVLRFCITVSHLNRALYFACDNVLWAGKSGLAPRVDQEKWAQRSFRYYLFSLIMNLSRDAYEIRLLMEQESSACSRRLKGSGGGVPGGSETGGLGGPGTPGGGLPQLALKLRLQVLLLARVLRGHPPLLLDVVRNACDLFIPLDKLGLWRCGPGIVGLCGLVSSILSILTLIYPWLRLKP

SEQ ID NO: 15978 - DNA, 2078 bp, Homo sapiens
  CDS (113)..(1873)
gtgtatgaacgcagcggcggacctgtgaggggatccgacttgccggcagaacttacgctgcgggaccccgggcactgttgctgctgcgggagactgtgggctgtttagtgccatgcaccctttacagtgtgtcctccaagtgcagaggtctctggggtggggaccattggcctctgtgtcttggctgtcgctgaggatgtgcagggcacacagcagtctctctagtaccatgtgtcccagtccagagaggcaggaggatggagctcggaaggatttcagctccaggctggctgctggaccgacttttcaacattttttaaaaagtgcctcagctcctcaggagaagctgtcttcagaagtggaagacccacctccctatctcatgatggatgaacttcttggaaggcagagaaaagtctacctcgagacctatggctgccagatgaatgtgaatgacacagagatagcctggtccatcttacagaagagtggctacctgcggaccagtaacctccaagaggcagatgtgattctccttgtcacgtgctctatcagggagaaggctgagcagaccatctggaaccgtttacatcagcttaaagccttgaagacaaggcggccccgctcccgggttcctctgaggattggaattctaggctgcatggctgagaggttgaaggaggagattctcaacagagagaaaatggtagatattttggctggtcctgatgcctaccgggaccttccccggctgctggctgttgctgagtcgggccagcaagctgccaacgtgctgctctctctggacgagacctatgctgatgtcatgccagtccagacaagcgccagtgccacgtctgcctttgtgtcaatcatgcgaggctgtgacaacatgtgtagctactgcattgttcctttcacccggggcagggagaggagtcggcctattgcctccattctagaggaagtgaagaagctttctgagcaggggctgaaagaagtgacacttcttggtcagaatgttaatagttttcgggacaattcggaggtccagttcaacagtgcagtgcctaccaatctcagtcgtggctttaccaccaactataaaaccaagcaaggaggacttcgttttgctcatcttctggatcaggtctccagagtagatcctgaaatgaggatccgttttacctctccccaccccaaggattttcctgatgaggttctgcagctgattcatgagagagataacatctgtaaacagatccacctgccagcccagagtggaagcagccgtgtgttggaggccatgcggaggggatattcaagagaagcttatgtggagttagttcaccatattagagaatctattccaggtgtgagcctcagcagcgatttcattgctggcttttgtggtgagacggaggaagatcacgtccagacagtctctttgctccgggaagctcagtacaacatgggcttcctctttgcctacagcatgagacagaagacacgggcatatcataggctgaaggatgatgtcccggaagaggtaaaattaaggcgtttggaggaactcatcactatcttccgagaagaagcaacaaaagccaatcagacctctgtgggctgtacccagttggtgctagtggaagggctcagtaaacgctctgccactgacctgtgtggcaggaatgatggaaaccttaaggtgatcttccctgatgcagagatggaggatgtcaataaccctgggctcagggtcagagcccagcctggggactatgtgctggtgaagatcacctcagccagttctcagacacttaagggacatgttctctgcaggaccactctgagggactcttctgcatattgctgacctgagaggatggcctcagagctgacttgggcaatcctccccaacaggaaggggagacattgcctgccactgaggaaacaggtcatgaaggtggagataagctgcaaggggcgaagcaactttatgtcagtggaaaacgtgtctctttaaagctgctatgtgaacagcttttacagtcattaaatttacctaaactaaggtt

SEQ ID NO: 15979 - protein, 587 aa, Homo sapiens [sequence omitted]

SEQ ID NO: 15980 - DNA, 2007 bp, Homo sapiens
  CDS (195)..(1403)
ataacccctcattgttcgcagctgatgtcactcgcagttgtgagcggccgcctctcccggggacaatgtgggactgagcggcccagccgccgtgccgccgccgccgccgccgcaggacagccccagcgagagccggccaggttgcagcgcggacacactcgcaggtcgctgtggccccagcctcgcctgacagaatgagcggctcggacgggggactggaggaggagccagagctcagcatcaccctcacgctgcggatgctgatgcacgggaaggaagtgggcagcatcatcgggaagaagggcgagactgtaaagcgaatccgggagcagagcagtgcccggatcaccatctccgagggctcctgccctgaacgcatcaccaccatcaccgggtctacagcagctgtcttccatgcagtctccatgattgctttcaaactggatgaggacctttgtgctgctcctgcaaatggtggaaatgtctccaggcctccagtgaccctgcgccttgtcatccctgccagtcagtgtggctcactgattgggaaggctggcaccaagatcaaggagatccgagagactacgggtgcccaggtacaggtggcaggggacctgctccccaactccacagagcgagctgttacggtatctggggtgcctgatgccatcatcctgtgtgtgcgccagatctgcgctgttatcctggagtccccacccaaaggagccactatcccctaccatccgagcctctccctaggtactgttcttctctctgccaaccagggcttctctgtccagggtcagtatggggctgtgaccccagctgaggtcaccaagctccagcagctctcaagccatgcggtcccctttgccacacccagcgtggtgccaggactggatcccggcacacagaccagctcacaggagttcttggttcccaacgatttgattggctgtgtgatcgggcgccagggcagcaagatcagcgagatccggcagatgtcaggggcacatatcaagatcgggaaccaagcagagggcgctggggagcggcatgtcaccatcactggctctccggtctccatcgccctggcccagtacctcatcactgcctgtctagagacggccaagtctacctctggggggacgcccagctcggcccccgcagacctgcctgcccccttctcgccacccctgacggccctgcccacagctccccctggcctgctgggcacaccctatgccatctccctctccaacttcatcggcctcaagcccatgcccttcttggctttaccacctgcttccccagggccgccgccgggcttggcggcctacactgccaagatggcagcagctaatgggagcaagaaggctgagcggcagaaattctccccctactgaggccagctgaggtacaggcaggggcaggcaggaccaccagcagggggctgcctctgcaccctacccgcccaaggagactccaccctggggtcccaaacgccgctaacgcccagacgcatggatgcaccccctaccctgcctccatctatgggagttctttctctcagagtgggggcagtttctggcccaggggtctgagctgcggcagccccagggcagggggccctacctcctcagctctgtgcttggatacagggagcagccaggagactccctagtgcccccaccatggcgggtgtcactcacgcactccccatcccttagggcttcctggcctactgcatccttgtgggagtcagggaggagggcccgttgggtagctggggccaggcttctctccccaccacctgcagatttcttgctgcttccactgatacccttttgactggaatgaactggctgggcttgtcagggggcaccccaaagagggggcactgccaggtagctgggggagtggcatggggcaggggcccagttctcagcagcagacactctgtacagttttttcaatccctgtttttgaataaatattctcagcgac

SEQ ID NO: 15981 - protein, 403 aa, Homo sapiens
MSGSDGGLEEEPELSITLTLRMLMHGKEVGSIIGKKGETVKRIREQSSARITISEGSCPERITTITGSTAAVFHAVSMIAFKLDEDLCAAPANGGNVSRPPVTLRLVIPASQCGSLIGKAGTKIKEIRETTGAQVQVAGDLLPNSTERAVTVSGVPDAIILCVRQICAVILESPPKGATIPYHPSLSLGTVLLSANQGFSVQGQYGAVTPAEVTKLQQLSSHAVPFATPSVVPGLDPGTQTSSQEFLVPNDLIGCVIGRQGSKISEIRQMSGAHIKIGNQAEGAGERHVTITGSPVSIALAQYLITACLETAKSTSGGTPSSAPADLPAPFSPPLTALPTAPPGLLGTPYAISLSNFIGLKPMPFLALPPASPGPPPGLAAYTAKMAAANGSKKAERQKFSPY

SEQ ID NO: 15982 - DNA, 1637 bp, Homo sapiens
  CDS (175)..(948)
agcacacagctgagccctgcagatctcacagaagggaaacccacagatccctctaagctggaaagtccgtcattcacaggaactggtgacacagaaatagctcatgcaactgaggatttagagaataatggcagtaagaaagatggcgtgtgtggtcctcctccatcaaagaaaatgaagttatttggatttaaagaagatccatttgtatttattcctgaagatgacccattatttccacctattgagaaattttatgctttggatccttcattcccaaggatgaatttgttaactcggactacagaagggaagaaaaggcagctctacatggtttctaaggagttgcggaatgtgctgctgaataacagtgagaagatgaaggttattaacacagggatcaaagtctggtgtagaaataacagcgatgaagagtttgactgtgctttccggctggcacaggagggaatatatacattgtatccatttattaactcaagaattattactgtatcaatggaagatgttaagatactgttgacccaggaaaatcccttttttagaaaactcagcagtgagacctacagtcaagcaaaggacctggcaaagggaagcatcgtgctgaagtatgaaccagattctgcgaatccagacgctctgcagtgtcccatcgtcttatgcggatggcggggaaaggcctccattcgaacttttgtgcccaagaatgaacggcttcattatctcaggatgatggggctggaggtattgggagaaaagaagaaggaaggggttatcctcacaaatgagagtgcagccagcaccggacagccagacaatgacgtgactgagggacagagagcaggagagcccaacagcccagatgcagaagaggccaacagtccagacgtgacagcaggctgtgacccggcgggggtccatccaccccggtgagcaggcccaaggcagcgggggcccacacccctcacacgcaaaactggcttcttctggtcactggtgtctgaaaccaaatccagagcagcctgtggcctgtaaagcatatatttctaatgactgcagactggtgggatcataggagccttctgaatgaccaggactgctttctttggagctgatgaaaatgtactcttttagcgtgttagaaatcacttgttttattttgtttctttggccaagctgggtctagtgtttcttttgctgggaatagactttcaaaagttgtacttctatcaagaaacaaaactgcccttgcagaaatttcaggtcttttgttaagcctgtattggtcttaaggtgcagtattttttaaattattatttatagaaagaatctataaattcttggggaagtgtgttataagctttaataattacattgagctgcacctcagtggtgtgtcattaacatgcagtggggttaatatctgaggcctcagatgactttgtgccttttggaataaagggtaaaataaactctcccagagtaagagctgtatcgtgaattgtcatactaattattgagggggacttatgtgcttttattgaatggagtgctttacaatttttatttttaaatggggttgggatccttggaatatttcaataaaattgataaaatat

SEQ ID NO: 15983 - protein, 258 aa, Homo sapiens [sequence omitted]

SEQ ID NO: 15984 - DNA, 2057 bp, Homo sapiens
  CDS (412)..(1971)
aaaaaaaaaaacacaggcttgatgctcgctcccgtttctacaggaggttttgacggctggatgctgcagggcatcccctcgcctggaggaggttcacttgtggccaggttcccagcacacccacttgctcactggggccctggggacaccgccacactcgagcccatcctacggcctcaatccttaccagtccccaggccatggactgccacactgtaggtcttcaatcaaggtttagtggagtttcgaatgtacacacaccctgaaagacagcgaggccacctcagaaaacaacgcgcgcccagctggctcccctccgacagggcccacggctactgggtcggcctcctccggaccctgagcacagcctggtatgcgtgcgggctcggaatacggatctgagcagaagaaatgcgagtggagagcggttctgcgcaggaaagaggaattttgttggaaagcctgtcgacgttgctagaaaagaccacagcatctcacgaggggcgtgcgccgggaaaccgggagttgacggacctcctgccccccgaggtctgcagtctcctgaacccagcagccatctacgccaacaacgagatcagcctgcgtgacgttgaggtctacggctttgactacgactacaccctggcccagtatgcagacgcactgcaccccgagatcttcagtaccgcccgtgacatcctgatcgagcactacaagtacccagaagggattcggaagtatgactacaaccccagctttgccatccgtggcctccactatgacattcagaagagccttctgatgaagattgacgccttccactacgtgcagctggggacagcctacaggggcctccagcctgtgccagacgaggaggtgattgagctgtatgggggtacccagcacatcccactataccagatgagtggcttctatggcaagggtccctccattaagcagttcatggacatcttctcgctaccggagatggctctgctgtcctgtgtggtggactactttctgggccacagcctggagtttgaccaagcacatctctacaaggacgtgacggacgccatccgagacgtgcatgtgaagggcctcatgtaccagtggatcgagcaggacatggagaagtacatcctgagaggggatgagacgtttgctgtcctgagccgcctggtggcccatgggaaacagctgttcctcatcaccaacagtcctttcagcttcgtagacaaggggatgcggcacatggtgggtcccgattggcgccagctcttcgatgtggtcattgtccaggcagacaagcccagcttcttcactgaccggcgcaagcctttcagaaaactcgatgagaagggctcacttcagtgggaccggatcacccgcttggaaaagggcaagatctatcggcagggaaacctgtttgacttcttacgcttgacggaatggcgtggcccccgcgtgctctacttcggggaccacctctatagtgatctggcggatctcatgctgcggcacggctggcgcacaggcgccatcatccccgagctggagcgtgagatccgcatcatcaacacggagcagtacatgcactcgctgacgtggcagcaggcgctcacggggctgctggagcgcatgcagacctatcaggacgcggagtcgaggcaggtgctggctgcctggatgaaagagcggcaggagctgaggtgcatcaccaaggccctgttcaatgcgcagttcggcagcatcttccgcaccttccacaaccccacctacttctcaaggcgcctcgtgcgcttctctgacctctacatggcctccctcagctgcctgctcaactaccgcgtggacttcaccttctacccacgccgtacgccgctgcagcacgaggcacccctctggatggaccagctctgcaccggctgcatgaagacccccttccttggtgacatggcccacatccgctgagggcacctttattgtctgggacaggccctcagcccctcctgccccatccacccagacaagcaataaaagtggtctcctccctg

SEQ ID NO: 15985 - protein, 520 aa, Homo sapiens
MRVESGSAQERGILLESLSTLLEKTTASHEGRAPGNRELTDLLPPEVCSLLNPAAIYANNEISLRDVEVYGFDYDYTLAQYADALHPEIFSTARDILIEHYKYPEGIRKYDYNPSFAIRGLHYDIQKSLLMKIDAFHYVQLGTAYRGLQPVPDEEVIELYGGTQHIPLYQMSGFYGKGPSIKQFMDIFSLPEMALLSCVVDYFLGHSLEFDQAHLYKDVTDAIRDVHVKGLMYQWIEQDMEKYILRGDETFAVLSRLVAHGKQLFLITNSPFSFVDKGMRHMVGPDWRQLFDVVIVQADKPSFFTDRRKPFRKLDEKGSLQWDRITRLEKGKIYRQGNLFDFLRLTEWRGPRVLYFGDHLYSDLADLMLRHGWRTGAIIPELEREIRIINTEQYMHSLTWQQALTGLLERMQTYQDAESRQVLAAWMKERQELRCITKALFNAQFGSIFRTFHNPTYFSRRLVRFSDLYMASLSCLLNYRVDFTFYPRRTPLQHEAPLWMDQLCTGCMKTPFLGDMAHIR

SEQ ID NO: 15986 - DNA, 2291 bp, Homo sapiens
  CDS (132)..(740)
ataatccacacctactactcaatacctcagaaaatcttcgcttccctaataatgttgaaccagttacaaatcattttattacacagtggcttaatgatgttgactgtttcttggggcttcatgacagaaagatgtgtgttctcggactctgtgctcttattgatatggaacagataccccaagttttaaatcaggtttctggacagattttgccggcttttatccttttatttaacggattgaaaagagcatatgcctgccatgcagaacatgagaatgacagtgatgatgatgatgaagctgaagatgatgatgaaaccgaggaactggggagtgatgaagatgatattgatgaagatgggcaagaatatttggagattctggctaagcaggctggtgaagatggagatgatgaagattgggaagaagatgatgctgaagagactgctctggaaggctattccacaatcattgatgatgaagataaccctgttgatgagtatcagatatttaaagctatctttcaaactattcaaaatcgtaatcctgtgtggtatcaggcgctgactcacggtcttaatgaagaacaaagaaaacagttacaggacatagcaactctggctgatcaaagaagagcagcccatgaatccaaaatgattgagaagcatggaggatacaaattcagtgctccagttgtgccaagttctttcaattttggaggcccagcaccagggatgaattgagttatctctttctttcctgctgtgtgcttgtagtgaagagcttgtgttcctcctagtagtggttccagaactggttcatgttatctattctaaactaataatcaatagatggacaaaagaaacaacaaccccaggagatgggacctgatcatgcaacctggcactggaaaagaaatcagcgggattttgggggtgggggggatgggaggtaccttagagggagtattttctttattttttgaagaaagtaagatcctgactctgaagcttcaaagtgacactgtggaaatctgaaacgaggggatgtcatgaaggcagcttttctttttctgaggaaaaaataggcatgggctacaggactatttaaaatgtctcatttacagtataaaactcaaaggtagatgtaatttttacacctatgagtatttgtccaatttctgtctcttcctcaccattgggtatctattctttatatgtaaataagataaggtcatctgatagccttattcagtcttcatcattttcatcattgttcctatgtagattattggacatttattgtagcactacataactgattataaaaatctgtaaatgaattagcactttcatattgaaacaagcctgctagcctatgtataaaatagcaaaatgtttgctgtttataaaaagatgtaatggggtggggggcaggggtaatttcaagttattaatttaaaaatgaactagcaattttgtacctggtgactttgtggtgcactcacctctgatagtgacttgaattcggtatgtaaaaaggggttagtggtatttcattgctgctaaaaatgacaactccctctgtgtcctgtttttcttaaagctgtcagtgtacaagtgggtatttgaataccagaccttactgtaaaaaataaaaaaggtggtatctagagcatgtaaattggatataaagttctgctcttaaagagttgatctaagagtatggctaaacatctatatatgcaatctattaaaagaacttaattcggctattatgtcttgatttgattgcagttttttcctaattataacaaatttttcctcattggcctgtttttaatcctgtgcctagaaggagtacaaaatgcacactttacaaaattgatatttaacacttacccactcccctttccccatctcttctaccgctcttgttgatcgtggtatctgatcttgactagataggctgaaggcacatggttccctccaaaaaccactattgataccactacaaaaacaagccagcaaaaagatactgtagagaggttggcttgcttccctctcttcctaactgcatgttgaaaaataagccgttattgatcttaaacatcggtcagatgagtcatacattgggttattttttatatacatgtatacacaaaatatttcaaattgaaagcaacatcttaatggattcaaaactattacaagctgttgtctaaaacaggtgagaaaaaaatttataactgtaaaaacaaatgcacatattgatatttaaaatgcgtaatt

SEQ ID NO: 15987 - protein, 203 aa, Homo sapiens; identical to SEQ ID NO: 14454

SEQ ID NO: 15988 - DNA, 1642 bp, Homo sapiens
  CDS (60)..(1367)
gtgggttgggtagtgcgggttggggcgggggctgcggagagggtgcttaactgaggggcatgatgggggaggcggccgtggccgcggggccttgtccgttgcgcgaggacagcttcacgcgcttctcgtcgcagagcaatgtgtacgggctggcaggcggcgccggcgggcgcggggagctgctggccgccacccttaaaggcaaggtgctcggcttccgctaccaagacctccgacagaaaatccggccagtggccaaggagctgcagttcaactacattcccgtggatgcggagattgtctccatcgacactttcaacaagtcaccccccaagcggggtctggttgtggggatcacgttcatcaaggattcaggggacaagggcagccccttcctgaacatttactgcgactacgagcccggctctgagtacaaccttgactctattgcccagagctgcctgaacctggagctccagttcactccgttccagctgtgccatgcggaggtccaggtcggggatcaacttgagactgtgtttctcttgagtgggaacgacccggccattcatctctacaaggagaacgaggggctgcatcagtttgaggaacagcccgtggaaaacctcttcccagagctgacgaacctgaccagtagcgtcctctggctggacgtccacaacttccccggcacgtcccggcgcctctcagctctgggctgtcagagtggttatgtccgtgtcgcccacgtggaccagcggagtcgagaggttctgcagatgtggtcggtcctgcaggacggtcccatctcccgagtgattgtgttcagcctctcggccgccaaggagaccaaggacaggccactacaagatgagtacagcgtgctcgtggccagcatgttggagccagcagtggtgtatcgggacctgctgaaccggggtcttgaagaccagcttctcctgcctggcagtgaccagttcgacagcgtcctctgcagcctggtcaccgatgtggatttggatgggcggccagaagtcctggtggccacctatggacaggaactgctgtgttataagtaccggggcccagagtcggggcttcctgaggcccagcatgggttccatctgctgtggcagcggagcttctccagtcccctgctggccatggctcacgtggacctgaccggggatgggctgcaggagcttgccgtggtctccctgaagggcgtgcacatcctgcagcacagcctgattcaggcctcagagctggtcttgacccggcttcgacatcaagtggagcagaggagacgtcggctacaggggttggaggacggggcaggtgcagggcccgctgagaatgcagcctcttaagcacccatgcacccactcttcccagacctggggcgactcatggcgtgctcacctccagccgctggtggggggtgtcctgaaggacaggatgctctccccagacctccccagggtggtgaagctgtgccctggggccccagctaacccactcctctctctgtacgtcaatgtccctatttgaaagcagggatgatcccattccaccctgtccactctggatgagaattggccacctgatggttatttatacgtccagaagaacatcatttccc

SEQ ID NO: 15989 - protein, 436 aa, Homo sapiens
MMGEAAVAAGPCPLREDSFTRFSSQSNVYGLAGGAGGRGELLAATLKGKVLGFRYQDLRQKIRPVAKELQFNYIPVDAEIVSIDTFNKSPPKRGLVVGITFIKDSGDKGSPFLNIYCDYEPGSEYNLDSIAQSCLNLELQFTPFQLCHAEVQVGDQLETVFLLSGNDPAIHLYKENEGLHQFEEQPVENLFPELTNLTSSVLWLDVHNFPGTSRRLSALGCQSGYVRVAHVDQRSREVLQMWSVLQDGPISRVIVFSLSAAKETKDRPLQDEYSVLVASMLEPAVVYRDLLNRGLEDQLLLPGSDQFDSVLCSLVTDVDLDGRPEVLVATYGQELLCYKYRGPESGLPEAQHGFHLLWQRSFSSPLLAMAHVDLTGDGLQELAVVSLKGVHILQHSLIQASELVLTRLRHQVEQRRRRLQGLEDGAGAGPAENAAS

SEQ ID NO: 15990 - DNA, 1333 bp, Homo sapiens
  CDS (92)..(1030)
gtaaccgaaccctgagccgcctgcgcggatcggcgtccgcagcgggcggctgctgagctgccttgaggtgcagtgttggggatccagagccatgtcggacctgctactactgggcctgattgggggcctgactctcttactgctgctgacgctgctggcctttgccgggtactcagggctactggctggggtggaagtgagtgctgggtcaccccccatccgcaacgtcactgtggcctacaagttccacatggggctctatggtgagactgggcggcttttcactgagagctgcagcatctctcccaagctccgctccatcgctgtctactatgacaacccccacatggtgccccctgataagtgccgatgtgccgtgggcagcatcctgagtgaaggtgaggaatcgccctcccctgagctcatcgacctctaccagaaatttggcttcaaggtgttctccttcccggcacccagccatgtggtgacagccaccttcccctacaccaccattctgtccatctggctggctacccgccgtgtccatcctgccttggacacctacatcaaggagcggaagctgtgtgcctatcctcggctggagatctaccaggaagaccagatccatttcatgtgcccactggcacggcagggggacttctatgtgcctgagatgaaggagacagagtggaaatggcgggggcttgtggaggccattgacacccaggtggatggcacaggagctgacacaatgagtgacacgagttctgtaagcttggaagtgagccctggcagccgggagacttcagctgccacactgtcacctggggcgagcagccgtggctgggatgacggtgacacccgcagcgagcacagctacagcgagtcaggtgccagcggctcctcttttgaggagctggacttggagggcgaggggcccttaggggagtcacggctggaccctgggactgagcccctggggactaccaagtggctctgggagcccactgcccctgagaagggcaaggagtaacccatggcctgcaccctcctgcagtgcagttgctgaggaactgagcagactctccagcagactctccagccctcttcctccttcctctgggggaggaggggttcctgagggacctgacttcccctgctccaggcctcttgctaagccttctcctcactgccctttaggctcccagggccagaggagccagggactattttctgcaccagcccccagggctgccgcccctgttgtgtctttttttcagactcacagtggagcttccaggacccagaataaagccaatgatttacttgtttc

SEQ ID NO: 15991 - protein, 313 aa, Homo sapiens
MSDLLLLGLIGGLTLLLLLTLLAFAGYSGLLAGVEVSAGSPPIRNVTVAYKFHMGLYGETGRLFTESCSISPKLRSIAVYYDNPHMVPPDKCRCAVGSILSEGEESPSPELIDLYQKFGFKVFSFPAPSHVVTATFPYTTILSIWLATRRVHPALDTYIKERKLCAYPRLEIYQEDQIHFMCPLARQGDFYVPEMKETEWKWRGLVEAIDTQVDGTGADTMSDTSSVSLEVSPGSRETSAATLSPGASSRGWDDGDTRSEHSYSESGASGSSFEELDLEGEGPLGESRLDPGTEPLGTTKWLWEPTAPEKGKE

SEQ ID NO: 15992 - DNA, 2502 bp, Homo sapiens
tatgctttaactggacagaagaaatatttctcagacaatgtcgatgctgctgatgacaactgagatgcctggagctcacccttgatggagacttccttggtgattggagatgggggactctggtggcagaaatggctttggggtaggtgtgaagtcgcttcagtccctctgagttgcctcttctggatggaacgtgtgtatcaacaacaatgaaatgcacctccgtgtgcatggaggcggctgatgagaatacagataggccagtcctcgctcttccctccagaaccggccgctcccggtctgacgttggagcacgtgaactaagagtgacaattttttctacttgcttctgtgaataaagtgttctacagtcagcccagcactaaactcaccagaaaagaggagggaacagcacggagccattcatctggaattactcgatgtgcagaggctgccccttggccgcacttgggaacatcgtggacatcttccttcctctcaggctcctcctgacagactcctggcagcactggagacctcaggactatggagatcagaattgtaatggctttgtcatctcagtgtggccactcctgaggcaagaggctcctcctgggagcaggagagagagagtttgtgatgttggttggaaaataggatttatggatgcaggagggccgtgctaggcccctctgcccgcttctctccctgctgttggcggtgaccaggtctcaggagcggagacgaggctgttgtgagtgaaacagaagcccctggcatagggccagaccctaggcctgaaaaggatgcaaagcctgctgttttcaggctgttgggaagaatcgtgcgtaccgagtgattatgatgaaacgtatcccagagaggaaatgaatgggacctgaaaagtgggtctgccacatccctggtagcccgcctccaagagcactacactccccccagccccaccggccacactacatgacgtgggaaggctgtccgttcatccttaccctggggactcaagtgtgctctgcggagtgagtcacagccctgatgtgcaccctgcactactctttccccaggtgcgccggagacgcaggcttgctcatttccgtcctgacacagctcgctgttcctgcggtggtcagagtccccctgtgctgtgtcagctcctggacactactagtctttcacatgataaagcgcgagcactttttcgcttttgcagtatttggggaaattctaacacatttcccggggatttgcccaggtccctccacctcccacggtgggtaactgtgtggattctgcacctggcaatcggcgctcccctttggaaacacctgggggccctgtttcttccagcctggtccttggtttctaccccagccgctttcagccggcacctgcatgggactgcctggagggccacggtccagggaaggacaggtgggaccctgaccatgacagatctttctaaaacaataaagtcccattgatgacaactgcagtgggatgaatgccattgcagcggtcatgctgggagctgccgagagcttacaacaaaagcagttcctctcaagacactgcttgcatcttccctccacgcctctcggtgcatttggaacttgtttatgcgctggtataactcgagtcagctgcttatttctgtgcccttgcactcacaggttccttcattaacattttaaataagtggctaaaaaaactcctctggaggttgtttttgaaagagacaggaaaaagaaacacacagtacctggattgttttgacttatcttcaagcgactcagctgaaagccggtgttgcatacacaatttcctcacgctgacccagcctgactaagacttgataaaaggcacagcccttggcagcaggcagtgccaatgtggacagtgtacactaagctgtgagtgtgtgcacgggcgagcacatgtatgtgtactcatacatccagatgaactaaagggacactgggctttgtgctggcaaaggttacgatgctgctgtagcttggctgtgggccccaggcagtgtcagatggaacctgctttgatggcgtgttgttcagtgtactcagtggggtctcacatggcccgaggacccactgtgagcactccgcccgctgtggcacagaacacggctggggtcatcacagcccaggtctttattgaaaggcggctcatatagaacccatttggccaggtctgggccatctctctgcctctgccctatcttggctgcctggaggggcccaggcccaagaggattctttacccctggaagagctccccaggcattcagcctatggcccttgacatttggctgcaggttaccgtcagaatcaacaccatatcctgaggaagccctggtatttccccaagtctgcctatgtattagacactctaatcaatgctaacacagttcagtttttgagggaactagttttgtcataatactacacccctctattgtctttaaat

SEQ ID NO: 15993 - DNA, 1418 bp, Homo sapiens
  CDS (418)..(1002)
agcggccgcacgccgcggagcaggggctcggaggtcccgggattacggtgctcgagcacgctggtgggaaaggacccgggacttgaacagtgttgtgcggcgccatgcaggtctccagcctcaatgaggtgaagatttacagcctcagctgcggcaagtcccttcctgagtggctttctgataggaagaagagagcgctacagaagaaagatgtagatgtccgtaggagaattgaacttattcaggactttgaaatgcctactgtgtgtaccactattaaggtgtcaaaagatggacagtacattttagcaactggaacatataaacctcgggttcgatgttatgacacctatcaattatccttgaagtttgaaaggtgtttagattcagaagttgtcacctttgaaattttgtctgatgactactcaaagttctgaagtttataggttaaacttagaacaaggacgatacctgaatcctctacaaactgatgctgcggagaataatgtttgtgacataaattcagtgcatggcttgtttgccacaggaaccatagagggtagagtggagtgctgggacccaagaactcgaaacagagttggcctgttagactgcgccttaaacagtgtcacagcagattcagagataaacagtttaccaacaatctctgctttgaaatttaatggtgccttgaccatggcagttggaacaaccacagggcaggttttattatatgaccttcgatctgataagccattgctagttaaagatcaccagtatgggctgcccattaagtccgttcatttccaggattcattagatctgattttgtctgctgactctcgaattgtcaagatgtggaataagaactccggaaaaatatttacttccttggagccagagcatgaccttaatgatgtttgtctctaccccaactcaggcatgcttctgacggccaatgaaacccccaagatgggcatctattacattccaccttccctctgagctacagaggtacatatccaccagtctactcggcttctccacttggatgtctaatagcacatcctgtttaatgtgtctacatcagaacttctgatccagctccccacctgcaccccacctgccagggtctccatttcagctgaagccttgttgttgctcactcggctgtctaggcttagagcgcaggagccatccttgtttcctctcctctccacttcatgcctcgtcatccagtccatcagctgtttgcagattttgttccacatccagccatttctcagtgcttcccttccatcaggcctctggattactgtaatactggataactgatctttctgcttctgcttttgtctctcttgtaacctattttccatgtaacagccagactgatgtaaaatattaaaaatataaac

SEQ ID NO: 15994 - protein, 195 aa, Homo sapiens
MTTQSSEVYRLNLEQGRYLNPLQTDAAENNVCDINSVHGLFATGTIEGRVECWDPRTRNRVGLLDCALNSVTADSEINSLPTISALKFNGALTMAVGTTTGQVLLYDLRSDKPLLVKDHQYGLPIKSVHFQDSLDLILSADSRIVKMWNKNSGKIFTSLEPEHDLNDVCLYPNSGMLLTANETPKMGIYYIPPSL

SEQ ID NO: 15995 - DNA, 1380 bp, Homo sapiens
  CDS (166)..(888)
gtctctgcccatccgcgcacccgggcttcggctggagagggccagctcgcttcaggaggccgaaccccgttcccaccaaccctctcagctcagacgcggggtgctgagtcacggggggggggtggttctgtggatagttggaatgcatacacagaggaaagggggatgcggcaccagcagacagagagacaagaccccagccagcccctgtccaggcagcatggcacataccgccagatcttccatccagagcagctcatcacaggcaaggaagatgctgccaataactatgcctggggccactacaccattgggaaggagttcatcgacctgctactggaccggattcggaagctggctgaccagtgcacaggacttcagggcttcctggtgttccacagccttggtcggggcactggctctgacgtcacctcattcctgatggagtggctttctgttaactatggcaagaaatccaagctgggattctccatctacccagccccccaggtgtctacagccatggtccagccctacaactctatcctgaccacccacaccaccctggagcactcagactgtgccttcatggtggacaacaaagcaatctatgacatctgccaccgcaacctagacattgagcgcccaacctacaccaacctcaatcgcctcattagccaaattgtctcctccatcacagcttctctgcgctttgacggggccctcaatgtggacctgacagagttccagaccaacctggtgtcctacctcacatccacttccccctggccacctatgcaccagtcatctctgcagaaaaagtataccacgagcagctgtcggtggcagagattaccaatgcctgctttgagcctgccaaccagatggtgaagtgtgatccccggcacggcaagtacatggcctgctgcctgctataccatggagatgtggtgcccaaggatgtcaacgctgccattgctgccatcaagaccaagtgcagcattcagtttgtggactggtgccccacaggctttaaggttgatatcaatcaccagcctcccactgtggtgcctgggagtgacctggtaaagtgcaacgtgccatgtgcatgctgagcaacatgacagccatcactatggcctgggcccgcctggaccacaagtttgacctgatgtatgccaagagggcgtttgggcactgatatgtgggtgagggcatggaggagggtgagttctccaaggcccatgaggatatgactgccctggagaaggattacaaggaggtgggcatggatagtgtggagtgtggggaagaaaagataggggggatgaatactaggggaatactgtgtgtctgtcctacataaagtgctgtggcctt

SEQ ID NO: 15996 - protein, 241 aa, Homo sapiens
MRHQQTERQDPSQPLSRQHGTYRQIFHPEQLITGKEDAANNYAWGHYTIGKEFIDLLLDRIRKLADQCTGLQGFLVFHSLGRGTGSDVTSFLMEWLSVNYGKKSKLGFSIYPAPQVSTAMVQPYNSILTTHTTLEHSDCAFMVDNKAIYDICHRNLDIERPTYTNLNRLISQIVSSITASLRFDGALNVDLTEFQTNLVSYLTSTSPWPPMHQSSLQKKYTTSSCRWQRLPMPALSLPTRW

SEQ ID NO: 15997 - DNA, 1641 bp, Homo sapiens
  CDS (22)..(1512)
aagagaaccctcggcggcaagatggcagcggcgggcgagggcaccccgagctcccgcgggccgcgtcgggacccgcctaggcggccgccccggaacggttatggtgtctacgtatacccaaattccttctttcgatatgaaggagaatggaaagcagggaggaagcacggtcacgggaagttgttatttaaagatggcagttattacgaaggggcgtttgtggacggagagatcacgggagaaggccgccggcactgggcctggtcaggagacaccttctctggacagtttgttctgggagagcctcaaggctacggcgtcatggagtacaaagccggcggatgttatgaaggggaggtctcccacggcatgcgggaaggacacgggtttctggtggaccgggatggacaagtgtaccagggctccttccatgacaacaagaggcacggccctgggcagatgctctttcagaacggtgacaagtacgacggcgactgggtccgggaccggcgtcagggacacggggtgctgcgctgcgccgacggctccacctacaagggacagtggcacagcgacgtcttcagtggactgggcagcatggcccactgctcaggggtcacctattatgggttgtggatcaatggccacccagcagaacaagctacgaggatcgtgatcttgggtccggaggtgatggaagtggcccaagggtctcccttctcggtgaacgttcagctgctgcaggaccacggggaaattgccaagagcgagagcggccgggtcctgcagatctcagcgggcgtcagatacgtgcagctgtcagcctactctgaggtcaactttttcaaagtggacagagacaaccaagagacactcatccagaccccatttgggttcgaatgcatcccttatcctgtgtccagccccgcagctggggtgccggggcccagagctgccaagggaggggcagaagccgacgtgcccctgcccaggggagacctggagctgcatttgggtgccctccatggccaggaggacacccctggtggcctgcttgccaggggacatgcgccccattgtcccggggcctgtcagcgagtggagcagggctgtgccgagttcacagatgtcctcctggggccgcccccgcctgggtaccaccccttcctgttcctggacagcctccacaagaaggcaggcggcagatccagaggcggcctgcaccccagggggacaccacccacggcacaggagcctcctggaggcagcaggcctgaggggagagccacggaggagcaggctgcggcagcacacctaggggagtacgtgctcatgatccgcgacgtgaccaccccgccgttcctggggcgcaggctgcccccggccttcaaacacctgcgggtcgtagcgaagagggctggccagccaccccatgtcctggaagaaggccctgaagcctcaagcagctggcaggccgcccacagctgcaccccagagccgccagcgcctcggtgaggccccgtgtccacaggaggccacctcggtgtgaatggaaggaaacgctgcctctgcttgcgtgactctgctccccgattctccagagccccgtggttgctggcttgaataaaatgctcagtggcg

SEQ ID NO: 15998 - protein, 497 aa, Homo sapiens
MAAAGEGTPSSRGPRRDPPRRPPRNGYGVYVYPNSFFRYEGEWKAGRKHGHGKLLFKDGSYYEGAFVDGEITGEGRRHWAWSGDTFSGQFVLGEPQGYGVMEYKAGGCYEGEVSHGMREGHGFLVDRDGQVYQGSFHDNKRHGPGQMLFQNGDKYDGDWVRDRRQGHGVLRCADGSTYKGQWHSDVFSGLGSMAHCSGVTYYGLWINGHPAEQATRIVILGPEVMEVAQGSPFSVNVQLLQDHGEIAKSESGRVLQISAGVRYVQLSAYSEVNFFKVDRDNQETLIQTPFGFECIPYPVSSPAAGVPGPRAAKGGAEADVPLPRGDLELHLGALHGQEDTPGGLLARGHAPHCPGACQRVEQGCAEFTDVLLGPPPPGYHPFLFLDSLHKKAGGRSRGGLHPRGTPPTAQEPPGGSRPEGRATEEQAAAAHLGEYVLMIRDVTTPPFLGRRLPPAFKHLRVVAKRAGQPPHVLEEGPEASSSWQAAHSCTPEPPAPR

SEQ ID NO: 15999 - DNA, 1849 bp, Homo sapiens
  CDS (16)..(1572)
gaaacaattgctgccatgaaagaagaagagaagctcaaagtggacaaaatggcccatgacttagaaattaagtggactgaaaatcttagacaagagtgttctaaacttcgtgaagagttaaggcttcaacatgaagaggataagaagtcagcaatgtctcaacttttgcagttgaaagatcgagagaaaaatgcagcaagagattcatggcagaagaaagtagaagatctcttaaaccagatttccttgctgaaacagaatctggagatacagctttcccagtctcagacttctttgcaacaactgcaagcccagtttacgcaagaacgacagcggcttacgcaagagcttgaagaattagaggagcaacatcagcaaagacacaaatcattaaaagaagcacatgtccttgcatttcaaactatggaagaggaaaaggaaaaggagcaaagagctcttgaaaatcatttacaacagaagcattctgcagagcttcaatcactaaaagatgcacacagagagtcaatggagggcttccggatagaaatggaacaggaacttcagactcttcggtttgaattagaagatgaaggaaaggctatgcttgcttccttgcgctcagaactcaaccatcaacatgcagctgcaattgatttgttacggcataatcatcatcaagaattggcagctgctaaaatggaattagagagaagcatagacatcagcagaagacagagtaaggagcacatatgtagaattacagatctacaagaggaattaagacacagagagcatcacatctctgaattggataaggaggttcagcaccttcatgagaatataagtgccctaaccaaagaactggaatttaaggggaaagaaattctcagaatacgaagtgaatctaaccaacagataaggttgcatgaacaagatttaaacaagagacttgaaaaagagttggatgtcatgacagcagaccacctcagagagaaaaatatcatgcgggcagattttaataagactaacgagctactcaaggaaataaatgccgctttacaagtgtcattagaagaaatggaagaaaaatatctaatgagagaatcaaaaccagaagatatacagatgattacagaattaaaagccatgcttacagaaagagaccagatcataaagaaactaattgaggataataagttttatcagctggaattagtcaatcgagaaactaacttcaacaaagtgtttaactcaagtcctactgttggtgttattaatccattggctaagcaaaagaagaagaatgataaatcaccaacaaacaggtttgtgagtgttcccaatctaagtgctctggaatctggtggagtgggcaatggacatcctaaccgcctggatcccattcctaattctccagtccacgatattgagttcaacagcagcaaaccacttccacagccagtgccacctaaagggcccaagacatttttgagtcctgctcagagtgaagcttctccagtggcttctccagatccccagcgccaggagtggtttgcccggtacttcacattctgaaagaattgtgttggcacagctctgtatagactgttactaagagcatgactttatacagattgttatgtaaataggctttcctatgtcaaacactgtgaatgagaaagtatttgtctctccaacttgaaaatgcactgtatttcctgtgatatttattggaatcattctataaggtactatattatgtgtgtaattataactgttatttttatttgagatggaagagtctttaacctttgtaattactgcataataaattttgttagaatcaaac

SEQ ID NO: 16000 - protein, 519 aa, Homo sapiens
MKEEEKLKVDKMAHDLEIKWTENLRQECSKLREELRLQHEEDKKSAMSQLLQLKDREKNAARDSWQKKVEDLLNQISLLKQNLEIQLSQSQTSLQQLQAQFTQERQRLTQELEELEEQHQQRHKSLKEAHVLAFQTMEEEKEKEQRALENHLQQKHSAELQSLKDAHRESMEGFRIEMEQELQTLRFELEDEGKAMLASLRSELNHQHAAAIDLLRHNHHQELAAAKMELERSIDISRRQSKEHICRITDLQEELRHREHHISELDKEVQHLHENISALTKELEFKGKEILRIRSESNQQIRLHEQDLNKRLEKELDVMTADHLREKNIMRADFNKTNELLKEINAALQVSLEEMEEKYLMRESKPEDIQMITELKAMLTERDQIIKKLIEDNKFYQLELVNRETNFNKVFNSSPTVGVINPLAKQKKKNDKSPTNRFVSVPNLSALESGGVGNGHPNRLDPIPNSPVHDIEFNSSKPLPQPVPPKGPKTFLSPAQSEASPVASPDPQRQEWFARYFTF

SEQ ID NO: 16001 - DNA, 1596 bp, Homo sapiens
  CDS (128)..(1483)
attgggctgtcagtcagaggcggcgtggagatcgctgggagcggttgcggcgtgccgggagctgagttatagctgtgacttctgccctgccaggccgcacacaagctggctgacccggtttgtaaaaatggaatttcaagcagtagtgatggcagtaggtggaggatctcggatgacagacctaacttccagcattcccaaacctctgcttccagttgggaacaaacctttaatttggtacccattgaacctgcttgagcgtgttggatttgaagaagtcattgtggttacaaccagggatgttcaaaaggctctatgtgcagaattcaagatgaaaatgaagccagatattgtgtgtattcctgatgacgctgacatgggaactgcagattctttgcgctacatatatccaaaacttaagacagatgtgctggtgctgagctgtgatctgataacagacgttgccttacatgaggttgtggacctgtttagagcttatgatgcatcacttgctatgttgatgagaaaaggccaagatagcatagaacctgttcccggtcaaaaggggaaaaaaaaagcagtggagcagcgtgacttcattggagtggacagcacaggaaagaggctgctcttcatggctaatgaagcagacttggatgaagagctggtcattaagggatccatcctacagaagcatcctagaatacgtttccacacgggtcttgtggatgcccacctctactgtttgaaaaaatacatcgtggatttcctaatggaaaatgggtcaataacttctatccggagtgaactgattccatatttagtgagaaaacagttttcctcagcttcctcacaacagggacaagaagaaaaagaggaggatctaaagaaaaaggagctgaagtccttagatatctacagttttataaaagaagccaatacactgaacctggctccctatgatgcctgctggaatgcctgtcgaggagacaggtgggaagacttgtccagatcacaggtgcgctgctatgtccacatcatgaaagaggggctctgctctcgagtgagcacactgggactctacatggaagcaaacagacaggtgcccaaattgctgtctgctctctgtccagaagaaccaccagtccattcgtcagcccagattgtcagcaaacacctggttggagttgacggcctcattgggccagagacacagattggagagaagtcatccattaagcgctcagtcattggctcatcctgtctcataaaagatagagtgactattaccaattgccttctcatgaactcagtcactgtggaggaaggaagcaatatccaaggcagtgtcatctgcaacaatgctgtgatcgagaagggtgcagacatcaaggactgcttgattggaagtggccagaggattgaagccaaagctaaacgagtgaatgaggtgatcgtggggaatgaccagctcatggagatctgagttctgagcaagtcagactccttccttttggcctccaaagccacagatgttggccggcccacctgtttaactctgtatttatttcccaataaagaagggcttccaaaggc

SEQ ID NO: 16002 - protein, 452 aa, Homo sapiens [sequence omitted]

SEQ ID NO: 16003 - DNA, 1784 bp, Homo sapiens
  CDS (238)..(1080)
tttgaaaagctacagtttttgctccaacagaatccctttcctccagagacttttggcaacctgttgctgctctactgtaaatatgagtattttgacctggcagcagatgtcctggcagaaaatgcccatttgacgtataagttcctcacaccctatctctatgacttcttagatgccctgatcacttgccagacagctcctgaagaggctttcattaagcttgatgggctagcagggatgctgactgagcagcttcggagactcaccaagcaagtacaggaagcaagacacaacagggatgatgaagctatcaaaaaggcagtgaatgaatatgatgaaaccatggagaaatacattcctgtgttgatggctcaggcaaaaatctactggaatcttgaaaattatccaatggtggaaaagatcttccgcaaatctgtggaattctgtaacgaccatgatgtgtggaagttgaatgtggctcatgttctgttcatgcaggaaaacaaatacaaagaagccattggtttctatgaacccatagtcaagaagcattatgataacatcctgaatgtcagtgctattgtactggctaatctctgtgtttcctatattatgacaagtcaaaatgaagaagcagaggagttgatgaggaagattgaaaaggaggaagagcagctctcttatgatgacccaaataggaaaatgtaccatctctgcattgtgaatttggtgataggaactctttattgtgccaaaggaaactatgagtttggtatttctcgagttatcaaaagcttggagccttataataaaaagctgggaacagatacctggtattatgccaaaagatgcttcctgtccttgttagaaaacatgtcaaaacacatgatagtcattcatgacagtgttattcaagaatgtgtccagtttttaggacactgtgaactttatggcacaaacatacctgctgttattgaacaacccctcgaagaagaaagaatgcatgttgggaagaatacagtcacagatgagtccagacaattgaaagctttgatttatgagattataggatggaataagtagttatgactgatagtggcttttttcaaaatggctttcttacgtaccacacttttttttatctgtatttagccttggcatctttatatttgtcttattttgaatcttatccactttgtaagaacaagtttatgtttgagcaactttttcatttaatccagaagggtagggactatgcagtgtaagctgcatcacttctgctttcttcctactagtgacaatcatctggtcttgccctcaagcaacaattgctagagtaacatctttgtataagcaagtaaccccagatagagttgacgtttcagctttgggctgtcaaaagggtatgtcatggaccaaagcactgttagtacgggtatgtttgcatttggtcactgatatgtaaatgactgctagcccacggctggaccacttctcaatcagcaaataaagccatgtctattttgctatctcagcatagactatgctgtctgataaatctaattcttaactctatttctccagttttttagtcctttaactttctggattgcaacgaagtctagtttagacctctaagcccttttagaagtacaagtataatgggaatttcttttcttggttcttttcaggttatgaggtttggtcagtgacaaaattttttttcataatttggttgattggttgcttcttaagttttataataaacgtttttcttcatgttc

SEQ ID NO: 16004 - protein, 281 aa, Homo sapiens
MLTEQLRRLTKQVQEARHNRDDEAIKKAVNEYDETMEKYIPVLMAQAKIYWNLENYPMVEKIFRKSVEFCNDHDVWKLNVAHVLFMQENKYKEAIGFYEPIVKKHYDNILNVSAIVLANLCVSYIMTSQNEEAEELMRKIEKEEEQLSYDDPNRKMYHLCIVNLVIGTLYCAKGNYEFGISRVIKSLEPYNKKLGTDTWYYAKRCFLSLLENMSKHMIVIHDSVIQECVQFLGHCELYGTNIPAVIEQPLEEERMHVGKNTVTDESRQLKALIYEIIGWNK

SEQ ID NO: 16005 - DNA, 1975 bp, Homo sapiens
  CDS (317)..(1333)
acgaataacaactgcagccgctctgtctctcaataaggctacacgctccaatgtccgggtgacagtgacagcaacagcagtcatcatcaacctcgtggtcatcctcatcctggacgagatctacggcgctgtggccaagtggctcaccaaaattgaggttccgaaaacagaacagacttttgaagagcgcctgatcctcaaagctttcttgctcaagtttgtcaatgcctactcccccatcttctatgtggcctttttcaaagggaggtttgtgggcaggcctggaagctacgtctatgtattcgatggttaccgcatggaagagtgtgctccagggggctgtctcatggagctctgcattcagctcagcatcatcatgttggggaagcagttgatccagaacaacatctttgagattggagtcccgaagctaaagaaactatttcgaaagctgaaagatgagaccgaagctggagaaactgactctgcccattcgaaacatccagagcagtgggacctagactacagcttggaaccatacacaggactgactccggagtacatggaaatgatcatccagtttggttttgtcaccctcttcgtggcctcctttcccctggcacctgtgtttgccctcctcaacaacgtcattgaagtgcggctcgatgcaaagaagtttgttacagagctgagacggccggatgctgtaagaaccaaagatatcggaatctggtttgacattctctctggaattggcaagttctctgttatcagcaacgcttttgtcattgcgatcacctccgactttatcccccgcctggtgtaccagtactcctacagtcacaatgggactctgcacggctttgtcaaccacactctctcctttttcaacgtcagccagctgaaggaggggacgcagccagaaaactcacagtttgaccaggaggttcagttctgcaggtttaaggattaccgagagccgccatgggccccgaacccttatgagttttcgaaacagtactggtttattctgtccgcccgtctggcttttgtcataatcttccagaacctcgtgatgttcctgagcgtcctcgtggactggatgattccagacatccccacggacatcagcgaccagatcaagaaagagaagagcttattagtggatttcttcctgaaagaggagcatgagaagctcaagctgatggatgagccggctctgaggagcccaggaggtggggatcgaagcaggagccgggcagccagctcagcaccttcaggccaaagccagctgggcagcatgatgtcgtcaggctctcagcacaccaatgtgtgagcagttcagcctgcagcagaggagggcacggcagcagagacacgcacatgcacgtaagcatgttcctacacccacatggcgtgctgtctgtctgcaggggcctggcttgatggggtcttgaagagggggcagtgtgtaaaaagaaagagcctgacagaatgagtgtaggaaggaagagaaatgatgctacatctcagaaacttcaagcttaagtttcttttaggtcccctcttaagctgcatccttttgagggattggaaccccactggggtctctccaccccagagtctcaggcaccgcgagcattcccatgtaccctggggcaccctcttgtacttcaccatcatttctgactttgaccagctgtaagagaaatgcagtcaggagcacagcatcccctacttactatcactacaagaaaactgagtcacttgcagtggggctgccacagtctcagcagatgcaaattaagttacaaggctgaatggtgcagccgctggacctgatagtaaggtgcaaaggtccaaacctgggcttgtctccacttcacgtcacaaaaacgtttggagctaaatgcagataaccatcattttatgaaagttcagatttaaaataataaaataaatggacacattcttt

SEQ ID NO: 16006 - protein, 339 aa, Homo sapiens
MEECAPGGCLMELCIQLSIIMLGKQLIQNNIFEIGVPKLKKLFRKLKDETEAGETDSAHSKHPEQWDLDYSLEPYTGLTPEYMEMIIQFGFVTLFVASFPLAPVFALLNNVIEVRLDAKKFVTELRRPDAVRTKDIGIWFDILSGIGKFSVISNAFVIAITSDFIPRLVYQYSYSHNGTLHGFVNHTLSFFNVSQLKEGTQPENSQFDQEVQFCRFKDYREPPWAPNPYEFSKQYWFILSARLAFVIIFQNLVMFLSVLVDWMIPDIPTDISDQIKKEKSLLVDFFLKEEHEKLKLMDEPALRSPGGGDRSRSRAASSAPSGQSQLGSMMSSGSQHTNV

SEQ ID NO: 16007 - DNA, 1872 bp, Homo sapiens
  CDS (105)..(1634)
gacggcgagaccccgccccatccccgactgcctgaaccgcgccaggagacggaccgcaagtccagcgtacccacagacgactcaggcgggagacgagcggtgtcatggccgccgacagtgacgatggcgcagtttcagctcccgcagcttccgacggtggtgtcagcaaaagcacaacatctggggaggagctagtagtccaggttcccgtagtggatgtgcaaagcaacaacttcaaggagatgtggccatccctcctgctagccataaagacagctaatttcgtggctgtggacacggagctgagtgggcttggggacaggaagagtttgctgaaccagtgcattgaggaacgttacaaggccgtgtgtcatgctgccaggacccgttctatcctttccctgggcctcgcctgcttcaagcggcagccagacaagggtgaacattcctatctggctcaagtgttcaatctcactctgctgtgcatggaggagtatgtcatagaaccaaagtctgtgcagttcctgatacagcatggcttcaacttcaaccagcagtatgcccaaggcatcccctaccataagggcaatgacaagggtgatgagagccagagccagtcagtacggaccctattcctggagctaatccgagcccgccggcctctggtgctacacaatggccttatagacttggtgttcctgtaccagaacttctatgcacacctccctgagagtctgggaaccttcaccgctgacctgtgtgagatgttcccagcaggcatttatgacaccaaatatgctgctgagtttcgtgcccgtttcgtggcctcctacttagaatatgccttccggaaatgtgaacgggaaaatgggaagcagcgggcagctggcagcccacaccttaccctggagttctgcaactatccttccagcatgagggaccatattgattaccgctgctgcctgcccccagcaacccaccgtcctcatcccaccagcatctgtgacaacttctcggcttatggctggtgccccctgggaccacagtgtcctcagtctcacgatattgaccttatcattgacactgatgaggctgcggcagaggacaagcggcgacggcgacgacgtagggaaaaacggaagagggctttattgaacctaccggggacacagacctctggggaagctaaggatggtcctcccaagaagcaggtctgtggggatagcatcaagcctgaagaaaccgagcaggaggtggctgccgatgaaactaggaacctgcctcactccaagcaaggcaacaaaaatgacttagagatggggattaaggcagcaaggcctgaaatagctgatagagctacctcagaagtgccagggagccaagccagtcctaacccagtgcctggggatggattgcaccgggctggttttgatgcctttatgacaggttatgtgatggcctatgtggaagtgagccagggaccgcagccctgcagctctggaccctggctccctgaatgccacaataaggtatatttgagtggcaaagctgtacccctcacagtggccaagagccagttctctcgttcctccaaagcccacaatcagaagatgaagctcacttggggcagtagctgatgcaacttccaccttgctctcaggtggaacagaggtattttgggtctctctagcctgaaatgtcatcctcaactgctactgagtttaggggagggggaatgtcttgacagacatcactgcattgccctggaccgcctcctttatcccagtgtttgaggtacaagtaagaaggctgaccagcacctgtaacactgactttatttttaagtctgaaaatgtcttgggaaagttttac

SEQ ID NO: 16008 - protein, 510 aa, Homo sapiens
MAADSDDGAVSAPAASDGGVSKSTTSGEELVVQVPVVDVQSNNFKEMWPSLLLAIKTANFVAVDTELSGLGDRKSLLNQCIEERYKAVCHAARTRSILSLGLACFKRQPDKGEHSYLAQVFNLTLLCMEEYVIEPKSVQFLIQHGFNFNQQYAQGIPYHKGNDKGDESQSQSVRTLFLELIRARRPLVLHNGLIDLVFLYQNFYAHLPESLGTFTADLCEMFPAGIYDTKYAAEFRARFVASYLEYAFRKCERENGKQRAAGSPHLTLEFCNYPSSMRDHIDYRCCLPPATHRPHPTSICDNFSAYGWCPLGPQCPQSHDIDLIIDTDEAAAEDKRRRRRRREKRKRALLNLPGTQTSGEAKDGPPKKQVCGDSIKPEETEQEVAADETRNLPHSKQGNKNDLEMGIKAARPEIADRATSEVPGSQASPNPVPGDGLHRAGFDAFMTGYVMAYVEVSQGPQPCSSGPWLPECHNKVYLSGKAVPLTVAKSQFSRSSKAHNQKMKLTWGSS

SEQ ID NO: 16009 - DNA, 2399 bp, Homo sapiens
  CDS (47)..(1909)
gctaagaaggggagactgaggctgaggctggggaacatcgggcagcatgagcggctgcgggctcttcctgcgcaccacggctgcggctcgtgcctgccggggtctggtggtctctaccgcgaaccggcggctactgcgcaccagcccgcctgtacgagctttcgccaaagagcttttcctaggcaaaatcaagaagaaagaagttttcccatttccagaagttagccaagatgaacttaatgaaatcaatcagttcttgggacccgtggaaaaattcttcactgaagaggtggactcccgaaaaattgaccaggaagggaaaatcccagatgaaactttggagaaattgaagagcctagggctttttgggctgcaagtcccagaagaatatggtggcctgggcttctccaacaccatgtactcacgactaggggagatcatcagcatggatgggtccatcactgtgaccctggcagcgcaccaggctattggcctcaaggggatcatcttggctggcactgaggagcagaaagccaaatacttgcctaaactggcgtccggggagcacattgcagccttctgcctcacggagccagccagtgggagcgatgcagcctcaatccggagcagagccacactaagtgaagacaagaagcactacatcctcaatggctccaaggtctggattactaatggaggactggccaatatttttactgtgtttgcaaagactgaggtcgttgattctgatggatcagtgaaagacaaaatcacagcattcatagtagaaagagactttggtggagtcactaatgggaaacccgaagataaattaggcattcggggctccaacacttgtgaagtccattttgaaaacaccaagatacctgtggaaaacatccttggagaggtcggagatgggtttaaggtggccatgaacatcctcaacagcggccggttcagcatgggcagcgtcgtggctgggctgctcaagagattgattgaaatgactgctgagtacgcctgcacaaggaaacagtttaacaagaggctcagtgaatttggattgattcaggagaaatttgcactgatggctcagaaggcttacgtcatggagagtatgacctacctcacagcagggatgctggaccaacctggctttcccgactgctccatcgaggcagccatggtgaaggtgttcagctccgaggccgcctggcagtgtgtgagtgaggcgctgcagatcctcgggggcttgggctacacaagggactatccgtacgagcgcatattgcgtgacacccgcatcctcctcatcttcgagggaaccaatgagattctccggatgtacatcgccctgacgggtctgcagcatgccggccgcatcctgactaccaggatccatgagcttaaacaggccaaagtgagcacagtcatggataccgttggccggaggcttcgggactccctgggccgaactgtggacctggggctgacaggcaaccatggagttgtgcaccccagtcttgcggacagtgccaacaagtttgaggagaacacctactgcttcggccggaccgtggagacactgctgctccgctttggcaagaccatcatggaggagcagctggtactgaagcgggtggccaacatcctcatcaacctgtatggcatgacggccgtgctgtcgcgggccagccgctccatccgcattgggctccgcaaccacgaccacgaggttctcttggccaacaccttctgcgtggaagcttacttgcagaatctcttcagcctctctcagctggacaagtatgctccagaaaacctagatgagcagattaagaaagtgtcccagcagatccttgagaagcgagcctatatctgtgcccaccctctggacaggacatgctgaggcaggggacagtgtcccctgctaccgcctgcccctacccatggcccgttgctggatgactgttactcttttttcagaaggtgttgggattatcacaggttaagccttttgttccccgtctgcacctgaagggttgtcgcctggcctgggagagcctcttccaggttttgacctgcaggcagtgctctctaacaggaccatcacagcttctgaactgagccagagagagaatggaattgctgacccctggaactggcgggtattctggtcattgaggagacaccatagtggaaactggggcttatgctgctgcctccagggtgtgaggtgggtggggacctgtgtcaggtgtggatagccatttctgctcaaccacacattctctaagaaacagcttgaaagctctgtctgggtcattcatttaaactagaagcagaggcacttaaaacatgtaccaggaaccatttaacaaagaatataaaatgtc

SEQ ID NO: 16010 - protein, 621 aa, Homo sapiens
MSGCGLFLRTTAAARACRGLVVSTANRRLLRTSPPVRAFAKELFLGKIKKKEVFPFPEVSQDELNEINQFLGPVEKFFTEEVDSRKIDQEGKIPDETLEKLKSLGLFGLQVPEEYGGLGFSNTMYSRLGEIISMDGSITVTLAAHQAIGLKGIILAGTEEQKAKYLPKLASGEHIAAFCLTEPASGSDAASIRSRATLSEDKKHYILNGSKVWITNGGLANIFTVFAKTEVVDSDGSVKDKITAFIVERDFGGVTNGKPEDKLGIRGSNTCEVHFENTKIPVENILGEVGDGFKVAMNILNSGRFSMGSVVAGLLKRLIEMTAEYACTRKQFNKRLSEFGLIQEKFALMAQKAYVMESMTYLTAGMLDQPGFPDCSIEAAMVKVFSSEAAWQCVSEALQILGGLGYTRDYPYERILRDTRILLIFEGTNEILRMYIALTGLQHAGRILTTRIHELKQAKVSTVMDTVGRRLRDSLGRTVDLGLTGNHGVVHPSLADSANKFEENTYCFGRTVETLLLRFGKTIMEEQLVLKRVANILINLYGMTAVLSRASRSIRIGLRNHDHEVLLANTFCVEAYLQNLFSLSQLDKYAPENLDEQIKKVSQQILEKRAYICAHPLDRTC

SEQ ID NO: 16011 - DNA, 1346 bp, Homo sapiens
  CDS (65)..(664)
agcggaggaggaagctgagcagggcggcggcggcggtggaacctgcggggctggggcgcgcgccatgggccgcctgcactgcactgaggacccggtgccggaggccgtgggcggcgacatgcagcagctgaaccagctgggcgcgcagcagttctcagccctgacagaggtgcttttccacttcctaactgagccaaaagaggtggaaagatttctggctcagctctctgaatttgccaccaccaatcagatcagtcttggctccctcagaagcatcgtgaaaagcctccttctggttccaaatggtgctttgaagaagagtctcacagccaagcaggtccaggcggatttcataactctgggtcttagtgaggagaaagccacttacttttctgaaaagtggaagcagaatgctcccacccttgctcgatgggccataggtcagactctgatgattaaccagctcatagatatggagtggaaatttggagtgacatctgggagcagcgaattggagaaagtgggaagtatatttttacaactaaagttggtggttaagaaaggaaatcaaaccgaaaatgtgtatatagaattaaccttgcctcagttctacagcttcctgcacgagatggagcgagtcagaaccagcatggagtgtttctgctgatttctgtccctgcatctcccctggccccgttccctgccctcctcccttccctgggtgactgctctgagaggcacttcactcacaggcctgtgggatgctccatggggccctgctggctccatggggcccaggtgcaaagggtttctgaaaaacagcaggattaagtactgaaagagcccaacacaattaccctgtaaactctctgttagggcaaccaccaccacctgtcttccaggacacatttttagatactctgacaggccactgcatctcagattcaggggagaaaataagttgtcacctccccttcaaagttccagagtaaacaaatggtgccatcattcaagataacatgctgatcaccctcctcccaaaaagcaagagcttgtttatggctgaggaatcggcggattgtctgaatgacacatatacagagcccccacggatttctgcacactctgggtctgtgctggtggaacattgccaatcagttcttaatgaggcacctgtgtgtaaatacatgcttggtcttctctgcagagaactgaggctaaactctgtccctacttctggttttgccctgtcatgtcgtaacgaggtgggccttttgaggccattttagtttgagttcgagccaaccacctctgttggttagatgatgaataaaaaggttctgaag

SEQ ID NO: 16012 - protein, 200 aa, Homo sapiens
MGRLHCTEDPVPEAVGGDMQQLNQLGAQQFSALTEVLFHFLTEPKEVERFLAQLSEFATTNQISLGSLRSIVKSLLLVPNGALKKSLTAKQVQADFITLGLSEEKATYFSEKWKQNAPTLARWAIGQTLMINQLIDMEWKFGVTSGSSELEKVGSIFLQLKLVVKKGNQTENVYIELTLPQFYSFLHEMERVRTSMECFC

SEQ ID NO: 16013 - DNA, 1596 bp, Homo sapiens
  CDS (67)..(807)
aaaaaccttcagaggagtctcagaaaggacacggctggctgcttttctcagcgccgaagccgcgccatgctcgtcctcagaagcgccctgactcgggcgctggcctcacggacgctggcgcctcagatgtgctcatcttttgctacgggacccagacaatacgatggaatattctatgaatttcgttcttattaccttaagccctcaaagatgaatgagttcctggaaaattttgagaaaaacgctcatcttcggacagctcactctgaattggttggatactggagtgtagaatttggaggcagaatgaatacagtgtttcatatttggaagtatgataattttgctcatcgaactgaagttcagaaagccttggccaaagataaggaatggcaagaacaattcctcattccaaatttggctctcattgataaacaagagagtgagattacttatctggtaccatggtgcaaattagaaaaacctccaaaagaaggagtctatgaactggccacttttcagatgaaacctggtgggccagctctgtggggtgatgcatttaaaagggcagttcatgctcatgtcaatctaggctacacaaaactagttggagtgttccacacagagtacggagcactcaacagagttcatgttctttggtggaatgagagtgcagatagtcgtgcagctgggagacataagtcccatgaggatcccagagttgtggcagctgttcgggaaagtgtcaactacctagtatctcagcagaatatgcttctgattcctacatcgttttcaccactgaaatagttttctactgaaatacaaaacatttcattaactgctataggatctgtctgctaatggtgcttaaattctcccaagaggttctcacttttatttgaaggaggtggtaagttaatttgctatgtttcttgcattatgaaggctacatctgtgctttgtaagtaccacttcaaaaaatagttctgtttactttctgcatggtatttcagtgtctgtcatacattaaaaatacttgtcactgttttaagatcttgactcttcatttgtttcagaatagctcttctactgtattctgacaactctttgctttatagcattttgttgtattcaaatgataatggtagcatttccatgcttgtgacagcatttttaagttattaatatattttatcaacctttccatcatgtctgttttcctggttttttttggttgttttttgaccagtaaaatttattttgtaataccaaataggatttaagaaaattaacgtatttctttactatggaaaaccacattgtcatttgtgacatcatctatattaaatatggttttcacattagttatttgtcacttacttggaaaatgatgctgttaggtcctggtattaaaaatctagaaaagacttgttggtttatgtgctgaaatgtctttatttataattaattttaactactatttacttcatttcggatcctgtttaacaaagatacttgagacatccatttgttttaatgaaatctgtatggatatggaaatgcttgccctaataaaagcctacatataccttc

SEQ ID NO: 16014 - protein, 247 aa, Homo sapiens [sequence omitted]

SEQ ID NO: 16015 - DNA, 1438 bp, Homo sapiens
  CDS (295)..(669)
agtgcgcacgctccgactcggccgtggcggacctgactaaaggaggccgcggacctgactgaaggaggccacggccacttctggttggcctcggggcgcgctggctcggctcttcctccgccctcgaggcccccgcagtcccatcattcagttccgtagggtcaccggcgcggcagtggcctcgcagggcgctgggtccctctccccagctctcctccccctggccccgtcgccccgccctcgccgggctgggctgcggggtcaggggccgagcggagagggttatcatttaacatggaagaagatgagttcattggagaaaaaacattccaacgttattgtgcagaattcattaaacattcacaacagataggtgatagttgggaatggagaccatcaaaggactgttctgatggctacatgtgcaaaatacactttcaaattaagaatgggtctgtgatgtcacatctaggagcatctacccatggacagacatgtcttcccatggaggtgaagtcttgctctgtcacccaggctggagtgcagttgcgtgatctcagctcactgcaacctccgccttctgggttcaagcagttctcctgcctcagccttccgagtaactgggactacaggggttcaccactacacctggctaattttttgtatttttagtagagataaggtttcaccatgttggtcaggctggtcttgaactcctgacatcaagtaatccatccgcctcagcctcccaaagtgctgagattacaggcatgagccactgtgcctggccctgagcttaaaataaaagttaaattaaaaaaaaaataatgttgatgttttcatttttgcaatcaatagcttagttagactcaaattgcaaactgtcattgcctgtagtaggcagtggcatagaactcaattcagctcttttaacctgagttttaagctgctttcagattgccccacacatacatggttcaggagtcagccagagacttgggctgagtttaaacatagaatctggggttgtcctcttctggctgtcttctttcttgggcatctgcatcattctctagcacctatggtttttccaggctctttcccccagtttcctccagtcagaaagatggcaagagtttttgctgcctgccctcccccagtccttgtgccaacaccaccaccattgcagctgcctccagggaaaaactgcaaaaaccaaatcacttgctccaggtgttgactcctcttcaaaatctatttttgttaaatctccaaagcctcaaataggttttcttcctagaatttatatctgttatttgtagcaggattggtctgtaaggcactcagtcttctacatcatgggtcagcagattacagcccttgggttaaatccagccacctgcttgttttattaataaagttttgttggaactaaacc

SEQ ID NO: 16016 - protein, 125 aa, Homo sapiens
MEEDEFIGEKTFQRYCAEFIKHSQQIGDSWEWRPSKDCSDGYMCKIHFQIKNGSVMSHLGASTHGQTCLPMEVKSCSVTQAGVQLRDLSSLQPPPSGFKQFSCLSLPSNWDYRGSPLHLANFLYF

SEQ ID NO: 16017 - DNA, 2255 bp, Homo sapiens
  CDS (257)..(1360)
agctggacggccccgggaggccgcagaccgccgggctccccgaggacacctcgcaccggaggaggagaggaggcagcgcccggccaggctgggagcacctacggccgcgcgggggcgggagccaggtggcctcggcgcgcccgcctcgcccgggcaccgagcaggaagtggctgcggcgcggcctcctcgcggtgcaacagggcggggaggcggccgcagcccgagccggagcccgagcgccgggagcgagacctcatggcagcggtggcgcccgcgggccccggggactccgcctcggccgccctggacgagctgtcactgaatttcacgtacggggcaccaggcgccggcaacggctccctctcgggcgactggtaccgcaggaaccagattcacctttttggagttttgctggctattttaggaaacttggtgatcagtatttctctaaatattcagaaatattctcaccttcagctggcacaacaagagcacccaaggccatacttcaagagtgtgctgtggtggggtggtgtcctgctgatggccgtgggagagacggggaactttgcagcctatggatttgctcccattactctgatcgctccgttaggctgtgtgtctgttacaggtagtgccattatttctgttacatttctgaaagacaatttgagagcctcagacttactcggtacgacactggcatttgcaggaacatatttactggtgaactttgctccaaatataactcaggcaatctcagcaagaacagtacagtattaccttgtcggatggcagttcctgatctatgtgattttagaaatattaattttctgcattctcctgtatttctataaaagaaaaggaatgaagcatatggtgattctgctaaccctggtggcaattctagcctcattgactgttatttcagtaaaggccgtctcaggcatgatcactttttctgtgatggataaaatgcaactaacttaccccattttctatatcatgtttatcatcatgatagcatcttgtgttttccaagtcaagttcctgaatcaagccacgaaactctacaatacgacaacagtggtgccagttaatcatattttctttacaatcagtgccatcattgcaggtatcatattttatcaggaattccttggtgctccttttctcactgtatttatatatctttttgggtgttttctgtcattccttggtgtatttttggtcacaagaaatcgagaaaaggaacatctgcaacagtcttatattgattttggaaatattcctgacacaaccccagagagaaaggcttggagggaaacaaatgttggacaaaatacaaccagattcacatagcttatcctatggaactttgcctgatggaagtgactcaacaaagagccaaagtggagagaagaaagaggtctaaatgctgagaaggatggctgttggcctgttattcgataccacctttttaaaaaattgcacatgttcaatttgtgtcagcagctcttttataagctaacatgtgctagcattcatttcagtcctttcccccacctcagcgtctatggacaatcggggacttcctaagctctgacagtctaatatttccatggaatgtgatttggagtgttccccacaccctggacctctccctagtgattatctagccagctacaccttactcagagcccggctgctctagcaggaatgttgcacagaaacatacatttgcggtttggccacaggtcgcataggtggcttctcccacgggtagtgtcagttgcttcactttaaaaagtcacttcagccccacaacctcactcccaaaagaaaggtttgagagcgctcattttttttctaagacaccttttataagcctccctataaaaatctcacctttcaagtactaagttagaattgcaagtcatcttttctgaaaactaatgctatcaaagtcctcctttgaaaattaagggtctctttaaaattagaatttataaatggcattcagtgatagtgtacaccaaaattaaaagaccttgactggtgggctttttacgtgtaaggaagaggaagtttaagaagtaggactctgcttgtttcagtagcccatgtactaaaataggaacaatgcagagattagcacagcccctgcacaaggctgacacataaattcatgaagcgttagagacaaaaagtaggactaatgtttgtttattttttaataaaaatctagaatggt

SEQ ID NO: 16018 - protein, 368 aa, Homo sapiens
MAAVAPAGPGDSASAALDELSLNFTYGAPGAGNGSLSGDWYRRNQIHLFGVLLAILGNLVISISLNIQKYSHLQLAQQEHPRPYFKSVLWWGGVLLMAVGETGNFAAYGFAPITLIAPLGCVSVTGSAIISVTFLKDNLRASDLLGTTLAFAGTYLLVNFAPNITQAISARTVQYYLVGWQFLIYVILEILIFCILLYFYKRKGMKHMVILLTLVAILASLTVISVKAVSGMITFSVMDKMQLTYPIFYIMFIIMIASCVFQVKFLNQATKLYNTTTVVPVNHIFFTISAIIAGIIFYQEFLGAPFLTVFIYLFGCFLSFLGVFLVTRNREKEHLQQSYIDFGNIPDTTPERKAWRETNVGQNTTRFT

SEQ ID NO: 16019 - DNA, 1631 bp, Homo sapiens
  CDS (222)..(614)
taggtggtggggggtcgccagcaggttccctctccccggccccagctctggacgctcaccccagtgcaacgccctgagtgacggaaagaggtctggcggcttctctgttgacaactcagctggttccacaccctggcaattgtgaagagctggccaaatgtttgtccactgagctgatctcctctctggagcaccggggccaccaggagggagccaagacaatgcaaactccagtgaacattcccgtgcctgtgctccggctgccccggggccctgatggcttcagccgtggctttgcccctgatggacgcagagcccccttgaggccagaggttcctgaaatccaggagtgtcccatagctcaagaatccctggaatcccaggagcagcgggcacgagccgcccttcgggagcgttacctccgcagcctgctggccatggtgggtcatcaggtgagcttcacgttgcacgagggtgtgcgtgtggccgcccactttggagccaccgacctggatgtggccaacttctacgtgtcacagctgcagactcccataggtgtgcaagcagaggcgctgctccgatgtagtgacattatttcatataccttcaagccataaagatattgtgttcacttttctgcttgaggctaaggcactgtatcccaggcctcccaatgttcccgagccaggaactctgggccccatggagttatgagctcccttggaattttgagccaagctttaagcaagtctggactcctgagacctcctgggtctagtcagtaaaactctgcaactctaggaattctaagatcccattggaaggaatgctctacctcacagaactctgaaccctacagaaatatgggcctgctgccatttcctgaagaccggggcatcgaggtggggtgataaaggatacaacctgcacagggggaagttattaaagaggctgcaaagtccagccaccctgaagatactccccagtgctcccctcctgctaaagaaccagttaccccgggaaaattcgactcctgtttttctttaattaactataccgacggggatggagtcatctttaggggctggtagggtggttatccaagggctgaatccagtggagctgggccaagtacgacaggagtccagataaaggtgtaggggctgcacggccgcaagtctcctggaaaggctggagtgaccggcatgccgggattgggagattaggatttgatttcattttggggcgggcggtggctcgtgctgggtcacgtggtcgtgcccaagcgctcctcctgttgccccacctgtggttgctgtggactgcacacgacagcagattcgctgtcccctcgttggaggcgaatggtcggaccccgagtggcggcgcccctgataaaaggccgaggattcgcgatcagggtgcaacttcactccctcctctcttctctccagccttgcagcgtggccgttcacatcacgcgcttcactaagcctcctatcactagtaaccttccagcgcattgtttaaaaagaaagcagtttctgtccctttctgtagttcctttaagttcaggatgtaagcgaagccttccattaagtaaaggtgtgtgtcgtttcgtctcagtcgcg

SEQ ID NO: 16020 - protein, 131 aa, Homo sapiens
MQTPVNIPVPVLRLPRGPDGFSRGFAPDGRRAPLRPEVPEIQECPIAQESLESQEQRARAALRERYLRSLLAMVGHQVSFTLHEGVRVAAHFGATDLDVANFYVSQLQTPIGVQAEALLRCSDIISYTFKP

SEQ ID NO: 16021 - DNA, 1633 bp, Homo sapiens
  CDS (55)..(810)
gggtttcgttgacccgcggcgttcacgggaattgttcgctttagtgccggcgccatggggtcggagctgatcgggcgcctagccccgcgcctgggcctcgccgagcccgacatgctgaggaaagcagaggagtacttgcgcctgtcccgggtgaagtgtgtcggcctctccgcacgcaccacggagaccagcagtgcagtcatgtgcctggaccttgcagcttcctggatgaagtgccccttggacagggcttatttaattaaactttctggtttgaacaaggagacatatcagagctgtcttaaatcttttgagtgtttactgggcctgaattcaaatattggaataagagacctagctgtacagtttagctgtatagaagcagtgaacatggcttcaaagatactaaaaagctatgagtccagtcttccccagacacagcaagtggatcttgacttatccaggccacttttcacttctgctgcactgctttcagcatgcaagattctaaagctgaaagtggataaaaacaaaatggtagccacatccggtgtaaaaaaagctatatttgatcgactgtgtaaacaactagagaagattggacagcaggtcgacagagaacctggagatgtagctactccaccacggaagagaaagaagatagtggttgaagccccagcaaaggaaatggagaaggtagaggagatgccacataaaccacagaaagatgaagatctgacacaggattatgaagaatggaaaagaaaaattttggaaaatgctgccagtgctcaaaaggctacagcagagtgatttcagcttccaaactggtatacattccaaactgatagtacattgccatctccaggaagacttgacggctttgggattttgtttaaacttttataataaggatcctaagactgttgcctttaaatagcaaagcagcctacctggaggctaagtctgggcagtgggctggcccctggtgtgagcattagaccagccacagtgcctgattggtatagccttatgtgctttcctacaaaatggaattggaggccgggcgcagtggctcacgcctgtaatcccagcactttgggaggccaaggtgggtggatcacctgaggtcaggagctcgagaccagcctggccaacatggtgaaaccccatctctactaaaaatacaaaaattagccaggtgtgatggtgcatgcctgtaatcccagctcctcagtaggctgagacaggagcatcacttgaacgtgggaggcagaggttgcagtgagccgagattgcaccaccgcactccagcctgggtgacagagcgagacttatctcataaataaatagatagatactccagcctgggtgacagagcgagacttatagatagatagatagatagatggatagatagatagatagatagatagatagatagatagatagataaacggaattggagccattttgctttaagtgaatggcagtcccttgtcttattcagaatataaaattcagtctgaatggcatcttacagattttacttcaatttttgtgtacggtattttttatttgactaaatcaatatattgtacagcctaagttaataaatgttatttatatatgc

SEQ ID NO: 16022 - protein, 252 aa, Homo sapiens
MGSELIGRLAPRLGLAEPDMLRKAEEYLRLSRVKCVGLSARTTETSSAVMCLDLAASWMKCPLDRAYLIKLSGLNKETYQSCLKSFECLLGLNSNIGIRDLAVQFSCIEAVNMASKILKSYESSLPQTQQVDLDLSRPLFTSAALLSACKILKLKVDKNKMVATSGVKKAIFDRLCKQLEKIGQQVDREPGDVATPPRKRKKIVVEAPAKEMEKVEEMPHKPQKDEDLTQDYEEWKRKILENAASAQKATAE

SEQ ID NO: 16023 - DNA, 1861 bp, Homo sapiens
  CDS (246)..(593)
tccaccgccgccacagtcttccagctccacatcctgagaggacgcctctggagccgcgactgcccggggttgtgccggccgccgctgccgcccaggccgcctcagctctcctctgcgccggcccgctcactccgcccggccccagccctagcgctggccgcgaccccggcgcctttgaaacttctgctggtgtgagtgccctcaggggttccccaggaatatcgatacaacaccaacaggagatcatgaatcagacagataaaaatcaacaagaaatcccatcataccttaatgatgaaccaccagaaggttcaatgaaagatcacccacagcagcagccaggcatgttgtcccgtgtgactgggggtatcttcagtgttacaaagggagctgttggtgccaccattggtggtgtggcttggattggtggaaagagtctggaagtgaccaaaacagctgttacaactgtgccttccatgggaatagggctggtgaaagggggtgtctctgctgtggctggaggtgttacagctgttgggtctgctgttgtaaacaaagtgcccttaacaggaaagaagaaagacaaatctgactgaaatatagagatacacttgcgctccacagcactgtaatgccagtggcattgaattgctaaattatggactacaaccaagtcaactgttttggacgtttatcttctaaactgctgtgttgaaagtattgatgactggctttcatctaaaaagaagagaccaatacgagcacagtatatgaaggtttctcatacttaagttccaggtttttatctggtaaaatgttacacttactcggttgtaactgaagatatggtatgtttgaatatttactataagtctttcagtttgactaaaaatgtgaaagttgaatttagtagatgatcttcacagttccatatgtataatgtgccaggtaactcacctgccccttaagaagggaaccttgaattacataagccgtacctttgatgtgcctaatagtttcagatgtcttagttttttataaccatagttgattaggccaagaggcattcatttcttatttaagctggcaaaattagcaggaattagagaagtttaaaaagataaatggttttatgataatgttaaccatcttttgttagtaaatatgcgttctattattttaatcattgatgccttacaaaagaaaacatcttttctaataccctgaatatgtgctgttcttagaatcatctatggattcttttaaaggttgtttgtgaaattagttttccctttttagaatctcaggagtagtggggtaaagacatttcctgctgtcagtggataagacagagcttgttaactgttttggcagtagttaaaatcaaattgtacacttctcagcctgggttcatgcttcatcattaatacacctcacagtgcctaaggaacatttacttactggtcagaaggtattttggaagagtttcatattaaggaggaacaaataataattttaagttcttaaaaattacctaaaacaccccaaatataaaaagaagccttcacacctattctgtctttaggatgtcttaaattattagcagtactccttttttaaaaacactgtaaaagtaaccacaaatatgtgaggacttactattttaaatggaatggaatgagctccatagattagttttgaatataaagtatataaaagtgcatcagtggtttatataggctttaaaaacatgttatcttacagtcctttaaagcagccatagagtttgtatcatttttcaagccaatttcagtcagggatttgaattgtttgattatggatgataaatgtgtcatatctt

SEQ ID NO: 16024 - protein, 116 aa, Homo sapiens; identical to SEQ ID NO: 13579

SEQ ID NO: 16025 - DNA, 1478 bp, Homo sapiens
  CDS (291)..(947)
agggaggggatcaacatggccgctgcaccccggactgtgttgatctccggctgctcatcaggaattggtctggaacttgcagtgcaactggcccatgaccccaagaagcgctaccaggtcgtggccaccatgagggacctggggaagaaggagacactggaggcagctgctgggaggctctggggcagaccctcaccgtggcccagctggacgtgtgcagtgatgagtcggtggcccagtgtctcagctgtatccagggagaagtggacgtgctggtgaataatgctggaatgggcctggtggggcccctggaggggctcagccttgctgccatgcagaatgtctttgacaccaactttttcggagctgtccgtctcgtcaaagctgtgcttccaggcatgaagaggaggcggcagggccacatcgtggtgatcagcagtgtcatgggcctgcagggtgtcatcttcaacgatgtctatgcagcttccaagttcgccctggagggattcttcgaaagcctcgctatccagctgctgcagttcaacatcttcatctccctggtggagccaggccccgtggtcaccgagtttgaggggaagcttctggcgcaggtttctatggctgagttcccaggcactgaccctgagaccctgcactacttccgggacctctatctcccagcctccaggaagctgttttgctccgtgggacagaacccacaggacgtggttcaggccattgtcaacgtcatcagctcgactcgaccacccctgcgccgacagaccaacatccgctactcgccgctgaccacgctcaaaaccgtggattcctctggcagcctgtatgtgcgaacgacccaccgcctcctcttccgctgtccacgcctcctcaaccttggccttcaatgtctgtcctgcggctgcctcccaacgcgggtgcggccaagatgagcagaacagagcttcacgatccccatccctgaacaaccagacctcttcattccacatctaattcaaaggatgaacagactcttcatttattcattctgcaaactccccctcccctcctctgtgcctagacatggctagaatcccagaagggcctttattttcaggcatagactcctctgtggtcacagctggagcacagagagggaccctgggaacttggcctgggaagcccagagcaggaagccacagctgtctctgggaaagcaagggaggcttcctggaggaagcggcattgttatgagccttgaaggaagagacagactctgctacattcaacctcgtgacttcatgatcctgggcctgagaacacaggaatgattcatagcccaccccccacctccatgcatacaccagagctctgtggaccaaggggtcattcctggtcacacactccatcagcaaaatgtatttgagcacacaccagcaatgtatgtatattttttccattaaatatatatttataaccac

SEQ ID NO: 16026 - protein, 219 aa, Homo sapiens
MGLVGPLEGLSLAAMQNVFDTNFFGAVRLVKAVLPGMKRRRQGHIVVISSVMGLQGVIFNDVYAASKFALEGFFESLAIQLLQFNIFISLVEPGPVVTEFEGKLLAQVSMAEFPGTDPETLHYFRDLYLPASRKLFCSVGQNPQDVVQAIVNVISSTRPPLRRQTNIRYSPLTTLKTVDSSGSLYVRTTHRLLFRCPRLLNLGLQCLSCGCLPTRVRPR

SEQ ID NO: 16027 - DNA, 1984 bp, Homo sapiens
  CDS (430)..(1410)
ggatacgtcgacaatagatgacggggctcacgttgtacgttcacatcaggtcccggcccgccggaacctgggcgatccacgatgccgagtttgccacgctgcgacagcccataggcttgcccccccgggcattcgggtggactacgaacacaaactgaagccctaggacttgtcgcccgtttgcgctctcgccgaggcacaggctgctcgcggaccaccctgctccgaaaactaagaaggggaccagtagacggggtggattcgaggtggggacatgggacgcagcggtcggagccgcctggaggggtacccggtggtcccgatggagctatcatctttgagaggtaggtggtagcccattcatctggttactgatactggccggcatcagtggactgtcggcaggtccttgagcaactggtgtgtgaaatgggacggacgtcaaaggacaagcgggatgtctactaccgcctggccaaggagaatggctggcgtgctcgcagcgccttcaaactgctacaactggataaggaattccaactcttccaaggcgtgacacgggcagttgacctgtgtgcagccccaggcagctggagccaggtgctgagccggaagatcgggggccaagggtccggccacgtggtggctgtggacctgcaggctatggctccactaccaggtgtggtacagatccagggggacatcacccagctgtccactgccaaggagatcatccagcactttaagggctgccctgcggacctagtggtgtgtgacggggctcctgatgtaaccggtctccatgatgttgatgagtatatgcaggcccagctcctcctagctgctctgaacattgctacacatgtcctgaagccagggggctgctttgtggccaagatattccgaggccgggatgtgacgctcctctacagccagctgcaggtcttcttctccagcgtgctgtgtgccaagcccaggagcagccggaactctagcatcgaggccttcgctgtctgtcagggctatgaccctcccgagggcttcatcccggacctgagcaaacccctgctggaccattcttacgatttcaaccagctggatggtcccacccgcatcattgtgccttttgtgacctgtggggacctgagctcctatgattcggaccgcagttacccactggacctagagggcggctcagagtacaagtacactccacccacacagccccccatctcgccaccataccaggaggcctgcacgttgaagaggaaggggcagctggccaaggagatccgcccccaggactgccccatcagcagagtggacacgtttccccagcccctggccgcccctcagtgccacaccctgctggcccctgagatggaagacaatgaaatgagttgttcaccttaacccattacgctggcaaactgatacaactcagaaactgctcaatgtcaggaaaaccggaacttgttgatgaacttgttttcaaaatatcatctcatcaacgaggcctggacaaacaagccctgaggagggatctgcaacaaccctgaagacaacaaggaaagaaaccatgaaagtctgtctgtactgcagtgggaattcttgagtgaggtcttacctcttctttaaacctcttcaggagtgtcctgattatgtccagaattttccctaaaggcagggattcttaacctggatagaagccaggggtaaccatgaacttgatggaagaaaatgttacatctttattttcagcaatgaaactgaaatttagccttactcccaagttataaatgctggcaacaaatcacagtagtaaaagcagtacctgggattttcccaccaatacaaaccagttacagcaactgtaatgtaacataaaaagggcatcttgaagtattgttcatatttgtcacctcttggaatgatagcagatcctgtaagttgatgtattaattaaaagcccatatattactgc

SEQ ID NO: 16028 - protein, 327 aa, Homo sapiens [sequence omitted]

SEQ ID NO: 16029 - DNA, 2166 bp, Homo sapiens
  CDS (89)..(1138)
aataacaggcggagggtcggcgtaggtactttgaacccaagtaaacaaaagggaagattttctcgttgatactggagactgcacaacaatggggccacgaaagaaaagtgtgaaaacatgtatcatgaataatgaaattccagaagaaatgacagcagatgaaacaaaggactatatgaatcaactttcacatgaagtactttgccatatttttaggtacctccctctgcaggatatcatgtgtatggaatgtctttcccggaagctaaaggaagcagtgaccctatatctgcgagttgtgagagttgtagatctctgtgcagggcggtggtgggaatacatgccaagtggctttacagatgccagttttctaacactattaaagaagatgccagatgttgaacagctatatggccttcaccctcgataccttgagaggcgaagagtaaggggccatgaggcttttagcattccaggagtcctagaagctttgcaggcatgcccaaacttagtgggtgtggaaacttctcatttggagttggtagaatccatttggacatatatgccccatgttcatattttggggaaatttcgtaatcgtaatggagcttttccaattcctcctgaaaataaactgaaaattcctataggagccaaaattcaaactttacatttagttggggtgaatgttcctgaaattccttgtatcccaatgctaaggcacctttatatgaagtgggtaagactcactaaaccacagccatttaaagacttcctttgtatcagcttaagaactttcgtcatgaggaactgtgcaggacccacaaattccttgaaatatgtccctttagtaacaggcttagcctctgcccgaaactcggaacacttagaaatggttcgagttcctttccttggaggtcttatccaacatgttgttgaagacagttggagatcaggtggttttagaaatttgcacactattgttctgggagcttgcaaaaatgctcttgaagtagatcttggttacctcaacattactgctgcccgtaggttacatgaagttcggatccagccttccctaaccaaagatggtgtcttttctgccctaaagatggcagagttggagtttcccccagtttgaaacccttcatctaggatatgtagatgagtttttgctacagagcagaatggctaatgcggatctggtgaagtatggtttggctgatgtggtagaaaatcctggtatcatcactgatatagggatgaaagcagtcaatgaagttttttcctgtatcaaatatctggcaatttacaattgccctcatctacacaacccatacaattggatctcagaccactcaagatggactcgattggttgatatcaacctagtacggtgccatgctttgaagctggactcttttggccagtttattgaattattacccagcctagagtttatttcactggatcagatgtttcgcgaaccacccaagggttgtgctcgagttggtctgagtgcaggcacaggaattggtgtttcatcagctcttgttagcaaccagaactccaacaatgacgataataatgcccagaataacaatgccaacatccacgacaacaatcaccatcatccagatgactcagacgaggagaatgactttcggcaagatctgcagccaggagagcagcagtttgcagctgacgcattaaatgagatggaagacatcgtccaagaagatggagaggtggtggccgagagtggaaataatactccagctcacagccaggcaattattcctgtggatgttgatgaggaacaagcaggacccagtggtcttcagcgtgtagtaaaaccaacctcaattactgttcatgattcagagagtgatgatgaagaagatagtctagaactccaagaagtctggattcctaagaacggtactcggcgttactctgaacgtgaagaaaaaactggagagtcagtgcagtccagagaattgtcagtaagtggaaaaggcaagactccacttcgaaagaggtacaactcccatcagatgggccagtcgaagcagtttcccctcgaggaaagcagctgtgagaaaggctgtcaggtcaccagtgagcagatcaaagccgatatgaaagcagctagggatattcctg

SEQ ID NO: 16030 - protein, 350 aa, Homo sapiens
MGPRKKSVKTCIMNNEIPEEMTADETKDYMNQLSHEVLCHIFRYLPLQDIMCMECLSRKLKEAVTLYLRVVRVVDLCAGRWWEYMPSGFTDASFLTLLKKMPDVEQLYGLHPRYLERRRVRGHEAFSIPGVLEALQACPNLVGVETSHLELVESIWTYMPHVHILGKFRNRNGAFPIPPENKLKIPIGAKIQTLHLVGVNVPEIPCIPMLRHLYMKWVRLTKPQPFKDFLCISLRTFVMRNCAGPTNSLKYVPLVTGLASARNSEHLEMVRVPFLGGLIQHVVEDSWRSGGFRNLHTIVLGACKNALEVDLGYLNITAARRLHEVRIQPSLTKDGVFSALKMAELEFPPV

SEQ ID NO: 16031 - DNA, 1906 bp, Homo sapiens
  CDS (219)..(1142)
gcaatgcactgagtaacggggcgggccgagagcagtcaccaacccctctcgttgaggctgctcggttgtggccagaaacgctggctctggcattaactgtctacacccctccccttacttgggacaggaccgcatagccctcccctccccccgtcctgcaagatcttatgcggctaggtgcctgggaagtaacagcaagaggtttgatttaattttggatgagatcgttcttgcagcaagatgttaataagacaaaatctagactaaatgtgttaaatgggcttgccaacaatatggatgatttgaagataaacaccgatattactggtgctaaagaagaactcctagatgacaacaattttatctcagacaaagagagcggagttcataagccaaaagattgtcaaacatcatttcagaaaaataatacgttgactctgcctgaagaactgtcaaaggacaaatctgaaaacgccttaagtggaggccagtctagtctatttatacatgctggtgctcctactgtttctagtgaaaactttatcttgcctaaaggagctgctgttaatggaccagtttcacactcctccttaactaagacttccaatatgaataaaggcagtgtttcattaaccactggacagcctgtggatcagccaacaacagaatcttgttcaactttgaaggtagcagctgatcttcagctgtctacaccacagaaagcaagtcaacaccaagttttatttttgttatcagatgtagcacatgctaagaatcccacccattccaataaaaaactacctacctctgcttcagttggttgtgacattcagaattcagtagggagtaatataaagtcagatggcactttaataaatcaagtagaggtgggtgaggatggtgaagatttattggtgaaagatgattgtgtcaatacagtaacgggaatttcctcaggtacagatggatttaggtcagaaaatgatacaaactgggatccccaaaaagagttcattcaatttcttatgactaatgaggaaacagtagataaagctccacctcattctaaaataggtctagaaaaaaaaaagaaagcgaaaaatggatgtaagcaagataactcgttataccgaggattgctttagtgattctaattgtgtacccaataaatcaaaaatgcaagaagtagactttctagaacaaaatgaagagctacaagcagtagactcacagaaatatgcattatcaaaagtgaagcctgaatcaactgatgaagacttagaatctgtggatgccttccaacatctaatttataacccagataagtgtggagaagagagttcacctgttcatactagcacttttctttcaaataccttaaaaaagaaatgtgaagagagtgattctgagtcacctgctactttcagtaccgaagagccatcattctacccctgtacaaagtgcaatgtgaattttagggagaagaagcacctccacaggcatatgatgtatcatttagatgggaatagtcactttcgccatcttaatgtcccaaggccatatgcttgtagagaatgtggacggacatttcgagatcgcaattcacttctaaaacatatgattattcaccaggagagaagacagaagttgatggaggaaattcgtgaattgaaagaacttcaggatgaaggaagaagtgcacgattacagtgtcctcagtgtgtgtttggtaccaattgccctaaaacatttgtgcaacatgctaaaacccatgaaaaagataaaaggtactactgctgtgaagagtgtaacttcatggcagtgacagaaaatgaattggaatgccatcgaggcattgcacatggggcagtggtaaaatgccctatggtcacttctgatattgccc

SEQ ID NO: 16032 - protein, 308 aa, Homo sapiens
MRSFLQQDVNKTKSRLNVLNGLANNMDDLKINTDITGAKEELLDDNNFISDKESGVHKPKDCQTSFQKNNTLTLPEELSKDKSENALSGGQSSLFIHAGAPTVSSENFILPKGAAVNGPVSHSSLTKTSNMNKGSVSLTTGQPVDQPTTESCSTLKVAADLQLSTPQKASQHQVLFLLSDVAHAKNPTHSNKKLPTSASVGCDIQNSVGSNIKSDGTLINQVEVGEDGEDLLVKDDCVNTVTGISSGTDGFRSENDTNWDPQKEFIQFLMTNEETVDKAPPHSKIGLEKKKKAKNGCKQDNSLYRGLL

SEQ ID NO: 16033 - DNA, 1347 bp, Homo sapiens
  CDS (169)..(1023)
agcatttaatcatgaggcgctccaaagaatatgagatagaaggggaggggtaggaggagagggaggagggtaggaagacagtttgcattcttgcaacattaaaccaaagggacttggagtgcagatggcatccttcggttcttccagacaagctgcaagacgctgaccatggccaagatggagctctcgaaggccttctctggccagcggacactcctatctgccatcctcagcatgctatcactcagcttctccacaacatccctgctcagcaactactggtttgtgggcacacagaaggtgcccaagcccctgtgcgagaaaggtctggcagccaagtgctttgacatgccagtgtccctggatggagataccaacacatccacccaggaggtggtacaatacaactgggagactggggatgaccggttctccttccggagcttccggagtggcatgtggctatcctgtgaggaaaccgtggaagaaccaggggagaggtgccgaagtttcattgaacttacaccaccagccaagagaggtgagaaaggactactggaatttgccacgttgcaaggcccatgtcaccccactctccgatttggagggaagcggttgatggagaaggcttccctcccctcccctcccttggggctttgtggcaaaaatcctatggttatccctgggaacgcagatcacctacatcggacttcaattcatcagcttcctcctgctactaacagacttgctactcactgggaaccctgcctgtgggctcaaactgagcgcctttgctgctgtttcctctgtcctgtcaggtctcctggggatggtggcccgcatgatgtattcacaagtcttccaagcgactgtcaacttgggtccagaagactggagaccacatgtttggaattatggctgggccttctacatggcctggctctccttcacctgctgcatggcgtcggctgtcaccaccttcaacacgtacaccaggatggtgctggagttcaagtgcaagcatagtaagagcttcaaggaaaacccgaactgcctaccacatcaccatcagtgtttccctcggcggctgtcaagtgcagcccccaccgtgggtcctttgaccagctaccaccagtatcataatcagcccatccactctgtctctgagggagtcgacttctactccgagctgcggaacaagggatttcaaagaggggccagccaggagctgaaagaagcagttaggtcatctgtagaggaagagcagtgttaggagttaagcgggtttggggagtaggcttgagccctaccttacacgtctgctgattatcaacatgtgcttaagcc

SEQ ID NO: 16034 - protein, 285 aa, Homo sapiens
MAKMELSKAFSGQRTLLSAILSMLSLSFSTTSLLSNYWFVGTQKVPKPLCEKGLAAKCFDMPVSLDGDTNTSTQEVVQYNWETGDDRFSFRSFRSGMWLSCEETVEEPGERCRSFIELTPPAKRGEKGLLEFATLQGPCHPTLRFGGKRLMEKASLPSPPLGLCGKNPMVIPGNADHLHRTSIHQLPPATNRLATHWEPCLWAQTERLCCCFLCPVRSPGDGGPHDVFTSLPSDCQLGSRRLETTCLELWLGLLHGLALLHLLHGVGCHHLQHVHQDGAGVQVQA

SEQ ID NO: 16035 - DNA, 1879 bp, Homo sapiens
  CDS (150)..(587)
cgcacaacgtgaacctgcagcagaagccttgcgcctaccacccgggcgataaatacccggagccgtcgggcgccctgcccggtgacgacctgtcctctagggccaaggagttcgccttctaccccagcttcgccagctcctaccaggcgatgcccggctacctggacgtgtcggtggtgcccgggatcagcgggcacccggagccgcgtcacgacgccctcatccccgtcgaaggctaccagcactgggctctctccaatggctgggacagtcaggtgtactgctccaaggagcagtcgcagtccgcccacctctggaagtctcccttcccagacgtggttcccctgcagcccgaggtgagcagctaccggcgcgggcgcaagaaacgcgtgccctacactaaggtgcagctgaaggagctagagaaggaatacgcggctagcaagttcatcaccaaagagaagcgccggcgcatctccgccaccacgaacctctctgagcgccaggtaaccatctggttccagaaccggcgggtcaaagagaagaaggtggtcagcaaatcgaaagcgcctcatctccactccacctgaccacccacccgatgcttgccccatctatttatgtctccgctttgtaccataaccgaacccacggaaagacgctgcgcgggtgcagaagagtatttaatgttaaggaaagagaagaaccgcgccgcccggaggcagagaggctccatggccgtgctgctgggccatccccaactccctatcccatccccagcctccacccccatccagatgggactcacgtggcttcaacagctttggaaatgggtcccgagtgggccgtgcgaggaaggctgtcgacctctactcctccttgcgctcaccttgccagaaagtctggtggcagcgcagagcccaatcattccaaccaaagcagggttggggaatcccgaatggccccaattcttgcctcatcctatgaccaggcttttagaggaccttccctaagggcgcagcttcggagcaggatctgtccagctcatactttccttcgctgtccctcccgcactccttaggcaagatttcccagtaaagattttctgtgcgtattttaaaagtcgtgttaatactcatgataattattagggacctggcagcgtgattggagtatggatgtttccgtaaaagctggaattccgtaaaagcattgacgcagcccctacactccatcccaaccaagaaactgcatttcctggggccaggtgggagctgcctttgccccactgcctcccctgttctgctctctcagtcaacatgtggaaatccaaggaggacaaagactccagccacgctgctaaatagggctcctctctcctctctctctctctaggtggtaaggttggggattagtccaggtacagaagcagaacttttttctaaggataaacatctcttccaaggggatggagagtgggtccctcaacaaaatccctgtccagtcacctttccatcagggcactagcccaggaatgactcctcacactttcacctttactgatttccagaggaaagctagaggatctagttcaagaggcaagaagatctggccctcaattagctaaatgtagatgctgcctaacagttccctcctcaaaggccaccttggtgctgtgggggccccttgcctcttcccttcccactggtgcattacaaaacagtgttcttttgaaatgttcatcaggaataggcttttttttaaaaaatgttgtgtatctgtatatagtattgtgatgtctgaatgacaatgtactgaatgcaaaaaggaaaaaaacccacaaacatgtttttaaaataaaatatctttttttgccttg

SEQ ID NO: 16036 - protein, 146 aa, Homo sapiens
MPGYLDVSVVPGISGHPEPRHDALIPVEGYQHWALSNGWDSQVYCSKEQSQSAHLWKSPFPDVVPLQPEVSSYRRGRKKRVPYTKVQLKELEKEYAASKFITKEKRRRISATTNLSERQVTIWFQNRRVKEKKVVSKSKAPHLHST

SEQ ID NO: 16037 - DNA, 2046 bp, Homo sapiens
  CDS (220)..(1659)
tatgaggccgccgtggagcagctcaagagcgagcagatccgggcgcaggctgaggagaggaggaagaccctgagcgaggagacccggcagcaccaggccagggcccagtatcaagacaagctggcccggcagcgctacgaggaccaactgaagcagcagcaacttctcaatgaggagaatttacggaagcaggaggagtccgtgcagaagcaggaagccatgcggcgagccaccgtggagcgggagatggagctgcggcacaagaatgagatgctgcgagtggagaccgaggcccgggcgcgcgccaaggccgagcgggagaatgcagacatcatccgcgagcagatccgcctgaaggcgtccgagcaccgtcagaccgtcttggagtccatcaggacggctggcaccttgtttggggaaggattccgtgcctttgtgacagaccgggacaaagtgacagccacggtggctgggctgacgctgctggctgtcggggtctactcagccaagaatgcgacagccgtcactggccgcttcatcgaggctcggctggggaagccgtccctagtgagggagacgtcccgcatcacggtgctggaggcgctgcggcaccccatccaggtcagccggcggctcctcagtcgaccccaggacgtgctggagggtgttgtgcttagtcccagcctggaagcacgggtgcgcgacatcgccatagcaaccaggaacaccaagaagaaccggggcctgtacaggcacatcctgctgtatgggccaccaggcaccgggaagacgctgtttgccaagaaactcgccctgcactcaggcatggactacgccatcatgacaggcggggacgtggcccccatggggcgggaaggcgtgaccgccatgcacaagctctttgactgggccaataccagccggcgcggcctcctgctcttcatggatgaagcagacgccttccttcggaagcgagccactgaggagataagcaaggacctcagagccacactgaacgccttcctgtaccacatgggccaacacagcaacaaattcatgctggtcctggccagcaatctgcctgagcagttcgactgtgccatcaacagccgcattgacgtgatggtccacttcgacctgccgcagcaggaggagcgggagcgcctggtgagactgcattttgacaactgtgttcttaagccggccacagaaggaaaacggcgcctgaagctggcccagtttgactacgggaggaagtgctcggaggtcgctcggctgacggagggcatgtcgggccgggagatcgctcagctggccgtgtcctggcaggccacggcatatgcctccaaggacggggtcctcactgaggccatgatggacgcctgtgtgcaagatgctgtccagcagtaccgacagaagatgcgctggctgaaggcggaggggcctgggcgcggggtcgagcaccccctatccggagtccaaggcgagaccctcacctcatggagcctggccacggacccctcctacccctgccttgccggcccctgcacatttaggatatgctcctggatggggactgggctgtgcccagggcctctgtcccccaggatgtcttgtggtggcggtcggccgttctgccccccagggcaccccctgttgtaggcactggctagggaggggcaggcctccttcctgcccctcgagacactcttgggagatgcattttccgtctggctcacagggggagggtgaggctttgtaccccagcccctgcccaggccactgtgagggtgggtgctggctgagcccctggggcagaaggagtggggcaggcggggtctttgttctcggctcccacagcagagccaggtgagggggggcctgccaggactagacagaagtggggcggcctgaaccctgcttccagccatggccaggggccacggaacccggcaggggtgtctgaggccgccctgtcagctggccggtccaagcctgtggctggagctggtgtgtgtttatctaataaagtcccacaggtgcctc

SEQ ID NO: 16038 - protein, 480 aa, Homo sapiens
MRRATVEREMELRHKNEMLRVETEARARAKAERENADIIREQIRLKASEHRQTVLESIRTAGTLFGEGFRAFVTDRDKVTATVAGLTLLAVGVYSAKNATAVTGRFIEARLGKPSLVRETSRITVLEALRHPIQVSRRLLSRPQDVLEGVVLSPSLEARVRDIAIATRNTKKNRGLYRHILLYGPPGTGKTLFAKKLALHSGMDYAIMTGGDVAPMGREGVTAMHKLFDWANTSRRGLLLFMDEADAFLRKRATEEISKDLRATLNAFLYHMGQHSNKFMLVLASNLPEQFDCAINSRIDVMVHFDLPQQEERERLVRLHFDNCVLKPATEGKRRLKLAQFDYGRKCSEVARLTEGMSGREIAQLAVSWQATAYASKDGVLTEAMMDACVQDAVQQYRQKMRWLKAEGPGRGVEHPLSGVQGETLTSWSLATDPSYPCLAGPCTFRICSWMGTGLCPGPLSPRMSCGGGRPFCPPGHPLL

SEQ ID NO: 16039 - DNA, 2379 bp, Homo sapiens
  CDS (685)..(1395)
aaaaacaggtggaatccgggctggagccggagctccggcggcgcgggtggcggcacgtccctccagacagtaccacaggcacctggagtaccggcatcggtcgctgtggcccccgagtgtccgtcagagcctaggggagcctgccctcccgcgcctcgtcggggcccggccaggcaccttggccgccggcgcacggacgcgggcacgagcactagatcacggctgctggacctcggcacgttgacaagatttctctggggtaccgcggaggattactttgaatttcggtggtcgcctgtggtctggcatatttagaacttaagtctattatttcgggcaccatgactttgaggcttttagaagactggtgcagggggatggacatgaaccctcggaaagcgctattgattgccggcatctcccagagctgcagtgtggcagaaatcgaggaggctctgcaggctggtttagctcccttgggggagtacagactgcttggaaggatgttcaggagggatgagaacaggaaagtagccttagtagggcttactgcggagactagtcacgccctggtccctaaggagataccgggaaaagggggtatctggagagtgatctttaagccccctgacccagataatacattttttaagcagattaaatgaatttttagcgggagagggcatgacagtgggtgagttgagcagagctcttggacatgaaaatggctccttagacccagagcagggcatgatcccggaaatgtgggcccctatgttggcacaggcattagaggctcttcagcctgccctgcaatgcttgaagtataaaaagctgagagtgttctcgggcagggagtctccagaaccaggagaagaagaatttggacgctggatgtttcatactactcagatgataaaggcgtggcaggtgccagatgtagagaagagaaggcgattgctagagagccttcgaggcccagcacttgatgttattcgtgtcctcaagataaacaatcctttaattactgtcgatgaatgtctgcaggctcttgaggaggtatttggggttgcagataatcctagggagttgcaggtcaaatatctaaccactcaccagaaggatgaggaaaagttgtcggcttatgtactaaggctggagcctttgttacagaagctggtacagagaggagcaattgagagagatgctgtgaatcaggcccgcctagaccaagtcattgctggggcagtccacaaaacaattcgcagagagcttaatctgccagaggatggcccagcccctggtttcttgcagttattggtactaataaaggattatgaggcagctgaggaggaggaggcccttctccaggcaatattggaaggtaatttcacctgagtctcagggaaccacgaagggatatggcaacgagtagagcatgaaggtagaacagtctatatactcttgtgacacatacaatccctaccttgtgctgccaagtaactcatttttgtgcaattctcagtataagccctttgtcgtttctatgcctatttaaagtctcctaaaggtgtaattgactaggaaggatgtagttctacactgccatttacctatttaaattcatccttgtgaatatctttgttgttgttgttgagacagagtctcgctctgtcacccaggctggagtgcagtggcgtgatcttggctcactgcatcctccgccttccaggtttaagctattctcctgcctcagttgcccgagtagctgggactacaggcatgtgccaccacgcccagctaagttttgcattatcagtagagacggggtttcaccatgttggccaggctagtttcgaactcctgacctcaagtgatccacctgcttcggcctctgaaagtgctgggattacaggcgtgagacactgcgcccagcctcatccctgtgaatttcttattgtacacaagttctttcactatctgtgtgcagtgctctgaggggacagacaaggcttgggtgtatatgccaaccagatctcattgaagtatcagcttgtttggtactaggtgcaagtgtagcatgtcacatgtgaccatgttggatcattgacaatttttaggtatgtactgacctacatttatgatgaagatcctgagcggaggttaagatattaagttattttccatatgaatcagaattatattgattctgtgcaatcaaaacaaaaggcagaatagaatgctgagattggttaagtttgcaatgaccatcttgaaccacagatttctgctatgtgtcatcaaaacatctagttctgagtaacattttcacgattgttataaaattataggtgtgaacttctaaaataaaggaatgct

SEQ ID NO: 16040 - protein, 237 aa, Homo sapiens [sequence omitted]

SEQ ID NO: 16041 - DNA, 2934 bp, Homo sapiens
  CDS (315)..(1052)
gtgctgccgagtagtcccggaagcgaagcagcgatggcggagagtccgactgaggaggcggcaacggcgggcgccggggcggcgggccccggggcgagcagcgttgctggtgttgttggcgttagcggcagcggcggcgggttcgggccgcctttcctgccggatgtgtgggcggcggcggcggcagcgggctcccgccctcagccgctgcccacggggccgcgctgcttagccactgggaccccacgctcagctccgactgggacggcgagcgcaccgcgccgcagtgtctactccggatcaagcgggatatcatgtccatttataaggagcctcctccaggaatgttcgttgtacctgatactgtcgacatgactaagattcatgcattgatcacaggcccatttgacactccttatgaagggggtttcttcctgttcgtgtttcggtgtccgcccgactatcccatccacccacctcgggtcaaactgatgacaacgggcaataacacagtgaggtttaaccccaacttctaccgcaatgggaaagtctgcttgagtattctaggtacatggactggacctgcctggagcccagcccagagcatctcctcagtgctcatctctatccagtccctgatgactgagaacccctatcacaatgagcccggctttgaacaggagagacatccaggagacagcaaaaactataatgaatgtatccggcacgagaccatcagagttgcagtctgtgacatgatggaaggaaagtgtccctgtcctgaacccctacgaggggtgatggagaagtcctttctggagtattacgacttctacgaagtggcctgcaaagatcgcctgcaccttcaaggccaaactatgcaggacccttttggagagaagcggggccactttgactaccagtccctcttgatgcgcctgggactgatacgtcagaaagtgctggagaggctccataatgagaatgcagaaatggactctgatagcagttcatctgggacagagacagaccttcatgggagcctgagggtttagaccctgctcccatctccccttcccccactcaagagtcccagcagaatcccttccccccaccccagggatggagaggcactgtgtatctccctccagactcgaagtcatcctgcaagatggcaagaaccaagcaagctccgatcccagggtgtgggagtgggggcctgttcccggtctgacctccttggcactggagcatctggggcttcgttcatccattcatcccgtatcaggggccaaggtacctttacaggagcacctagagcgagggcctttggcaaaaacagaacaaccaacacacctctccacagggccagctccttagggataagtggaagatggaaattgcaattccaagagggagtgtgcccaaatgatttatggggatacctggaagggagcttggggtgggggctgtctgtgacacttaagcagtctgggtggttgtctatttgtctgtcttcagtcttgaagcagggcttcccaatgcccttttcctccctgccttccttcccccattatttcccacaggccagcataattttgtttttcctaatttatagtcactgttctagacagaccaaagagaaggaacagtggtggagtctaggctgctgatcagtaagctttacctagcacctgagcacctttctcccctcccctctttcctcacccttttctagatgtaagacagaaagtaaatgtgactgggacttaaccaaggtcttggtaaagcctgcatggcaccgtaagaagctgaaaatactgtttgttcccgcaatcactgatttgaaaagttcccaacacaggcagctgctgtgtatatgggattagagccactacatagaatagtctcttacagattttcataaatactagtcacaataagggtatttttcttgggggtggagtaagggggagactgatgctagtccttgttgtattttgttgggctgtccttgtgtattttcaccccagcctgtagtcctcctcacttcaaccccagggatttttggggagcaagggtagccaatggcagagggggttggggctgggactctggaggctcctccccttctttctcctccttccgcctcccccgtgcccccagctgctcttgtcactgtctctgatgggtatttgcctggctttgttgcttctctatctgtatttagctgcagtgatcctttagctggttggctcagaaaaaaaaaaatgtgctttaggtgccctgtaatcctgggcatcaagggaatccatccttcccctttttgatatgttctccccgtacttccagatttattgttatggctcccagtgggtattggcgattcttgtgatgcagggcctcagtcagtgtccagccatgcataagggagaggatagtgtgtacctgccctgccctctgctatgaaggtctctgccttgtggatcatgggactccccttggaggatctgtgcaaaggggggctgggcacaaaggagaatgtcctatttgggagggcaggaagcaaaggaactggacagggattggtgggcttggggaacggaagtttatcttggatacccttgaagaggctgggtctcttcacatgaagatcgaaaagggaccctgcttccaatttccctcttccattcctcgagctactccagggcttagaagaatgctcttggtctgtgggtccagtgttgtctgtcatccatttaagtgttcccactttcaagtgacaatcctctccttggccctgccatagggcagagcatgtctggcatagcagcctgacttttatgccctaatcttgagttgaggaaatatatgcacaggagtcaaagagatgtctttatatctgactgtatataaatgaagtttttttgtttt

SEQ ID NO: 16042 - protein, 246 aa, Homo sapiens
MSIYKEPPPGMFVVPDTVDMTKIHALITGPFDTPYEGGFFLFVFRCPPDYPIHPPRVKLMTTGNNTVRFNPNFYRNGKVCLSILGTWTGPAWSPAQSISSVLISIQSLMTENPYHNEPGFEQERHPGDSKNYNECIRHETIRVAVCDMMEGKCPCPEPLRGVMEKSFLEYYDFYEVACKDRLHLQGQTMQDPFGEKRGHFDYQSLLMRLGLIRQKVLERLHNENAEMDSDSSSSGTETDLHGSLRV

SEQ ID NO: 16043 - DNA, 1566 bp, Homo sapiens
  CDS (90)..(1346)
cgcagcgcggcctgggctcccgcgtgtttaaaagtgcgcttgtggctgctgctgtcttaactcctgtgcttggcggacagacaggcgagatggcggcggaggtgttgccgagtgcgaggtggcagtattgtggggcgcccgacgggagccagagagctgtactggtccagttctccaacgggaagctacagagtccaggcaacatgcgctttaccttgtatgagaacaaagattccaccaaccccaggaagaggaatcaacggatcctggcagctgaaacagataggctctcctatgtgggaaacaattttgggactggagccctcaaatgcaacactttgtgcaggcactttgtgggaattttgaacaagacctctggccaaatggaagtatatgatgctgaattgttcaacatgcagccactattttcagatgtatcagttgagagtgaactggcgctagagagtcagaccaaaacttacagagaaaagatggattcttgtattgaagcctttggtaccaccaaacagaagcgagctctgaacaccaggagaatgaacagagttggcaatgaatctttgaatcgtgcagtggctaaagctgcagagactatcattgatacgaagggtgtgactgctctggtcagcgatgctatccacaatgacttgcaagatgactccctctaccttcctccctgctatgatgatgcagccaagcctgaagacgtgtataaatttgaagatcttctttcccctgcggagtatgaagctcttcagagcccatctgaagctttcaggaacgtcacgtcagaagaaatactgaagatgattgaggagaacagccattgcacctttgtcatagaagcgttgaagtctttgccatcagatgtggagagccgagaccgccaggcccgatgcatatggtttctggataccctcatcaaatttcgagctcatagggtagttaagcggaaaagtgctctgggacctggagttccccacatcatcaacaccaaactgctgaagcactttacttgcttgacctacaacaatggcagattacggaacttaatttcggattctatgaaggcgaagattactgcatatgtgatcatacttgccttgcacatacatgacttccaaattgacctgacagtgttacagagggacttgaagctcagtgagaaaaggatgatggagatagccaaagccatgaggctgaagatctccaaaagaagggtgtctgtggccgccggcagtgaagaagatcacaaactgggcaccctgtccctcccgctgcctccagcccagacctcagaccgcctggcaaagcggaggaagattacctagacgcatgctttccagacagggcgttttggctgcatcacagccactggctggtcctattcatttccatttttatgtatgttttgaaaagaaaaggtccggggatggtggctcacacctgaaatcccagcactttgggaggccgaggcaggaagatcattgagctcaggagtttgaaaccagtctggacaacatagggagaccccatctctaccggagg

SEQ ID NO: 16044 - protein, 419 aa, Homo sapiens; identical to SEQ ID NO: 15490

SEQ ID NO: 16045 - DNA, 2366 bp, Homo sapiens
  CDS (209)..(2365)
tggaactccagctttgttcttaattcaattaattttcaacaatttcttggaatgtggtgtatcagatgaaaggttctttctcagtttggaatcacttgtaggctgtgttctttctggtccaacttcaccactagctttcagtgactcagttttaaatgttattaatcaaaatgcaaagcagttggaaaataaggagcatctctggaaaatgtggagtgttatagtcaccccattaactgaattgattaatcagaccaatgaagtaaatcaaggtgatgccttagaacataattttagtgccatctatggtgcattgactttaccagtaaaccacattttttcagaacagagatttccagtggccaccatgaagactttgcttagaacttggtcagaattatatagagcatttgctcgttgtgctgctttggtggcaacagcagaagagaacttgtgctgtgaggaactttcttccaagataatgtccagtttggaagatgaaggcttttctaatttgttgttcgtggatagaattatttatattattactgtaatggttgattgcattgacttctcaccatataatattaaatatcagcccaaagttaaatcaccacagagaccttcagattggtccaaaaagaagaatgagcccctagggaaattgacttctttatttaaacttattgtgaaagtgatctattctttccacacactgagcttcaaggaagcacattctgataccctcttcactattggcaactcaatcaccagcattatttccagtgtacttgggcatatttctttgccttctatgatccgaaaaatatttgcaactttaacaagacctctggcattattttatgaaaactcaaagcttgatgaagttcctaaagtatatagttgtctgaacaacaagttagaaaagctactgggagaaattattgcttgtctgcaattcagctacaccggaacttatgatagtgaacttcttgaacaactctccccactattatgcataatatttctgcacaagaataaacagattcgaaaacagagtgctcagttctggaatgccacttttgccaaagtgatgatgttggtttatcctgaagagttaaaaccagtactaacacaagccaaacaaaaatttctgctcctgttgcctggtttggaaactgttgaaatgatggaggaatccagtggaccatattctgatggaacagaaaattcacaactaaatgtgaagataagtggcatggagagaaaatcaaatggaaaaagagattcatttttggcacaaacaaagaataaaaaagaaaatatgaaaccagcagccaaactgaaacttgaatcttcgtctttaaaagtaaagggtgaaattcttttggaagaggaaaagtctactgactttgtgtttatacctccagaaggaaaagatgcaaaggaaagaatattaactgatcatcaaaaagaagttctcaaaacaaagcggtgtgatattcctgccatgtataataatctggatgtttcccaagataccttatttactcagtatagtcaggaagagcctatggaaattcctactttaaccagaaaaccaaaggaggattctaagatgatgattacggaggagcaaatggacagtgacattgtcattcctcaagatgtcacggaagactgtggtatggctgaacatcttgaaaagtcctccctttcgaataatgagtgtggttctcttgacaaaaccagtccagaaatgtcaaacagtaataatgatgaaagaaaaaaagctttaatttcatcaaggaaaacatcaactgaatgtgcatctagtacagaaaattctttcgttgtcagcagtagttcagtttctaataccactgttgctggaactcccccataccctacaagtcggaggcaaacctttattactttggagaagtttgatggttcagaaaatagaccttttagtccatcccccttgaataatatttcatcaactgttacagtgaaaaataaccaggaaaccatgattaaaacagattttctaccaaaagcaaagcaaagagaagggactttttcaaaatctgattctgaaaaaatagtgaatggaactaagagatcaagccggagagctggtaaagctgaacaaacagggaataaaaggtctaagcccttaatgagatctgagccggagaaaaatactgaggaatctgttgaaggcattgtagtcttagaaaataacccacctggtttgcttaatcaaacagaatgtgtgtcagataatcaggttcatctttctgaatctacaatggagcatgacaatacaaagcttaaagcagcaacaatggaaaatgctgtat

SEQ ID NO: 16046 - protein, 719 aa, Homo sapiens
MWSVIVTPLTELINQTNEVNQGDALEHNFSAIYGALTLPVNHIFSEQRFPVATMKTLLRTWSELYRAFARCAALVATAEENLCCEELSSKIMSSLEDEGFSNLLFVDRIIYIITVMVDCIDFSPYNIKYQPKVKSPQRPSDWSKKKNEPLGKLTSLFKLIVKVIYSFHTLSFKEAHSDTLFTIGNSITSIISSVLGHISLPSMIRKIFATLTRPLALFYENSKLDEVPKVYSCLNNKLEKLLGEIIACLQFSYTGTYDSELLEQLSPLLCIIFLHKNKQIRKQSAQFWNATFAKVMMLVYPEELKPVLTQAKQKFLLLLPGLETVEMMEESSGPYSDGTENSQLNVKISGMERKSNGKRDSFLAQTKNKKENMKPAAKLKLESSSLKVKGEILLEEEKSTDFVFIPPEGKDAKERILTDHQKEVLKTKRCDIPAMYNNLDVSQDTLFTQYSQEEPMEIPTLTRKPKEDSKMMITEEQMDSDIVIPQDVTEDCGMAEHLEKSSLSNNECGSLDKTSPEMSNSNNDERKKALISSRKTSTECASSTENSFVVSSSSVSNTTVAGTPPYPTSRRQTFITLEKFDGSENRPFSPSPLNNISSTVTVKNNQETMIKTDFLPKAKQREGTFSKSDSEKIVNGTKRSSRRAGKAEQTGNKRSKPLMRSEPEKNTEESVEGIVVLENNPPGLLNQTECVSDNQVHLSESTMEHDNTKLKAATMENAV

SEQ ID NO: 16047 - DNA, 1787 bp, Homo sapiens
aaaaaattaactgggcatggtggtgggcacctgtagtcccagctactcgggaggctgaggcaggagaatctcttgaacccaggaggcagaggttgcagtgagccaagatcatgccactgcactccagcctggcgacagagcgagactccatttaaaaaaaaaaacaccagggcatctgtaagccactttgggagtcaaaagaatgtagagctgggctggactccttagaagaaagttaagttctgagtgtgggaggaagtgcctgcacccccacatccagacagcccgtcactcctgctgccgaagactgacttgctgattcgggctctgcctccatagtgggggcacagagccagggagagtgcccacaggcccagggatcctgggtgtgggaccagggagaatgcccacaggccccagggcctttttgagcccagggcgctctctgcacaggcctgctacaacttcatccgaagcatggccgcctacagcctcctgctgttcctgctgcagatcaaggacagacacaacggcaacattatgctggacaagaagggccatatcatccacatcggtcagccagccacagcgccaccctcctctcccttcaccccggcacccaggggtggatagggatccccaccccacagagaggagaatgcccaggaccaccctgccaggagtgtcagggtccagctctgaggtccgaactgtcggccaccaagctgttctgctgtagagggtgcctggccccggccccagggagctggggcgagagccgccattgctctgagtcagaagctggagctgggcggagtggggctcgtccaggttcagtgccccagcttggctccttcctccacttcctcccttctctttctctgcctgctgccccaccacccaccccatcactgtctccaagaaaacacaacctgccttttgggggtggagggggtgctcctgttgcagagtccttttccactcctcaaaacagaccactcgtccttgcccgccctggctcctacccagtcacaggcagctctttggtgttttgcagactttggcttcatgtttgaaagctcgccgggcggcaatctcggctgggaacctgacatcaagctgacggatgagatggtgatgatcatggggggcaagatggaggccacacccttcaagtggttcatggagatgtgtgtccaggctacctggctgtgcggccctacatggatgtggtcgtctccctggtcactatcatgttggacacgggcctgccctgttttcgcggccagacaatcaagttcttgaagcacaggtttagccccaacatgactgagcgcgaggctgcaaatttcatcatgaaggtcatccagagctgcttcctcagcaacaggagccggacctacaacatgatccagtactatcagaatgacatcccctactgaggaggggaccttcgagggcctctgccccatgtgcccttgaagctgccccacaatcatggagccctgcgacctacccgccctgccgccacatgcagtggaggagaggcctgtggcccgaagagcctggtagcgcctcctggggcagcacgtgggtggcgcaggcttagtaacgccgtggactgcagcgacaatcagtggatggtgctgtctatgcacaggtgtgagtcctctgtttgcactggacatattccctacctgttttatttcataggtacatgaagtattgtgtataaaaaaagagataagatttaaccaacatcaacaaaataaaaacccaaaatagtg

SEQ ID NO: 16048 - DNA, 1960 bp, Homo sapiens
aagatgcacgcaacccacaagtcaatgaccaggtccctctgtgttggttgctgctctgggctctccgttagcccccctccacctgctccactcgctcctgcctgggtggcaggaatttgagtttgctattcctgttttataacctgttctgcagaaacctatttttattaaagatttttataagaaagggaaacctccatgtcttcagcttgttccctgggccaacggctctgaggtgacagtggcattaggatgtgaccagtcactaaggggcactgccttcctgcaggggagtccctgaagccccagccccaagtgtggcaaagacaggaccagatcccaggagtctaggtgggagtgagccgacccaccatggcgtccgtggccacagctgtagacagggctccttgcagtgggctgcaccgtggcctgctgaaagcacacagtggacacgagctgagtccagagcttcctctgaactggggcttagctctccagtggggaaccatggtcagcggctgtagcccctgggcaagatggtgcctggcttcctgccctctgcagggtcatgggagtgtctgggaactcagggtcagggccagatggctgttcctggggcctggggctccagctcaggctgtttgggaataggaggaactcttggcttggagaagcccatcacacagcgggaggcctgggatggttggtctgcggggagcagctcagactgggggtggcagagccgtgtgtggctgtgtgtggccaagtcgggagagtggccagtgctgggccctctctaaggagcccgagggccacaaggactgtggaaaaggtctgagtgagggagtcgggagctagtggctaagggacttgcttgaggacgctccgtgcggccacaaggagaggcccaggcaggaccaggtcaggaggaggctggggcagaggccctggcaggaggtgggtgggcttggtggggatgggagtagccagggtgtaggtgaggatggggaaggggcccccctgcctcctggcttccctgagggctgggctggccaatcccagccctcagtcaagcccggaggcaaatgtgtgcagggaggagaggtgtccaggttgaagctttgggagcccttggaggcagcaaggcagactcgcctctgggacccagcacccagcttgggcctgcaggtggggactcaggagtgaatatcgtgggggctttgagcaagaccctctgggcccagcctcaccttccatactttgaagtcaaggagtggacctgtgctgtctcagtttgctctggggtctgggcagtcctgtggtttgggcagaggcctcagagggccctagggacagactgacccaggtctgagcctcttgggagcgtgcggatggccggcctcagacaggcctggttgtgggtttgtcttccaaggggcacacgcgcactctggtgcttcctggcattcagaagagaatggggaatccagacatcaggccttccttctccctgggaaggatggcaggtgcttggagccaggcctgtcttgagagccagggctctgggtcttcctcctccagtgccctgttccacgccttcagtgcacaaagcactcccctcctgggatctcttcagggatccccgggatgcaaactggccagggattagaattccacatttgagcaaacagactgagagtggagaagcacccagctggacatcctctaggtgttcctggcagaggcccttgctacttgtctgtgcccaaaggccctagagggtcctagatgtgggacaaggtctcagcagggctccagtcccaggcctggaaacagctgggggtgggggaagctggctgggtgggtgtggttatcttttcccagcttgtggctccgaggtgacagaaccaatctcaggaggctttgtttggttaataaaatctactgaatggtttatttt

SEQ ID NO: 16049 - DNA, 3251 bp, Homo sapiens
  CDS (148)..(1893)
cccttgttccccgccgccgccgtcgctgacccagcccgccaggcgctcctgaccgtcgcttcctccggtcccaggtccccggccctcgcctcagccccggcccctggtccccagccctcgtcgcagccccggccgtccgccgccgccatgtccaaggaggagcgccccggtcgggaggagatcctggagtgccaggtgatgtgggagcctgacagtaagaagaacacgcagatggaccgcttccgggcggctgtgggcgccgcctgcggcctggcgctggagagttatgatgacttgtaccattggtccgttgagtcatattcagacttctgggcagagttctggaaattcagtgaaattgtcttctcacgtgtgtatgatgaggttgtggacacatcgaaaggaatcgcagatgtccccgagtggttcaaaggcagtcggctcaactatgcagaaaacctcctgcggcacaaagagaatgacagagttgccctttacattgcaagggaaggcaaagaggaaattgtggaggtgacttttgaagagctgaggcaagaagtggctttgtttgcagcagcaatgaggaaaatgggtgtgaagaaaggagatcgggttgttggttatttacccaacagtgagcacgctgtcgaggcgatgctggctgcggcaagcattggtgccatctggagctccacgtccccggacttcggtgtgaatggtgtgctggaccggttttctcaaattcagccaaagctcatcttctctgtggaggctgttgtctataatggcaaagagcacaaccacatggaaaagctgcagcaggtggttaaaggcctaccagacttgaagaaagtggtggtgattccttatgtgtcctccagagagaacatagacctttcaaagattccaaacagtgtgtttctggatgactttcttgccaccggcaccagtgagcaggccccgcagctggagttcgagcagctgcccttcagccacccactgttcatcatgttctcatcgggcaccacgggcgcacccaagtgcatggtgcattccgctgggggcaccctcatccagcatctgaaggagcacctgctgcacggcaacatgaccagcagtgacatcctcctgtgctacaccacggtcggctggatgatgtggaactggatggtgtcccttctggccacaggagcggccatggtcttgtacgatggctcccccctggtgcccacgcccaatgtgctctgggacctggttgacaggataggcatcactgtcctggtaactggggccaagtggctgtcagtgctggaagagaaggccatgaagccggtggaaacccacagtctccagatgctccacacgatcctgtccactggctccccactgaaagcccagagctacgagtatgtctacaggtgcatcaagagcagcatcctcctgggctccatctcaggaggcaccgacatcatctcctgcttcatgggccacaatttttctcttcctgtgtataaaggggagattcaggcccggaacctgggcatggccgtggaagcgtggaacgaggaaggaaaggcggtctggggagagagcggcgagctggtgtgtactaagccgatcccttgccagcccacacacttctggaacgatgagaacggcaacaagtacaggaaggcgtatttctccaaattcccaggtattgggctcatggcgactactgcagaatcaaccccaagaccgggggcatcgtcatgcttggccggagtgacggcaccctcaaccccaacggggtgcggttcggcagctcggaaatctataacattgtggaatccttcgaggaggtggaggacagcctgtgtgtcccccagtataacaagtacagggaggagagggtgatcctcttcctgaagatggcctccgggcacgccttccagcctgacttggttaagaggatccgtgacgccatccgcatgggcttgtctgcgcgacacgtgcccagcctcatcctggaaaccaagggcatcccgtatacgctcaacggcaagaaagtggaagttgccgtcaaacagatcatcgctggaaaagccgtggagcaaggaggtgctttctcgaaccccgagaccctggatctgtaccgggacatccctgagctgcagggcttctgagtcagactggctggcgtgtcactcagccgcacccgtgtgcactgtaacttttgtgtgctcaagaaattatacagaaacctacagctgttgtaaaaggatgctcgcaccaagtgttctgtaggcttggggagggatcgtttctctgttttgttaaatctggtgggtacctggatcttccacacgagtgggattctggccttcagagaccaggagggagtgtctgggccgcaggtgtggcactgtggtgagagtgtgtgtctttgcacacacagtgcagcgggaacggtggggctggctggtgctgaagacagacacactcctgagccaaggtcttgtcttcaacctccccgtcccgttgtcccattttgctctgtgaaggtgcaaatccctttcttcccttcccatctcaggctctcctgttttccctcagggtccagtatgcctttgagctttagctgttagaaaggaacccccgtgacttgacacagctttcacagctggctgctaggaccggcgggctgggtgttcacgtgtgtctgtgtcatggatgcaatgcaggccctggaggactgtgcgtcacccgtcaaccagagcgtgcctccgggccagcttccctccaaggaatgggtggatttcatacaggatctctttattgcacagactgaatggctttacatgtttctaatgtgaattaggcatgtgaagcagtgggtgtccacccgtgtccctcatgggtgagccctccagctgtgagcccaggcagtgtggtcaccgagtgaggaccctcctcaccaggaaccgcatccctgtgctgcctccacctgagagttgctagggggttcttgtcgagatcatgtcatcagcacccctaagtcaagtcacgggtttccatagccaggcagttggtatgtacaattcagttcagcgtatgaacttgtatctctaatctgatgtccatttttatattttttgaaactgagcacaatgaaatcctttcttgaatcattttccttttggattataaaaatatgggggaaagtgctatgatgaattttatgcaataaatgtatacatgtgtgcacatgc

SEQ ID NO: 16050 - protein, 582 aa, Homo sapiens [sequence omitted]

SEQ ID NO: 16051 - DNA, 1446 bp, Homo sapiens
gtccgctccgtccgcccttagacctgttgcccagcatccctgcagttcgcggtacagtctctattagagcgcgtgtatagaggcagagaggagtgaagtccacagttcctctcctcctagaggtagaaggggcgcggggaaacgacctggtatcggttttccgcttgctgatcaagagctccctttaatgccgcacgcaggccggcgcccctcactgataaacgattggggctgggcctcggcctggagggcgttcgtcctctcagtgccctcagctcgtaaaggaggaaaccgaggcgtggggttgggcgagaacccaggggtcctcctgcacccccgccgccgtgtgtctcgtgtccagcgctggctggagcgcctcagccctggcgcggtgtagtcgtgagctggaacttctgacactgccccttccttccccgtccagcctgccgaccatgcccgcgggcgtgcccatgtccacctacctgaaaatgttcgcagccagtctcctggccatgtgcgcaggggcagaagtggtgcacaggtactaccgaccggacctgacaatacctgaaattccaccaaagcgtggagaactcaaaacggagcttttgggactgaaagaaagaaaacacaaacctcaagtttctcaacaggaggaacttaaataactatgccaagaattctgtgaataatataagtcttaaatatgtatttcctaatttattgcatcaaactacttgtccttaagcacttagtctaatgctaactgcaagaggaggtgctcagtggatgtttagccgatacgttgaaatttaattacggtttgattgatatttcttgaaaaccgccaaagcacatatcatcaaaccatttcatgaatatggtttggaagatgtttagtcttgaatataatgcgaaatagaatatttgtaagtctactatatgggttgtctttatttcatataaattaagaaattatttaaaactatgaactagtttcattaattgaatttgctaagtggagttatttctcattgctaaactgttttttttcaaattctagatctctgctaactttagtaaatgaacactaaagtggtgagctttgataatgcattttgtggatacaaaatcatcgcctcatcactttctagaatgaaaggctgggggcattgctcaccttttgcgtgaagaaaagacctgtcccttagagccagtttttgcttaaggggaggacagaccgtcatcacccagtggaccacgtgaatgaatggatgcagtgcatgctttagaagcaccgcatacctccttttacaggtacagagtaagtggtctggctactgagggaaagagtcatgatttgaatccgagtcttctgtaagacaatgacttcatgaaggtgaaaaatcagttttatggttattaaagtaaaaatttaccttgggt

SEQ ID NO: 16052 - DNA, 2224 bp, Homo sapiens
  CDS (419)..(1789)
tcctcgtgctcctcccggggtgcttggcacagcctcggattcctccctctcgctgctcgagtcagtttccctatcggcggcagcgggcaaggcggcggcggcggcggcggcagccgcggtggcggcgtggggaacatctcggcagccaccgcgcttctcccgctggagcgggcgtccagcttggctgccctcggtccttccctgccacgtttcgggtcgccctgcaccccccacccaggctcgcttctcttcgaagcgggaagggcgccttgcaggatcctgccgcccctccaaccggatcctgggtctagagctccccagagcgaggcgctcgccaggactcctgccccgccaaccctgaccgccggggggtgcccccgggacgtagcgccgcggagaggaagcggcaaaggggaccatgcggcgcctgactcgtcggctggttctgccagtcttcggggtgctctggatcacggtgctgctgttcttctgggtaaccaagaggaagttggaggtgccgacgggacctgaagtgcagacccctaagccttcggacgccgactgggacgacctgtgggaccagtttgatgagcggcggtatctgaatgccaaaaagtggcgcgttggtgacgacccctataagctgtatgctttcaaccagcgggagagtgagcggatctccagcaatcgggccatcccggacactcgccatctgagtgtattaaaccgcacccctacgcatctgatccgggaaatcatattagtggatgacttcagcaatgaccctgatgactgtaaacagctcatcaaattgcccaaggtgaaatgcttgcgcaataatgaacggcaaggtctggtccggtcccggattcggggcgctgacatcgcccagggcaccactctgactttcctcgacagccactgtgaggtgaacagggactggctccagcctctgttgcacagggtcaaagaggactacacgcgggtggtgtgccctgtgatcgatatcattaacctggacaccttcacctacatcgagtctgcctcggagctcagaggggggtttgactggagcctccacttccagtgggagcagctctccccagagcagaaggctcggcgcctggaccccacggagcccatcaggactcctatcatagctggagggctcttcgtgatcgacaaagcttggtttgattacctggggaaatatgatatggacatggacatctggggtggggagaactttgaaatctccttccgagtgtggatgtgcgggggcagcctagagatcgtcccctgcagccgagtggggcacgtcttccggaagaagcacccctacgttttccctgatggaaatgccaacacgtatataaagaacaccaagcggacagctgaagtgtggatggatgaatacaagcgatactattacgctgcccggccattcgccctggagaggcccttcgggaatgttgagagcagattggacctgaggaagaatctgcgctgccagagcttcaagtggtacctggagaatatctaccctgaactcagcatccccaaggagtcctccatccagaagggcaatatccgacagagacagaagtgcctggaatctcaggccaacgggactacgggaagcagcgggcagcggcccgcgggaggcacctcggagatctgggtgcaaaagcccagggttaggaaccgtaggcatgctgcgccccaaggctttgacccaggtgctaagccaagccaacactggaggcgtccagagcaccctgctgctgaataacgagggatcactgctggcctactctggttacggggacactgacgcccgggtcaccgctgccatagccagtaacatctgggccgcctacgaccggaacgggaaccaagcgtttaatgaagacaatctcaaattcatcctcatggactgcatggagggccgtgtagccatcacccgagtggccaaccttctgctgtgtatgtatgccaaggagaccgtgggctttggaatgctcaaggccaaggcccaggctttggtgcagtacctggaggagcccctcacccaagtggcggcatcttaacggcattggtggaagctggggtcagaaaagagaaatgaccatttggaggggcggggcctcctagaagaaccttcttagacaatggggggaggatgggactttgttttttccaagaataaacttcaactcctgtc

SEQ ID NO: 16053 - protein, 457 aa, Homo sapiens [sequence omitted]

SEQ ID NO: 16054 - DNA, 3015 bp, Homo sapiens
  CDS (1578)..(2282)
gtgcaaggggagccgtggcccgggcccggggcgtgcgagacggcggaagcagcccagggccttgctgccgccatgactgaggaatcagaggagacagtcctgtacattgagcaccgctatgtctgctctgagtgcaaccagctgtatggatcactggaagaggtgcttatgcaccaaaactcccacgtgccccagcagcactttgagctggtgggcgtggctgatcccggagtcactgtggccacagacacagcttcaggcacgggcctctatcagacccttgtgcaggagagccagtaccagtgcctggagtgtggtcaactgctgatgtcacccagccagctcctggagcaccaggagctgcacctgaagatgatggcaccccaggaggcagtgccagctgagccatcacctaaggcaccacccctgagctccagcaccatccactacgagtgtgtggattgcaaggctctctttgccagccaggagctctggctgaaccaccggcagacgcacctccgggccacacccaccaaggctcctgcccctgttgtcctggggtccccagttgttctagggcctcctgtgggccaggcccgagtggctgtggagcactcataccgaaaggcagaagagggtggggaaggggcgactgtcccatctgccgctgccaccaccactgaggtagtgactgaggtggagctgctcctctacaagtgctctgagtgctcccagctcttccagctgccggcggatttcctggagcaccaggccactcacttccctgctcctgtacccgagtctcaggagcctgccttacagcaggaggtgcaggccccgtcacctgcagaggtgcctgtgtctcagcctgaccccttgccagcttctgaccacagttacgagctgcgcaatggtgaagccattgggcgggatcgccgggggcgcagggcccggaggaacaacagtggagaagcaggcggggcagccacacaggagctcttctgctcagcctgtgaccagctctttctctcaccccaccagctacagcagcacctgcggagtcaccgggagggcgtctttaagtgccccctgtgcagtcgtgtcttccctagcccttccagtctggaccagcaccttggagaccatagcagcgagtcacacttcctgtgtgtagactgtggcctggccttcggcacagaggccctcctcctggcccgccggcgagcccacaccccgaatcctctgcattcatgtccatgtgggaagacctttgtcaaccttaccaagttcctttatcaccggcgtactcatggggtagggggtgtccctctgcccacaacaccagtcccaccagaggaacctgtcattggtttccctgagacagccccagcagagactggagagccagaggcccctgagccccctgtgtctgaggagacctcagcagggccgctgccccaggcacctaccgctgcctcctgtgcagccgtgaatttggaaaggccttgcagctgacccggcaccaacgttttgtgcgtcggctggagcggcgccataaatgcagcatttgtggcaagatgttcaagaagaagtctcacgtgcgtaaccacctgcgcacacacacaggggagcggcccttcccctgccctgactgctccaagcccttcaacccacctgccaacctggcccgccaccggctcacacacacaggagagcggccctaccggtgtggggactgtggcaaggctttcacgcaaagctccacactgaggcagcaccgcttggtgcatgcccagcacttcccctaccgctgccaggaatgtggggtgcgttttcaccgtccttaccgcctgctcatgcaccgctaccatcacacaggtgaatacccctacaagtgtcgcgagtgcccccgctccttcttgctgcgtcggctgctggaggtgcaccagctcgtggtccatgccgggcgccagccccaccgctgcccatcctgtggggctgccttcccctcctcactgcggctccgggagcaccgctgtgcagccgctgctgcccaggccccacggcgctttgagtgtggcacctgtggcaagaaagtgggctcagcgctcgactgcaggcacacgaggcggcccatgcagctgctgggcctggagaggtcctggctaaggagccccctgcccctcgagccccacgggccactcgtgcaccagttgcctctccagcagcccttggaagcactgctacagcatcccctgcggcccctgcccgccgccggggtctagagtgcagcgagtgcaagaagctgttcagcacagagacgtcactgcaggtgcaccggcgcatccacacaggtgagcggccatacccatgtccagactgtggcaaagcgttccgtcagagtacccacctgaaagaccaccggcgcctgcacacaggtgagcggccctttgcctgtgaagtgtgtggcaaggcctttgccatctccatgcgcctggcagaacatcgccgcatccacacaggcgaacgaccctactcctgccctgactgtggcaagagctaccgctccttctccaacctctggaagcaccgcaagacccatcagcagcagcatcaggcagctgtgcggcagcagctggcagaggcggaggctgccgttggcctggccgtcatggagactgctgtggaggcgctacccctggtggaagccattgagatctaccctctggccgaggctgagggggtccagatcagtggctgactctgcccgacttcctctttggcacctccattccctgttgctgaaggccctccagcatccccttaagcatctgtacatactgtgtcccttcctcttcccatccccaccaccttgtaagttctaaattggatttattctctcgtgaggggggtgctctggggtccttgacacacataaaggtgcccccccaccttccacctcttagcactggtgaccccaaaaatgaaaccatcaataaagactgagttgccagc

SEQ ID NO: 16055 - protein, 235 aa, Homo sapiens
MFKKKSHVRNHLRTHTGERPFPCPDCSKPFNPPANLARHRLTHTGERPYRCGDCGKAFTQSSTLRQHRLVHAQHFPYRCQECGVRFHRPYRLLMHRYHHTGEYPYKCRECPRSFLLRRLLEVHQLVVHAGRQPHRCPSCGAAFPSSLRLREHRCAAAAAQAPRRFECGTCGKKVGSALDCRHTRRPMQLLGLERSWLRSPLPLEPHGPLVHQLPLQQPLEALLQHPLRPLPAAGV

SEQ ID NO: 16056 - DNA, 1700 bp, Homo sapiens
atgtctgtccctagcggaggcgcgggtgccgtgctgagagcgcctgcctgtgcgccccgagcggggctgggactcttccaagatgcccacgttcgcacagagaccccggatcgcggaagctcgcgtctcgaaaggcggtctcacgccctgcccgtcctgggttcacggtttttcatcacctgcggctgtcctgcgatcgaccacagctgtgcaggaggggcaggaggtatctgttgctgcagttaccggaacctttgccaggactagtacaggaccacgggctggtagctcagggatgtctcgtctgtgagttacagctgcacgctctccaggaaagaaggaatttcctcttctctggaaaccccaccacacagctggtttctcattggtgctgcttgcccattccctgagctgtgactgccagaggagtgggaggttggtggtgcctccagcccatcaggggcaggccctgggaccgcctgggaacaggaggactatggcacaaaccgagtgagtgatgggagcaacccgcagggctctgccacatccctgtcttccttcactgacatgaaacgcagaaaaggcagctttgccacaacacaggagcacgcaccgaatgtggccgcccagggctctgtccttgaccctgttgtccaggactgtttaccaagggctgacaggcactgagtgccccgtgcacctggccagacactgcactcatgcagcggaaaggacagtgaacgagactttgtccctggcctccaaaggcttagggcgtagtggctgtcatgaggcacagtgacaagggccaggagggggacctcttagggggccatgcagtgatggaagccagaaggaatgaaggcctgcagtgaggatggagtggtcggcctgaagccatctctagcaagtggtcaggacgctgattgttctgcgcaggttggaggtaggtggtgagtctgagaaaggggccggaaagactccccagcaactgctggcaaagggtgaagggcacgttcccacaggattcaagccagctgcctttggaggggagacgggcactcagtttaggcgctcctacagcagggtcagcaagacaagcaggttgcggcaaaggtctgcgcactgctgtgtaaatgtaggggcatcggggggcagaaagaccaggggagaagtgtgcatcacccttggggttaagggacagttgtctgctaggtgttgcttcctggagatggctgaaaagccagtccagtctgcagggaccaggccaccacccacctgatgtgggagcatttcccccaatccctgctgggctgctgaatctgggggacatagggaagctgaggctggtgttctgagtagtggcagagctgagccacagggcatgtctgaggtcagccccgagcaaaatggaatagggactcagggtgggtcaggtaactggaaagcgggcactgtgcacgcagcccttgaggggagccagggtgggtggggatcccccactgtgtgcagaaggcagcagccttggaagcagggtgtgctcctcggtgtggtcgctcgataccagaaaatgactctaaaaactgaagagtgtttgagtttcattcacacaaaacatggacatcatctgtgaggctctgtcccagagagacagggccatccctcatgtctgttattgggttgtagataaacaaaagtat

SEQ ID NO: 16057 - DNA, 1478 bp, Homo sapiens
  CDS (64)..(1020)
agagctcgcagctccgccggcgcctggtcccagcgcccgcggcgccgcgtccccggcccaaccatggcgtcctccgcggccggctgcgtggtgatcgttggcagtggagtcattgggcgaagctgggccatgctgtttgccagtggaggcttccaggtgaaactctatgacattgagcaacagcagataaggaacgccctggaaaacatcagaaaggagatgaagttgctggagcaggcaggttctctgaaaggctccctgagtgtggaagagcagctgtcactcatcagtggttgtcccaatatccaagaagcagtagagggtgccatgcacattcaggaatgtgttccagaagatctagaactgaagaagaagatttttgctcagttagattccatcattgatgatcgagtgatcttaagcagttccacttcttgtctcatgccttccaagttgtttgctggcttggtccatgtgaagcaatgcatcgtggctcatcctgtgaatccgccatactacatcccgctggttgagctggtcccccacccggagacggcccctacgacagtggacagaacccacgccctgatgaagaagattggacagtgccccatgcgagtccagaaggaggtggccggcttcgttctgaaccgcctgcaatatgcaatcatcagcgaggcctggcggctagtggaggaaggaatcgtgtctcctagtgacctggaccttgtcatgtcagaagggttgggcatgcggtatgcattcattggacccctggaaaccatgcatctcaatgcagaaggtatgttaagctactgcgacagatacagcgaaggcataaaacatgtcctacagacttttggacccattccagagttttccagggccactgctgagaaggttaaccaggacatgtgcatgaaggtccctgatgacccggagcacttagctgccaggaggcagtggagggacgagtgcctcatgagactcgccaagttgaagagtcaagtgcagccccagtgaatttcttgtaatgcagcttccactcctctcattggaggccctatttgggaacactgcaagcccttaatcagccctctgtgacataggtagcagcccacggagatcctaagctggctgtcttgtgtgcagcctgagtggggtggtgcaggccggtagtctgcccgtcactttggatcatagccctgggcctggcggcacagcagcacttgcgttctcggggctgtcgatttcctgccacctgggcagataacctggagatttccaccttttcttttcagcttgattgcatttgactatattttacagccagtgattgtagtttcatgttaatatgtggcaaaatatttttgtaattattttctaatccctttctgagtactctggggccctgcatttatgaggcacctaccttcattttgctaacgcttattctgaataaaagtttttgattcctt

SEQ ID NO: 16058 - protein, 319 aa, Homo sapiens
MASSAAGCVVIVGSGVIGRSWAMLFASGGFQVKLYDIEQQQIRNALENIRKEMKLLEQAGSLKGSLSVEEQLSLISGCPNIQEAVEGAMHIQECVPEDLELKKKIFAQLDSIIDDRVILSSSTSCLMPSKLFAGLVHVKQCIVAHPVNPPYYIPLVELVPHPETAPTTVDRTHALMKKIGQCPMRVQKEVAGFVLNRLQYAIISEAWRLVEEGIVSPSDLDLVMSEGLGMRYAFIGPLETMHLNAEGMLSYCDRYSEGIKHVLQTFGPIPEFSRATAEKVNQDMCMKVPDDPEHLAARRQWRDECLMRLAKLKSQVQPQ

SEQ ID NO: 16059 - DNA, 1669 bp, Homo sapiens
  CDS (97)..(1164)
cttgatgcagcacatcatcgacactggcctggagtattgaaggtggtatcaggatgccacatatccttatttcagattccattaccagaagatggaatgcaatttggaggatcaatgagcttacatggaaatcatatgacactggcatgttttcatggtccaaattttcgttcaaaatcttgggccctttttcatttagaagaaccaaatattgctttttggactgaagctcagaaaatctgggaagatggctccagtgatcattctacatatattgtacaaacactagattttcacctgggtcataatactatggttaccaaaccatgtggtgctttggaaagtcctatggcaacaataaccaagataacaaggcgtcgccatgaaaatccaccccatggagtagcaagtgtgaaagaatggttcaattatgttacagctacaaggaatgaagagctaaatctgcttcgtaatgttgatgctaacaacactgagaatagcactactgtgaagaattctagtttgttgagtggattcagaggaggttctagctacaaccatgaaacagagactatctttgcattaccaaggatgcagcttgactttaaatccattcatgttcaagaaccacaggagccttcattacaggatgccagcctgaagccaaaagtagaatgtagtgtggtgacagagttcactgaccacatttgtgtgactatggatgctgagctcatcatgtttcttcatgatttagtatcagcttatcttaaagaaaaagaaaaagccatctttccacctcggattttatctactcgaccaggacaaaaaagtccaattattatacatgacgacaattcctctgataaagatagagaagatagcatcacttatactactgtggactggagagattttatgtgcaatacatggcatctagaacctactcttagattaatttcttggactggaagaaagattgatccagtaggtgttgattatattcttcaaaaattgggctttcatcatgctaggactactattcctaaatggcttcaaagaggagtcatggatccactggacaaggttctgtcagttcttatcaaaaagctcggtactgcactacaggatgaaaaggaaaagaaaggcaaagacaaagaagaacactaaaaaagtaatttgatctgtgaacaaattatgattgtgtctgttttattacactggagtgtttttttagtataataatttgaaatataactttaaaataattctaaatttgtggctataattaaaagtttgtaagttaacctgttctagttccatcattctgtgtacagtgaagtattgcatgataatgtaaattttgtgaaaaactagattaaaatatataactgcttgttatggtttataattatataatgtgcaatacaattcctgcatctttaaaatgtctgcagaataactgtgaatttttttgttattggattggccgtaacttttagaaaaaaatcttgttgatgataatgtgattttggggaggtcattaattgctttttcttttttaaatgtagacttatataaatacctgtttgtatatagcttgagtaattgtgatatgattgtataccactaaaatattgttaactattataataaagtcacagtaatggtt

SEQ ID NO: 16060 - protein, 356 aa, Homo sapiens
MQFGGSMSLHGNHMTLACFHGPNFRSKSWALFHLEEPNIAFWTEAQKIWEDGSSDHSTYIVQTLDFHLGHNTMVTKPCGALESPMATITKITRRRHENPPHGVASVKEWFNYVTATRNEELNLLRNVDANNTENSTTVKNSSLLSGFRGGSSYNHETETIFALPRMQLDFKSIHVQEPQEPSLQDASLKPKVECSVVTEFTDHICVTMDAELIMFLHDLVSAYLKEKEKAIFPPRILSTRPGQKSPIIIHDDNSSDKDREDSITYTTVDWRDFMCNTWHLEPTLRLISWTGRKIDPVGVDYILQKLGFHHARTTIPKWLQRGVMDPLDKVLSVLIKKLGTALQDEKEKKGKDKEEH

SEQ ID NO: 16061 - DNA, 1801 bp, Homo sapiens
  CDS (61)..(1149)
tacctgctgctgcacacggatggtcccttggccagctcctggcgccactacattgccatcatggctgccgcccgccatcagtgttcttacctggtaggctcccacatggccgagtttctgcagactggtggtgaccctgagtggctgctgggcctccaccgggcccccgagaagctgcgcaaactcagcgagatcaacaagttgctggcgcatcggccatggctcatcaccaaggaacacatccaggccttgctgaagaccggcgagcacacttggtccctggccgagctcattcaggctctggtcctgctcacccactgccactcgctctcctccttcgtgtttggctgtggcatcctccctgagggggatgcagatggcagccctgccccccaggcacctacaccccctagtgaacagagcagccccccaagcagggacccgttgaacaactctgggggctttgagtctgcccgcgacgtggaggcgctgatggagcgcatgcagcagctgcaggagagcctgctgcgggatgaggggacgtcccaggaggagatggagagccgctttgagctggagaagtcagagagcctgctggtgaccccctcagctgacatcctggagccctctccacacccagacatgctgtgctttgtggaagaccctactttcggatatgaggacttcactcggagaggggctcaggcaccccctaccttccgggcccaggattatacctgggaagaccatggctactcgctgatccagcggctttaccctgagggtgggcagctgctggatgagaagttccaggcagcctatagcctcacctacaataccatcgccatgcacagtggtgtggacacctccgtgctccgcagggccatctggaactatatccactgcgtctttggcatcagatatgatgactatgattatggggaggtgaaccagctcctggagcggaacctcaaggtctatatcaagacagtggcctgctacccagagaagaccacccgaagaatgtacaacctcttctggaggcacttccgccactcagagaaggtccacgtgaacttgctgctcctggaggcgcgcatgcaagccgctctgctgtacgccctccgtgccatcacccgctacatgacctgactcctgagcaggacctgggcccggttcagctccccacaaggacttctctgtctggagacagccccagacccttttgtgtcccatgcccaccctccccacgctgcagtgggcttgtgtgtgatgtgcagtcccgaagccacaccctcccttttcctcactggaatggacagttcattgcactgactctgggatctcagccctgctcctgggagctggaagagcacttggagatcctaagggaccacacccttcctccttcccctgcccacagaggcagagggcacaggaaagaagccgggccaagctcggaattaatgtgccacaagtgttgtggccttcctgaactgggaagtccctggctggcccccgggggagaggggcaaatgcctccgggactgacactccaggcagctttgccttctctcccctgtcatttccagatttcattacctcctacttgccattcacccatcaatgtgaaagtcagggtcacagctggtctgtgtgtccagttccctaaaagcctgttctgttgggcagcctgaggctgttgcccgaatcctagttcagtttttttgacttcctttgccctttttcccttttctccatgcttaatggtgtgaggcgtcaggagagaggccaagtacat

SEQ ID NO: 16062 - protein, 363 aa, Homo sapiens
MAAARHQCSYLVGSHMAEFLQTGGDPEWLLGLHRAPEKLRKLSEINKLLAHRPWLITKEHIQALLKTGEHTWSLAELIQALVLLTHCHSLSSFVFGCGILPEGDADGSPAPQAPTPPSEQSSPPSRDPLNNSGGFESARDVEALMERMQQLQESLLRDEGTSQEEMESRFELEKSESLLVTPSADILEPSPHPDMLCFVEDPTFGYEDFTRRGAQAPPTFRAQDYTWEDHGYSLIQRLYPEGGQLLDEKFQAAYSLTYNTIAMHSGVDTSVLRRAIWNYIHCVFGIRYDDYDYGEVNQLLERNLKVYIKTVACYPEKTTRRMYNLFWRHFRHSEKVHVNLLLLEARMQAALLYALRAITRYMT

SEQ ID NO: 16063 - DNA, 2219 bp, Homo sapiens
  CDS (63)..(1733)
tgaagaaaaggaagtccctgaggactcactggaggagtgtgccatcacttgttcaaatagccatggcccttatgactccaaccagccacataggaaaaccaaaatcacatttgaggaagacaaagtcgactcaactctcattggctcatcctctcatgttgaatgggaggatgctgtacacattatcccagaaaatgaaagtgatgatgaggaagaggaagaaaaagggccagtgtctcccaggaatctgcaggagtctgaagaggaggaagtcccccaggagtcctgggatgaaggttattcgactctctcaattcctcctgaaaggacatcggtgggatcaagtgaaaaaggaggaccaagaggcaacaggtcccaggctcagcagggagctgctggctgagaaagagcctgaagtcttgcaggactcactggatagatgttattcaactccttcagtttatcttggactgactgactcatgccagccctacagaagtgccttttacgtattggagcaacagcgtgttggcttggctgttgacatggatgaaattggaatccccggcggcagtggggctgttgctgttgctgtggctgtcgctgcccgtcaggctgccttcttttgtcgtttcccagcgctgcgcaggacttctcctggcggcgctgcggatccagggggtcggctgccaggtacaggacttgcaattgtgaccaaatatattacaaagggctggaaagaagttcatgaattgtataaagaaaaagcactctctgtggagactgaagaattattaaagtatctggaggctgtagagaaagtgaagcgcacaagagatgagctagaagtcattcatctaatagaagaacatagattagttagagaacatcttttaacaaatcacttaaagtctaaagaggtatggaaggctttgttacaagaaatgccgcttactgcattactaaggaatctaggaaagatgactgctaattcagtacttgaaccaggaaattcagaagtatctttagtatgtgaaaaactgtgtaatgaaaaactattaaaaaaggctcgtatacatccatttcatattttgatcgcattagaaacttacaagacaggtcatggtctcagagggaaactgaagtggcgccctgatgaagaaattttgaaagcattggatgctgctttttataaaacatttaagacagttgaaccaactggaaaacgtttcttactagctgttgatgtcagtgcttctatgaaccaaagagttttgggtagtatactcaacgctagtacagttgctgcagcaatgtgcatggttgtcacacgaacagaaaaagattcttatgtagttgctttttccgatgaaatggtaccatgtccagtgactacagatatgaccttacaacaggttttaatggctatgagtcagatcccagcaggtggaactgattgctctcttccaatgatctgggctcagaagacaaacacacctgctgatgtcttcattgtattcactgataatgagacctttgctggaggtgtccatcctgctattgctctgagggagtatcgaaagaaaatggatattccagctaaattgattgtttgtggaatgacatcaaatggtttcaccattgcagacccagatgatagaggcatgttggatatgtgcggctttgatactggagctctggatgtaattcgaaatttcacattagatatgatttaaccataagcagcagcacgatccagagatccattgccatcagtgatctcactaaaaatatacagctacttcccagctaatctccacccaatgaatgatgatggtatagtatgtgcataatggaaagttaccttactgaaaaaaaaaaaagaaggaaaaataagatgggcccaaaggtctatctactaaactagctcttggggaaatagcttcaggatactgtagtttcttctatctaatagagaactttttgttaacagacactgtaaaatagttttgctttgttgaataatacgtgtgtacctaaaagaggtaagagcaaaaagtgtaattccacatcatgttacttgagaagtgcttaacgttttcttaaatgttttcattgggaaaggacagctttgataatgtccaaatactctgaaatgcactagaccatataactgtgatgaaatatgaaactcatctgtaaacttttataccgggggg

SEQ ID NO: 16064 - protein, 557 aa, Homo sapiens [sequence omitted]

SEQ ID NO: 16065 - DNA, 2148 bp, Homo sapiens
  CDS (64)..(1812)
gcgtgaagcgcggacctttcaacaagggctttattaattctcacgctgcggccccggaaagcgatggaggtggcggctaattgctccctacgggtgaagagacctctgttggatccccgcttcgagggttacaagctctctcttgagccgctgccttgttaccagctggagcttgacgcagctgtggcagaggtaaaacttcgagatgatcaatatacactggaacacatgcatgcttttggaatgtataattacctgcactgtgattcatggtatcaagacagtgtctactatattgatacccttggaagaattatgaatttaacagtaatgctggacactgccttaggaaaaccacgagaggtgtttcgacttcctacagatttgacagcatgtgacaaccgtctttgtgcatctatccatttctcatcttctacctgggttaccttgtcagatggaactggaagattgtatgtcattggaacaggtgaacgtggaaatagcgcttctgaaaaatgggagattatgtttaatgaagaacttggggatccttttattataattcacagtatctcactgctaaatgctgaagaacattctatagctaccctacttcttcgaatagagaaagaggaattggatatgaaaggaagtggtttctatgtttctctggagtgggtcactatcagtaagaaaaatcaagataataaaaaatatgaaattattaagcgtgatattctccgtggaaagtcagtgccacattatgctgctattgagcctgatggaaatggtctaatgattgtatcctacaagtctttaacatttgttcaggctggtcaagatcttgaagaaaatatggatgaagacatatcagagaaaatcaaagaacctctgtattactggcaacagactgaagatgatttgacagtaaccatacggcttccagaagacagtactaaggaggacattcaaatacagtttttgcctgatcacatcaacattgtactgaaggatcaccagtttttagaaggaaaactctattcatctattgatcatgaaagcagtacatggataattaaagagagtaatagcttggagatttccttgattaagaagaatgaaggactgacctggccagagctagtaattggagataaacaaggggaacttataagagattcagcccagtgtgctgcaatagctgaacgtttgatgcatttgacctctgaagaactgaatccaaatccagataaagaaaaaccaccttgcagtgctcaagagttagaagaatgtgatattttctttgaagagagctccagtttatgcagatttgatggcaatacattaaaaactactcatgtggtgaatcttggaagcaaccagtaccttttctctgtcatagtggatcctaaagaaatgccctgcttctgtttgcgccatgatgttgatgccctactctggcaaccacactccagcaaacaagatgatatgtgggagcacatcgcaactttcaatgctttaggctatgtccaagcatcaaagagagacaaaaaattttttgcctgtgctccaaattactcgtatgcagccctttgtgagtgccttcgtcgagtattcatctatcgtcagcctgctcccatgtccactgtactttacaacagaaaggaaggcaggcaagtaggacaggttgctaagcagcaagtagcaagcctagaaaccaatgatcctattttaggatttcaggcaacaaatgagagattatttgttcttactaccaaaaacctctttttaataaaagtaaatacagagaattaattattctaacatattggcctctttgtactggaaaagtattcagtggtacctggaggtctggacagttatactgtaacctcttaagttttaatgtgctaaatatatcttgtatgattttttattttttaataacattggaaatatattcaagagattatgattctgtaaagctgtggaatgaagctgcagatttagagaacattggcttctgaaaaaaaaaaagagtgaagatagtactagcaagtatacttattttttaaaacaggctagaatctcatgttttatatgaaagatgtacaattcagtgtttaaaaataaaaatatttattgtgt

SEQ ID NO: 16066 - protein, 583 aa, Homo sapiens [sequence omitted]

SEQ ID NO: 16067 - DNA, 1695 bp, Homo sapiens
  CDS (199)..(1695)
cttgttcccgaagaagtagaagcatcgaaagcgttggagaggtgttaccggaacggcggcgacaagggtgttcccgaactagagtggggcatacataatcttgctgctatgcttcgaagctgtagtctgaatcaacctaagttttaaacagaaggtgaacctctgagatagaaaatcaagtatattttaaaagaagggatgtgggatcaaggaggacagccttggcagcagtggcccttgaaccagcaacaatggatgcagtcattccagcaccaacaggatccaagccagattgattgggctgcattggcccaagcttggattgcccaaagagaagcttcaggacagcaaagcatggtagaacaaccaccaggaatgatgccaaatggacaagatatgtctacaatggaatctggtccaaacaatcatgggaatttccaaggggattcaaacttcaacagaatgtggcaaccagaatggggaatgcatcagcaacccccacacccccctccagatcagccatggatgccaccaacaccaggcccaatggacattgttcctccttctgaagacagcaacagtcaggacagtggggaatttgcccctgacaacaggcatatatttaaccagaacaatcacaactttggtggaccacccgataattttgcagtggggccagtgaaccagtttgactatcagcatggggctgcttttggtccaccgcaaggtggatttcatcctccttattggcaaccaggacctccaggacctccagcacctccccagaatcggagagaaaggccatcatcattcagggatcgtcagcgttcacctattgcacttcctgtgaagcaggagcctccacaaattgacgcagtaaaacgcaggactcttcccgcttggattcgcgaaggtcttgaaaaaatggaacgtgaaaagcagaggaaattggagaaagaaagaatggaacaacaacgttcacaattgtccaaaaaagaaaaaaaggccacagaagatgctgaaggaggggatggccctcgtttacctcagagaagtaaatttgatagtgatgaggaagaagaagacactgaaaatgttgaggctgcaagtagtgggaaagtcaccagaagtccatccccagttcctcaagaagagcacagtgaccctgagatgactgaagaggagaaagagtatcaaatgatgttgctgacaaaaatgcttctaacagaaattctgctggatgtcacagatgaagaaatttattacgtagccaaagatgcacaccgcaaagcaacgaaagctcctgcaaaacagctggcacagtccagtgcactggcttccctcactggactcggtggactgggtggttatggatcaggagacagtgaagatgagaggagtgacagaggatctgagtcatctgacactgatgatgaagaattacggcatcgaatccggcaaaaacaggaagctttttggagaaaagaaaaagaacagcagctattacatgataaacagatggaagaagaaaagcagcaaacagaaagggttacaaaagagatgaatgaatttatccataaagagcaaaatagtttatcactactagaagcaagagaagcagacggtgatgtggttaatgaaaagaagagaactccaaatgaaaccacatcagttttagaaccaaaaaaagagcat

SEQ ID NO: 16068 - protein, 499 aa, Homo sapiens
MWDQGGQPWQQWPLNQQQWMQSFQHQQDPSQIDWAALAQAWIAQREASGQQSMVEQPPGMMPNGQDMSTMESGPNNHGNFQGDSNFNRMWQPEWGMHQQPPHPPPDQPWMPPTPGPMDIVPPSEDSNSQDSGEFAPDNRHIFNQNNHNFGGPPDNFAVGPVNQFDYQHGAAFGPPQGGFHPPYWQPGPPGPPAPPQNRRERPSSFRDRQRSPIALPVKQEPPQIDAVKRRTLPAWIREGLEKMEREKQRKLEKERMEQQRSQLSKKEKKATEDAEGGDGPRLPQRSKFDSDEEEEDTENVEAASSGKVTRSPSPVPQEEHSDPEMTEEEKEYQMMLLTKMLLTEILLDVTDEEIYYVAKDAHRKATKAPAKQLAQSSALASLTGLGGLGGYGSGDSEDERSDRGSESSDTDDEELRHRIRQKQEAFWRKEKEQQLLHDKQMEEEKQQTERVTKEMNEFIHKEQNSLSLLEAREADGDVVNEKKRTPNETTSVLEPKKEH

SEQ ID NO: 16069 - DNA, 1739 bp, Homo sapiens
  CDS (190)..(1467)
attttggtgcgagagaaacaataggacggaaacgccgaggaacccggctgaggcggcagcagagcatcctggccagaacaagccaaggagccaagacgagagggacacacggacaaacaacagacagaagacgtactggccgctggactccgctgcctcccccatctccccgccatctgcgcccggaggatgagcccagccttcagggccatggatgtggagccccgcgccaaaggcgtccttctggagccctttgtccaccaggtcggggggcactcatgcgtgctccgcttcaatgagacaaccctgtgcaagcccctggtcccaagggaacatcagttctacgagaccctccctgctgagatgcgcaaattcactccccagtacaaaggtgtggtatctgtgcgctttgaagaagatgaagacaggaacttgtgtctaatagcatatccattgaaaggggaccatggaattgtggacattgtagataattcagactgtgaaccaaaaagtaagctcctgaggtggacaacaaacaaaaaacatcatgtcttagaaacagaaaagacccctaaggactgggtgcgtcagcaccgtaaagaggagaaaatgaagagccataagttagaagaagaatttgagtggctaaagaaatctgaagtcttgtactacactgtagagaagaaggggaatataagttcccagcttaaacactataacccttggagcatgaaatgtcaccagcaacagttacagagaatgaaggagaatgcaaagcatcggaaccagtacaaatttatcttactggaaaacctgacttcccgctatgaggtgccttgtgtccttgacctcaagatgggcacacgacaacatggtgatgatgcttcagaggagaaggcagccaaccagatccgaaaatgtcagcagagcacatctgcagtcattggtgtgcgtgtgtgtggcatgcaggtgtaccaagcaggcagtgggcagctcatgttcatgaacaagtaccatggacggaagctatcggtgcagggcttcaaggaggcacttttccagttcttccacaatgggcggtacctgcgccgtgaactcctgggccctgtgctcaagaagctgactgagctcaaggcagtgttggagcgacaggagtcctaccgcttctactcaagctccctgctggtcatttatgatggcaaggagcggcccgaagtggtcctggactcagatgctgaggatttggaggacctgtcagaggaatcagctgatgagtctgctggtgcctatgcctacaaacccatcggcgccagctctgtagatgtgcgcatgatcgactttgcacacaccacctgcaggctgtatggcgaggacaccgtggtgcatgagggccaggatgctggctatatcttcgggctccagagcctgatagacattgtcacagagataagtgaggagagtggggagtgagcttgctagctgctccagtacttgagagcgactctgtgtcccaggcacagctgtgctgcgtcagggaggaagccagtatggccaggtggtggctcctgcagcctggagctgatgtgcagtggcctctgtgagccccagcctgagccagtcccagctgtgcttggagtctttatatattttaactatttcttcaacattccacatttgatgatgatacctctttcttccctgagtgtatatgttctaatacaaatctttttgtttattgt

SEQ ID NO: 16070 - protein, 426 aa, Homo sapiens
MSPAFRAMDVEPRAKGVLLEPFVHQVGGHSCVLRFNETTLCKPLVPREHQFYETLPAEMRKFTPQYKGVVSVRFEEDEDRNLCLIAYPLKGDHGIVDIVDNSDCEPKSKLLRWTTNKKHHVLETEKTPKDWVRQHRKEEKMKSHKLEEEFEWLKKSEVLYYTVEKKGNISSQLKHYNPWSMKCHQQQLQRMKENAKHRNQYKFILLENLTSRYEVPCVLDLKMGTRQHGDDASEEKAANQIRKCQQSTSAVIGVRVCGMQVYQAGSGQLMFMNKYHGRKLSVQGFKEALFQFFHNGRYLRRELLGPVLKKLTELKAVLERQESYRFYSSSLLVIYDGKERPEVVLDSDAEDLEDLSEESADESAGAYAYKPIGASSVDVRMIDFAHTTCRLYGEDTVVHEGQDAGYIFGLQSLIDIVTEISEESGE

SEQ ID NO: 16071 - DNA, 2247 bp, Homo sapiens
  CDS (360)..(1082)
tcttctctgtgctgcgagtggctagctgggcagagccctgggggcgcggtgctgccgcctccaggtctccgccccgtgtgtgcgccctgcacttagggatccctccctcactgccccggtactcacaagcttctcggccccgaccttcgccctgggaggttctggccaggtgccgggaggggcgctgtgtcgagggcgatccccccaaagcagcgtcccgtgctaaagaaacagagcctcactctgtcacctaggctggagtgcagtggtgcaattatggctcactgcagtttcaacctcccagattccagtcatcctcctgcctcagccacccaagaagctgggaccacagggatcacatgcagtggtctaaggaagaagaagcagcagccagaaaaaaagtaaaagaaaactcagctgtgcgagtccttctggaagagcaagttaagtatgagagagaagctagtaaatactgggacacattttacaagattcataagaataagtttttcaaggatcgtaattggctgttgagggaatttcctgaaattcttccagttgatcaaaaacctgaagagaaggcgagagaatcatcatgggatcatgtaaaaactagtgctacaaatcgtttctcaagaatgcactgtcctactgtgcctgatgaaaaaaatcattatgagaaaagttctggttcttcagagggtcaaagcaaaacagaatctgatttttccaacctagactctgaaaaacacaaaaaaggacctatggagactggattgtttcctggtagcaatgccactttcaggatactagaggttggttgtggagctggaaatagtgtgtttccaattttgaacactttggagaactctccggagtcctttctgtattgttgtgattttgcttctggagctgtggagctcgtaaagtcacactcgtcctacagagcaacccagtgttttgcctttgttcatgatgtatgtgatgatggcttaccttacccttttccagatgggatcctggatgttattctccttgtctttgtgctctcttctattcatcctgacaggacattgtttatctgaaaatttttatgttcgaggagatggtaccagagcatatttctttacaaaaggggaagtccacagtatgttctgcaaagccagtttagatgaaaagcaaaatctggttgatcgccgcttacaagttaataggaaaaaacaagtgaaaatgcaccgagtgtggattcaaggcaaattccagaaaccattgcaccagactcagaatagctccaatatggtatctacactcctttcacaagactgaactttgtaacatgttaaggtacaaagccagaggactgtgctattcaaggactactgtaagtctattgtttctcaaaagacaatgagaaaaaaagaagagaatttgtatttcctgccgttttgtcataggtgagctcctttgtgcattttaagcacatgtaagtggttcagcacagtatgcctttttctgtgctttgaaaacttgatatgctcaagcttgtttgaatttattacatctaaccattttgcttgttccttgatttttataagcattcaattaagttagtattatgtcaagtaattttgagaaaatgtaacttgacattttttgcaagtaaaaaaaattgtttatttgtttaggcttagtaaaccagttcccaaacacagtcagactcttcccattgtcatctgattgcagagagaaagcacaccttatttccagggaaagctacaacaagcccaaggtcaaagtgtattattttttgtcttgttgttgtctattttctcccaatttttttttgaaattcagaggctcatatctgaaatagaattttagttcctctttcctttcctaaaattggggaagtacagcccatgctgacattattttcaggctattcttagatatacaagttgttaggccaggtgcaatggctcgcacctgtaatcccagcactttggggggctgaggcaggcagatcgcttgagctcaggagttcaagaccagcctggacaacatggcaaaaccctgtctctcccaagaatacaaaaattagccaggcatggtggcacacacctgtggtcccagctactcaggagactgaggtgggaggatcgcttgagcctcggaggcggaggttgcagtgagctgagattgtaccactgcgctccaaactgggtgacatggtgagaccttgtctcc

SEQ ID NO: 16072 - protein, 241 aa, Homo sapiens
MQWSKEEEAAARKKVKENSAVRVLLEEQVKYEREASKYWDTFYKIHKNKFFKDRNWLLREFPEILPVDQKPEEKARESSWDHVKTSATNRFSRMHCPTVPDEKNHYEKSSGSSEGQSKTESDFSNLDSEKHKKGPMETGLFPGSNATFRILEVGCGAGNSVFPILNTLENSPESFLYCCDFASGAVELVKSHSSYRATQCFAFVHDVCDDGLPYPFPDGILDVILLVFVLSSIHPDRTLFI

SEQ ID NO: 16073 - DNA, 1486 bp, Homo sapiens
  CDS (87)..(914)
agtgcgcgccggccgggcaaccctatgctggcgtaatcgggttcctccgagccgccgtaggactggttccggcgggctggtgaggaatggagccggtaggctgctgcggcgagtgccgcggctcctccgtagacccgcggagcaccttcgtgttgagtaacctggcggaggtggtggagcgtgtgctcaccttcctgcccgccaaggcgttgctgcgggtggcctgcgtgtgccgcttatggagggagtgtgtgcgcagagtattgcggacccatcggagcgtaacctggatctccgcaggcctggcggaggccggccacctggaggggcattgcttggttcgcgtggtagcagaggagcttgagaatgttcgcatcttaccacatacagttctttacatggctgattcagaaactttcattagtctggaagagtgtcgtggccataagagagcaaggaaaagaactagtatggaaacagcacttgcccttgagaagctattccccaaacaatgccaagtccttgggattgtgaccccaggaattgtagtgactccaatgggatcaggtagcaatcgacctcaggaaatagaaattggagaatctggttttgctttattattccctcaaattgaaggaataaaaatacaaccctttcattttattaaggatccaaagaatttaacattagaaagacatcaactcactgaagtaggtcttttagataaccctgaacttcgtgtggtccttgtctttggttataattgctgtaaggtgggagccagtaattatctgcagcaagtagtcagcactttcagtgatatgaatatcatcttggctggaggccaggtggacaacctgtcatcactgacttctgaaaagtatgtcttgtgtgcttctgatttcgtctgtgaatgaagggaaatggtctcaggttttgtcactttggggttaacaatttaaaaaacgtgtttaaagaattattaagataatagttcattccattttgtagtagacattggctaaggggcttactgaacataattctgcttacggttgaataattacatttttatatatattgtccttcaagaacttccttgagtcacattctccttaaaatttgacattgcctgttgatctttcctttgacagatgtggtactctgtgtgacctcaatgtgtcacctcctttctagtttcctcctttaaaggaaacacatggttagagtgtatctttatggcaaaacttctcagagcttctaatatgcccggtgctgtggaaatctggaaggagaatagcattacctgtgacagttcccaaatctgtttggtcacaaaacttttttccacagaatgtcttgcaagtcgtactggtttttggaaattctgtattagatcttttgaaaggctttttcaagcttaaaaattgtggatcttttttgttactaaggcttttgctttcaaagataaaaatatttgctcttc

SEQ ID NO: 16074 - protein, 276 aa, Homo sapiens
MEPVGCCGECRGSSVDPRSTFVLSNLAEVVERVLTFLPAKALLRVACVCRLWRECVRRVLRTHRSVTWISAGLAEAGHLEGHCLVRVVAEELENVRILPHTVLYMADSETFISLEECRGHKRARKRTSMETALALEKLFPKQCQVLGIVTPGIVVTPMGSGSNRPQEIEIGESGFALLFPQIEGIKIQPFHFIKDPKNLTLERHQLTEVGLLDNPELRVVLVFGYNCCKVGASNYLQQVVSTFSDMNIILAGGQVDNLSSLTSEKYVLCASDFVCE

SEQ ID NO: 16075 - DNA, 1591 bp, Homo sapiens
  CDS (126)..(848)
aaacgcgctggctgactggggtcggcgtttagttcagcgcagcgactcggggacctggagctgacgcctagacacttgtattagctttaatagaagagaaatggaggagccatagaatattaaggatgaattcaggaaggcctgagaccatggaaaacttgcctgctctctacactattttccaaggagaggttgctatggtgacagactatggggcctttatcaaaatcccaggctgtcggaagcaaggtctggtccatcgaactcatatgtcatcctgtcgggtggataagccctctgagatagtagatgttggagataaagtgtgggtgaagcttattggccgagagatgaaaaatgatagaataaaagtatccctctccatgaaggttgtcaatcaagggactgggaaagaccttgatcccaacaatgttatcattgagcaagaagagaggcggaggcgatccttccaggattacactgggcagaagatcacccttgaggctgtcttgaacactacctgcaagaagtgtggctgtaaaggccactttgcaaaagattgtttcatgcaaccaggtgggactaaatactctctgatacctgatgaggaagaggaaaaggaagaggcaaagtcagcagagtttgagaagcctgaccctacaaggaatccttctagaaaaagaaagaaggagaagaagaaaaagaaacatagagataggaagtcatctgactctgacagctcagactctgagagtgatacaggcaagagggcaaggcacacatcaaaagacagcaaggcagcaaagaagaagaaaaagaagaagaagcacaagaagaagcacaaggagtgagagtataaagagtgtagggggtggttgagagtaagaaaccaggagccttgtgccttgagactcctggaaagactcaatagtgagaatatagcctcccaccccattaacttcgctcccatgggagatggcttcccctcatgcaacaggcaggtttgggagttagaggtcaaaagcagctgcctgaatgagttgttgtttccttatcactcctggtccctttgcaagtgaaccctgcagctcacccattcattcacccaacttccttcattcagcaggaggccctattaccctctccagctgccactgccagagctggattcctgtaaaggagtccaggctagagccacagagactgttgtggaggtgagttcggctgtagttagagtgattggacccttcctattggtctgtcctgggccaactggtgggtgatctctgctgcatccaacatgggagcagagactggcagcaggaggggggaacatggtgagaagtggtgctcacttttcccattcctcctaacatagttctactatgctagaagtggcatccagcggccacagctagaaaacagtctgcagtgtgacttaacttgtgtattgcattccagcagaccactgaaccagacagcgaagccaagatcattgttctactttgtatttactactgtgtgaatcagttgattctacttcaggtccttgcttaaattcctgtcactaaatggaaatgtgtttggtttt

SEQ ID NO: 16076 - protein, 241 aa, Homo sapiens; identical to SEQ ID NO: 12748

SEQ ID NO: 16077 - DNA, 1684 bp, Homo sapiens
  CDS (54)..(539)
agctcctccccctgcgtctctggcctcgccggtcttggggggatggttccatcatggcgtcaatgcagaccacaggaaggagggtggaagtatggtttccaaaacgactacagaaagaactgttggctttgcaaaatgacccacctcctggaatgaccttaaatgagaagagtgttcaaaattcaattacacagtggattgtagacatggaaggtgcaccaggtaccttatatgaaggggaaaaatttcaacttctatttaaatttagtagtcgatatccttttgactctcctcaggtcatgtttactggtgaaaatattcctgttcatcctcatgtttatagcaatggtcatatctgtttatccattctaacagaagactggtccccagcgctctcagtccaatcagtttgtcttagcattattagcatgctttccagctgcaaggaaaagagacgaccaccggataattctttttatgtgcgaacatgtaacaagaatccaaagaaaacaaaatggtggtatcatgatgatacttgttgatgccactgttatcatcctcctagcagaagatagtcctactgagaaaatgagcactttgatcattcagtctttgaactttaacctttgactggaagtgacctataggcaatgaagactacttccttttactgcatttttactcgtgtgcattctgggcgcatgttgatcgctggttcagtccaggcaactgacatgcttttattagtcatacagtattaatgcaggtgtcaggaaatgtcaaatataattccattttttatttttatttttttaagcttttggaaaagctccaggtcctcatgtattgtgcaataacaatgacttccttggcggttttggtacgttcattgccggcaatgggcgttgtaacaggaaaagttttcattaactcctgccattcaatgattaatgcatgatagggcctatgaaatgaacttactggttatagtgggaatataaataaagtgagggatccaacattactttaaaagtcaccccaactgtttatatttggattctatgcactgtgatcctaaggttaacagcatgaattaacatgcgtctttaaaggactgtaatgaaagatcattgcatatttattgattgtttatatctactgtcaagttgttttgacatggaagattttcaagtaacattggcagagaggtacagtatgttatccctatggtgaaaataaattaatttgttgtatatagttcctcaatctctgaagtaaaggtatgagtaatatagggtatgaatggtttaatcaaggctttattttggaagtaagaaaaatggcagtgatgattaaattgctgcagtccataatttgggcttgttatttgtacattaaagattttttccaggtaagttacactctgttaacttcctgctagccatcagcatgagccctactgcctaaacactatttcatttatttatgtttggaaaccccgtaaacatttttgtttgcaatcttgtttcttttgttataagtcaagtttgaatgttgcaatacttttattgaaacttttgttaagttttttcttgtaaattttctttacttgtgagtatcatcttatcctttaatcctgtaccctaaaataagaaatacatttttgacagaggcttaatgtttt

SEQ ID NO: 16078 - protein, 162 aa, Homo sapiens
MASMQTTGRRVEVWFPKRLQKELLALQNDPPPGMTLNEKSVQNSITQWIVDMEGAPGTLYEGEKFQLLFKFSSRYPFDSPQVMFTGENIPVHPHVYSNGHICLSILTEDWSPALSVQSVCLSIISMLSSCKEKRRPPDNSFYVRTCNKNPKKTKWWYHDDTC

SEQ ID NO: 16079 - DNA, 2064 bp, Homo sapiens
  CDS (467)..(1114)
gtagcggcggcaacgaccatggaggccacgtcccgggaggcggcgccagcgaagagctcggcctcgggccccaacgctccccccgccctgttcgagctgtgcgggcgggcggtgagcgcccatatgggggttctggagagcggggtgtgggccctcccaggcccaatacttcaaagcatcctacctctgctcaatatatattacttggagaggattgaggaaactgccctcaagaaaggcctctcaactcaggccatctggcgccgactctgggatgaactgatgaagacaaggccttccagtttggaaagtgtgacatgttggcgagccaagtttatggaggccttttttttcccatgttctacgtgggaccattgatgtgtcttctgacaggcgtctttgtgatcagcggttctcacctcttctgcacagctcccgccatgtccgacagctcaccatctgtaacatgctgcagggtgcaaccgagctggtggctgagcccaaccgcagggttctggagaccctggccagctccctgcacactctcaagttccgccacctgctgttctctgatgtggctgctcagcagtcacttcggcagctgttgcatcagctcattcaccatggggctgtcagtcaagtgtcgctatactcctggcctgtgcctgagtcagcccttttcatccttattctcaccatgagtgctggcttctggcaaccagggcctggtggcccaccctgccgcctctgtggagaggcctcccgaggccgggccccatcccgagatgaagggtccctcttattgggctcacgtcggccccgccgggatgctgctgagcgatgtgctgcagccctgatggccagccggcgtaagagtgaagccaagcagatgcccagagctgcacctgccactcgggtaacacgccggagcacacaggagagcctgacagcaggcggaacagaccttaagagggagctgcacccccagccacctcccatgaggctcctggcaccaagcggtcaccttctgctccagcagctacctcctctgcctcttcttctacatcctcatacaaacgggcaccagctagctcagccccacagcctaagcccctaaagcgtttcaagcgagctgcagggaagaagggtgctcgcacccgtcaggggcctggtgcagagtctgaagacctgtatgacttcgtttttattgtggctggcgagaaggaggatggcgaagagatggagattggggaagtggcttgtggagctttggatggatcagatcccagctgcctggggcttccagcactggaagcttcacaaagattccgcagcatctccaccttggagctattcacagttccactctccacagaggcagccctgacactatgccacctgctgagctcctgggtgtcactggagagcctcacactctcctacaatggtgagcaccctggagtggcagggattgggcttagattgcctagcagcaccagctgtgtgcctaattctagggaggtgggaggggcaaattgggggtatgatcaggaggttagagaggaaggcttgtatgcctcatagcaggggagactgtcattgctagaagagaggaacataaagtctatacacttgattagttgttgaaagcaggggttcctgaggggcagtgagacaagccagctggaatctgaagaatgaatacattttagatatggaaggcagtccaagggcaggtgggagcagtatagtatatgcatgctcaggcagggctagagtttgacctcaccacctcaccagtcatattttaagtattcttgataatttgatctaacaatcctcacaaccctatgagggcaagtgacttcctcaggataacctagcaattatagagctaggattcaaaacccaggcaaccagactgcagattcatgctttcaaacaactatgctactctcctttccaccgtctctctcctatcagcattttaacaggtctccatcaaaaactgccaccaccacctccctctatgccatattaataaactgttatctcctgttcttc

SEQ ID NO: 16080 - protein, 216 aa, Homo sapiens [sequence omitted]

SEQ ID NO: 16081 - DNA, 1685 bp, Homo sapiens
  CDS (12)..(1007)
tctctcgtgcaatggcgtccgggctggtaagattgctgcagcagggacatcgctgcctcctggctccagtcgcccccaagctggtccctccggttcggggagtgaagaagggattccgcgccgccttccgcttccagaaggagttagagcggcagcgccttctgcggtgcccgccgccgcccgtgcgccgttcagagaagccgaactgggattaccatgcagaaatacaagcttttggacatcggttacaggaaaacttttccttagatcttctcaaaactgcatttgttaatagctgctatattaaaagtgaggaggccaaacgccaacaacttgggatagagaaagaagctgttcttctgaatcttaaaagtaatcaagaactatccgaacaagggacatctttttcacagacttgccttacacagtttcttgaagacgagtacccagacatgcccactgaaggcataaaaaatcttgttgactttctcactggtgaggaagtcgtgtgtcacgtggctagaaacttggctgtggagcagttaacactgagtgaggaattcccagtgcccccagctgtgttacagcagactttctttgcagttattggagccctgttacagagcagtggacctgagaggactgcacttttcatcagggacttcttaattactcaaatgactggaaaagagctctttgagatgcggaagataataaatcccatggggctattggtagaagaactgaagaaaaggaatgtttcagctcctgaatcaagacttactaggcagtctggtggcaccacagctttgcctttgtattttgttggcttatactgtgataaaaagttgattgcagaaggacctggggaaacagtattggttgcagaagaagaggctgctcgagtggcccttagaaaactttatgggttcacagaaaatagacggccgtggaactattccaagcccaaagaaaccttgagagcagaaaagagcatcactgccagctagccgccatggatgcagcagcctgaaacctgagagcgaaagtgagataaatgtcaaaggtgtttcaagccagacattttcacaattgtgaagaaatagatgttttgtttctgttttttactgtgttcccaaaattaaataaatgttaaccaagtcacagtgtttttggttttgtttttctgaaatcttggtttgatcaaatctttttttttttctcttgagatggagtcttactctgtcgcccaggctgggctgcagtggtgcgatctcggctcactgcaacctccacctcacaggttcaagcgattctcgtggctcagcctccctagtagctgggattacaggcacacaccaccatacctggctaatttttgtatttttggtagagatggggtttcaccaagttggctagactagtcttgaactcctgacctcaggtgatccacccgccttggcctcccaaagtgctgggattacaggtgtgagccactatacccgaccagatcaaatctttttttttgacatttttgcaaaaaaattttcctaatgttcttgatttaattgtatagaatttgtataattaggtgtattttatttgcctctagctttgaggtatcataatttatgtatcttatgtgaattttttgctgtaataccaataaagttttttttctccac

SEQ ID NO: 16082 - protein, 332 aa, Homo sapiens [sequence omitted]

SEQ ID NO: 16083 - DNA, 2034 bp, Homo sapiens
  CDS (2)..(478)
gatgaattcacgtcgaaggaaagctcagttttttctgggaactacaaacaaacgtgccaaaacagtggttttgcatatagatggccttgatgatacgtctcggagaaatctatgtgaagaggctttgttaaaaattaaaggtgttattagctttacttttcaaatggctgttcaaaggtgtgtggtgcgaatccgttcagatttgaaagctgaggctttggcatcagcaatagcatcaaccaaggttatgaaagctcagcaagttgtgaaaagtgaaagtggagaagagatgttggtcccattccaagatactcctgtggaagttgaacagaacacagagctacctgactacctgcctgaggatgagagtcccacaaaggaacaggacaaagcggtgtcccgggtcggctcacacccagaaggtggagctagctggcttagcacagctgcaaactttttatccagatcattttattggtgacttcacttttgggctcaaggactgtgtgaaccaacaaggggccagttttccattgttgtggtgaactgtcaagtgcaatttgcaataagttatcatgaaaagtttttagattacacgatcgcatatgctgcatttcacattttattggacattttaccccactgagtggtaaaaaggacagaggctacagatggagttgctttgtttatgaaagtattttggtttgttttctttcatttaattgcctcatatttaaaaaccatgggtccactgttaaaaccacatgtgtatgtgcagctttacattttattttacgtgaagcatgtgattaggaaaactcattttcttttcaagcctcaggacctacctgaagagaagttttcttgtagctcaagttgtgcatgaattactgaatattttactgtgcttttcttcatgaagggtacatgctttgtactcttcactgaaagctgaaaacatttcttgttaccctcttttgtgcctttttattttgccaaccgtgtttatagaaaggacattactaatgacattttgcagattaaaaacattcatttgaacacagtagtcccctagaaaaacaactctacaaaaattttgcagccttattcattataattttaataaaattaacacaaaatcagtcaagaaggaaacatgtatattagtgaagtgtttttggagactgtttgaatgtgaccaaatgtggttctagttgacttcttttcactttggcttatatcaactcttgagagttaatgtgatcatgatattgcaaacaactataaatggtctctaggccttactttgtgattatacgttatctctggctagaaaaaaataatggtagtaaagaaactgacaaactgaaaataagaaaacaaaaatcaaatgcctataataccataatgccagtttggtatagagtccaactttaaaacatgaattgctcgacagagttctattcagtaggtgtttctttgtattgtcttttgtgaatttattatgaaaatgctgcgttgtgttgaatgaaaaagacccaaattactgcttatgaagaaataaagccagcattgatcacttaatcctgtttctcatgtccagccagaaaaaagaacttcagtgaaggtaagataaataaatacatacacatatgtttttttggtagataagtgctaattacatatatgtaatgctttattaaatttctgaaatatttggtaactaaaattttctttttggaaattaataaatccagatacatattaatgttgatatgagtaaaaacaaataggaagaaattgaaatttcttttcatcaacatgtagagctgctattttactatttggagaatatgatgtgaaaattggacctcaaagggtttccttgtgttttcattgtaaaataccatcatcagtgagagtcttgagttcactaacattgtcaccttctggagagagagttaatggggggcattgaggatgatatttttttacatgtgtttggtttctgattcaagtgacacgcacaaactg

SEQ ID NO: 16084 - protein, 159 aa, Homo sapiens
MNSRRRKAQFFLGTTNKRAKTVVLHIDGLDDTSRRNLCEEALLKIKGVISFTFQMAVQRCVVRIRSDLKAEALASAIASTKVMKAQQVVKSESGEEMLVPFQDTPVEVEQNTELPDYLPEDESPTKEQDKAVSRVGSHPEGGASWLSTAANFLSRSFYW

SEQ ID NO: 16085 - DNA, 1847 bp, Homo sapiens
  CDS (66)..(689)
atcctgagcttcgtgagttgagcgctgctgctccgcggtggagtcaccgcaccgctcccgggatcatggtgttctacttcaccagcagcagcgttaattcatctgcctacactatttacatgggaaaagataaatatgaaaatgaagatctgatcaagcatggctggcctgaagatatctggtttcatgtggacaaactctcttcggctcatgtataccttcgattacataagggagagaatatagaagacatcccaaaggaagtgctgatggactgtgcccaccttgtgaaggccaatagcattcaaggctgcaagatgaacaacgttaatgtggtatatacgccgtggtctaacctgaagaaaacagctgacatggatgtggggcagataggctttcacaggcagaaggatgtaaaaattgtgacagtggagaagaaagtaaatgagatcctgaaccgattagaaaagaccaaagtcgagcggttcccagacctagcagcagagaaagaatgcagagatcgtgaagagaggaatgagaagaaagcccaaattcaggaaatgaaaaagagagaaaaagaagaaatgaagaagaagagggaaatggatgaacttaggagctattcatcactaatgaaagttgaaaatatgtcttcaaatcaggatggcaatgattcagatgaattcatgtaaaaggagaaaaggagaaaaggacctttgaaagatgtgaatgtagagacaattgcagaccttttggtttcatctgtgttctgaagtataaaatacaaccaaaattctaccttcatcctacccagaaattattgattttcaagttttaaaaaaattgtaccttttttgctgacagaaaaggatcagatatgtataaaatagttgaacttgacagcatataacttaaagtgaaaatgtttttgccagaacatgtcttggtaccttgtgaaagcaggctgcccttgttcttgagatagactttaaaatgaaccagctctgaaaagtacttctgctgctctggtctatccctgaaaacagatgtcttgaaacacttttcatattcttaaaataatcttcacttctgttaagaagaacatgttggtgggtaattatgcgaatgtttccctgtccctgatttctcgattaggcgtatgggttttgaaaaagagatttttcagaagattgtcagcttcagtattcacgttccatcgtgtcatctgggtctgttagtgtagtgaccctcagtgcagtctgtcccagcgtttacgtccttgcttcctctgagcagaggcctccatcttagtatcaacatatttaaagaaattgatggtgttcatcaagctggggcctgtggcagttgttgcctgagcaccaagtaacccaagccacctatgtgacaacttctgggcccaggagtaatttctcagcattgagggtaaaataggatggagtgctctgttgatcatttgggagatgtaggttacctgatttgtgccttaggatgcagcgtgaagcagaagtccatattgcaattatgattttagaaggaactaagcattttactcacacccacagcagcaagaatgacctcctgcagcagatattccgcctgtaatagcactttggaactgtgggcaaaaccaaaaggctagtgtttccatttattccatgttggtgtatggggttgaactggaaaattccctgaggcaaaactcactggccaaattttgagagggtatagaaaatgactttagagatgagtggttttgtgtatgtgtctgatgatattcagtctgatgttccgcaattttaaaagttataataaaataccattttttt

SEQ ID NO: 16086 - protein, 208 aa, Homo sapiens
MVFYFTSSSVNSSAYTIYMGKDKYENEDLIKHGWPEDIWFHVDKLSSAHVYLRLHKGENIEDIPKEVLMDCAHLVKANSIQGCKMNNVNVVYTPWSNLKKTADMDVGQIGFHRQKDVKIVTVEKKVNEILNRLEKTKVERFPDLAAEKECRDREERNEKKAQIQEMKKREKEEMKKKREMDELRSYSSLMKVENMSSNQDGNDSDEFM

SEQ ID NO: 16087 - DNA, 2012 bp, Homo sapiens
  CDS (95)..(568)
agctgtccgcgaaacctagtgctgaagcaggcgcggacgtgcccggtgcctggcgcgtggtagcaggcgcccggtgccccggccggcgaagaccatggcgttcatggtgaagaccatggtgggcggccagctgaagaacctcactgggggcctgggaggcggcgaggataagggagatggggacaagtcggcagccgaagctcagggcatgagccgggaggagtacgaggagtatcagaagcaactcgtggaagagaagatggagcgggatgcacagttcacacagaggaaggcagagcgggccacactgcggagccacttccgagacaaataccggctacccaagaacgagacagatgagagccagatccagatggcaggtggagacgtggagctgccccgggagctggccaagatgatcgaggaggacacagaggaggaggaggagaaggcctcagtccttgggcagctggccagccttcctggcttgaacctgggctcactcaaggacaaggcccaggccacactgggggatctcaagcaatcagctgagaagtgtcacgtcatgtgaccacttccccggggttacccactgggctgggcccccatgagggctaagagtgtgtcaacttccagggacccatactccatttggggctttgtttcccttgccccatcctagttccaagacctttcccatccatgccccaagcctatcttctggtttcttcctctccgctgggagtaaagtccccatcttcactctacccttcaggaccctccccaccagctcagcctgtggaggcctcccaagattgtaggaataggcccatccctctctggccatggccccaagttcctgcacacaggagcacccacagagagacacacacaggacacaaaacccctggcacgttcagagacagaagccacagacacatcccggcacagacagacacacacgaggccagctcccttgcgtgtccagcccctccagacaccaccactcagaaactctgagagagagcatgggcagacaccctcagcagacaggaggcctgagttccagtctccacctttattgttcttgaaagcccctgctctctctgagccttatttcatcatctgtaaaatgggaatgtcctgaatgacttctaaggctctttctggcttgaactgtcagagccaagcccacatccctccttgggcagggcagcagctgctgccacagcctccagcggctgccactgtgggctctgggagccggagcgatgctgtgtgagaggcagagtgccaaggatgaagctggcactgaacagtaagcggctccaggcctcctctgggcccagggcccagccaatttctgttctgttcctgtagaacgctctctggattccatagctggaatctcctctcttagctcagtgaaaaataaaaatcccaaatggtgtgcctaccttcccacttcttactggcttccaggagtcttggagttcatagccccccgagcctgccttaaaggggtgtcctccaccccccacctacagcttcacaggaggggagaaggcatccagtgctaggagtagaagtgtctccagctctgttctcttggggccctgggtgaaggtggggtctggggcttatgaaataggtctgggctttgaggaggatggagcagcctcattatgtggggaagatggggcctctggggcgtcactgagaccacaggtggggccggggctggaccgcggctgtcttgggtgcctgtgcctacacccctcctcaccctagagacggaagatgtgcaaaaagaaagaaggaagggcaactgcattccagccccacactgtgatgactttgagcctgtcctttccctccttgagcctgtcttgcttgtcccctgtaaaatgaacagtccccctctcccccaaatagtaataatacatgtttcaaagggtgaccatttataaagcatatgacaaaccatatcaataaatgtaactcattctttt

SEQ ID NO: 16088 - protein, 158 aa, Homo sapiens [sequence omitted]

SEQ ID NO: 16089 - DNA, 1601 bp, Homo sapiens
  CDS (817)..(1599)
aacaatgctcattgaagctgcaaagggtggccatactaatgtagtttcttatctgttggattatccaaataatgttctgtcagttcccaccacagatgtgtctcagctccctccaccttctcaagatcagtctcaggtgccacgtgtgccaacgcatacacttgccatggttgtacctccccaggaacctgacagaacttcacaggagaactctcctgcccttttaggagtgcaaaaagctgtgagtaccagagtgcccactggttccaacagttcttctcagaccacagagtgtcttacacctgaatcctgttcgcagactacaagcaatgtggcttcccaatcgatgcctcctgtgtatccttcagttgacattgatgcacatactgagagcaatcatgacacagcattaacactagcttgtgcaggtggtcatgaagaacttgtatctgtgctcattgcacgggatgccaaaattgaacacagagacaaaaaaggtttcacaccactaatcctggcagcaacagcagggcatgttggagttgttgaaatccttttggataaaggtggagatatagaagcacagtctgaacgaactaaggatactccgctttcattggcatgttctggtggacgtcaggaggtggtagacttgctgctggctcgaggtgcaaataaagaacataggaacgtatctgattgtacaccactgagtctagctgcgtctggaggatatgttaatatcattaagattctgcttaatgctggggcagaaattaattcaaggactgggagtaaactaggttttctcccctgatgttggctgcaatgaatggacatgttcctgcagtaaaattgctgctcgatatgggttcagacattaatgcccaaatagagaccaatcggaacacggctctcaccctggcctgtttccagggccgagcagaagtagtgagtttgtttctggaccgaaaagccaatgttgaacatagggcaaagacgggtcttacccccttgatggaagcagcttctggagggtatgcagaggttggaagagttcttcttgataaaggagcagatgttaatgctccccctgtgccttcctcaagagatactgctttaacaatagcagcagacaaaggtcactacaaattttgtgaactcctgattcataggggagcccacattgatgttcgtaacaaaaagggaaatacgccactttggctggcatccaatggaggtcattttgatgttgtgcagttgctagtgcaagcaggtgctgatgtggatgcagcagataaccggaaaatcacacctcttatgtcagcatttcgcaagggtcatgtaaaagttgttcaatatttggtaaaggaagtaaatcagttcccttctgatatagaatgcatgagatacatagcaacaattacagataaggaactgttgaaaaaatgtcatcaatgtgtcgaaaccattgtgaaggctaaagaccagcaagctgcagaagcaaataagaatgcgagtattcttttaaaggaacttgatctggaaaagtcaagagaagagagcagaaagcaggctcttgctgctaaaagagaaaaaag

SEQ ID NO: 16090 - protein, 261 aa, Homo sapiens
MLAAMNGHVPAVKLLLDMGSDINAQIETNRNTALTLACFQGRAEVVSLFLDRKANVEHRAKTGLTPLMEAASGGYAEVGRVLLDKGADVNAPPVPSSRDTALTIAADKGHYKFCELLIHRGAHIDVRNKKGNTPLWLASNGGHFDVVQLLVQAGADVDAADNRKITPLMSAFRKGHVKVVQYLVKEVNQFPSDIECMRYIATITDKELLKKCHQCVETIVKAKDQQAAEANKNASILLKELDLEKSREESRKQALAAKREK

SEQ ID NO: 16091 - DNA, 1639 bp, Homo sapiens
  CDS (28)..(1458)
aagcattcccttcgtgccgctaccaagatggcggcgcccatcttgcggtccttttcctggggccggtggtctggtaccctaaatctctcagtattgttgcccttggggctgcgtaaggcccactcgggcgctcaggggttactggcagcgcagaaggctcgaggtctgttcaaggacttcttcccggagacggggacgaaaatagagctcccagagctcttcgaccgtggcacggcgagttttccccaaaccatttactgtggcttcgaccccacggcagactcgcttcatgtgggtcatctacttgcgctgctgggcctgtttcatttgcagcgagcgggccacaacgtgatcgcgctggtgggaggcgccacggcgcgcctgggagacccgagcggccgtaccaaggaacgcgaggcgctggagacagagcgcgtgcgagccaacgcgcgagctctgcgcctagggcttgaggccctggcggctaatcaccagcagcttttcactgatgggcgctcctggggcagcttcactgtgctggacaactcggcctggtaccagaagcagcacctggtggacttcctggcggcagtggggggtcacttccgcatggggacgctgctgagccggcagagcgtgcagctgcggctcaagagccccgagggcatgagcttggccgagttcttttaccaggtgctccaggcctatgacttctattacctcttccagcgttatggatgcagggtccagctgggcggatctgatcaactaggcaacatcatgtccggatatgagttcatcaacaagttgactggagaagatgtatttggaatcaccgttcctctaattacaagtacaactggagcaaagctgggaaagtctgctggcaacgctgtttggctaaacagagataagacatctccatttgaattgtatcaattctttgtcaggcagccggacgattcagtggaaaggtacctgaagctgttcactttcctgccccttccagagattgatcatatcatgcagctgcatgtcaaagagccagaaaggcggggtcctcagaaacgactggcagcagaagtaacaaagcttgttcatggacgagaaggattggattctgctaaaaggtgtacacaagccctttatcacagtagcatagatgcactggaggtcatgtctgatcaggagttaaaagagttgtttaaagaagctccattttctgaattttttctcgatcctggaacaagtgtcctagatacttgccgcaaagcaaatgccattccagatggtccccgagggtatcgaatgataacagaaggcggagtcagcataaatcaccaacaagtaacaaatcctgagagtgttttaattgttggacaacatattctcaagaatggactttccttacttaaaataggaaaaagaaatttctacattataaaatggcttcagttgtgatgaaaagtccttctggttgtccaaataaacttacccatcattcattctcaagacctctgaagggttggctccagaacttagacctttgcttatgcaaatcagaaaaacagaatggactaggactcagtgtgagtaacttcattatttttatgggccggttaataaatatttgtttaat

SEQ ID NO: 16092 - protein, 477 aa, Homo sapiens
MAAPILRSFSWGRWSGTLNLSVLLPLGLRKAHSGAQGLLAAQKARGLFKDFFPETGTKIELPELFDRGTASFPQTIYCGFDPTADSLHVGHLLALLGLFHLQRAGHNVIALVGGATARLGDPSGRTKEREALETERVRANARALRLGLEALAANHQQLFTDGRSWGSFTVLDNSAWYQKQHLVDFLAAVGGHFRMGTLLSRQSVQLRLKSPEGMSLAEFFYQVLQAYDFYYLFQRYGCRVQLGGSDQLGNIMSGYEFINKLTGEDVFGITVPLITSTTGAKLGKSAGNAVWLNRDKTSPFELYQFFVRQPDDSVERYLKLFTFLPLPEIDHIMQLHVKEPERRGPQKRLAAEVTKLVHGREGLDSAKRCTQALYHSSIDALEVMSDQELKELFKEAPFSEFFLDPGTSVLDTCRKANAIPDGPRGYRMITEGGVSINHQQVTNPESVLIVGQHILKNGLSLLKIGKRNFYIIKWLQL

SEQ ID NO: 16093 - DNA, 2093 bp, Homo sapiens
  CDS (213)..(1808)
agcgccctccgcgatttgggctccagcgggcagggtgacttcctttttctgcccactctggtaacttattgctctgctgggctctttcccttagggtctctggccctgttcttgccccagcatgacttttatcgggacgccgttgtggaagcctcacgcaggagccctgcccccgtggagaagatcccactggtgactccaaccctaccaccatgaatggggtcctgatcccccatacgcccatcgcagtggacttctggagcctgcgccgggctggcaccgcacgtctcttcttcttgtctcacatgcactcggaccacaccgtgggcctgtctagcacctgggcccggcccctctactgctccccaattacagcccacctcttgcatcgtcacctacaggtatctaagcaatggatccaagccctggaggttggtgagagccatgtattacccctagatgaaattgggcaagagaccatgaccgtaaccctcctcgatgccaatcactgtcctggttctgtcatgtttctctttgaaggatattttggaaccatcctctacacaggtgattttcgatacacaccatccatgctaaaggagccagccctgacactggggaaacagatccatactttatacctagacaacaccaattgcaatccagccctggttcttccttcccgacaagaagctgcccaccagattgtccagctcattcgaaaacacccacaacataacataaagattggactctacagcctgggaaaggaatcactgctggagcagctggccctggagtttcagacctgggtggtattgagtcctcggcgcctggagttggtacagctactgggcctggcagatgtgttcacagtggaggagaaggctggccgcatccatgcagtagaccatatggagatctgccattccaacatgctgcgttggaaccagacccaccctacgattgctatccttcccacaagccgaaaaatccacagctcccaccctgatatccacgtcatcccttactctgaccattcctcttactccgagcttcgtgcctttgtcgcagcactgaagccttgccaggtggtgcccattgtaagtcggcggccctgtggaggctttcaggacagtctgagccccaggatctccgtgcccctgattccggactctgtacagcaatacatgagttcttcctctagaaaaccaagccttctctggctgttagaaaggaggctaaagaggccgagaacccaaggtgttgtgtttgaatcccctgaggaaagtgctgatcaatctcaagctgacagagactcaaagaaggccaagaaagagaaactttctccctggcctgcggaccttgaaaagcagccttcccaccatcctttgcggatcaagaagcagttgttcccagatctctatagcaaagaatggaacaaggcagtgcctttctgtgagtctcaaaagagggtgactatgttgacggccccactgggattttcagtgcacttaaggtctacagatgaggagtttatttctcaaaaaaccagggaggaaattggtttagggtcccccttggtacccatgggagatgatgatggaggtccagaagccacagggaatcagagtgcctggatgggccatggttctcccctgtcccacagcagcaagggcacccctcttctagctactgaattcaggggtctagcactcaaatatcttctgactccagtgaactttttccaggcagggtattcttccaggagatttgaccagcaagtggaaaaataccataaaccctgctgaagacaggagagtacagaatgacaacattgagcccacactgcagttttgaagatagtaactgatggctggtgggaaagagtttgtttttggggcctacttttctatctttacaagactcttatgggcccaccgtggagcagcacttcccaaaacttgttcactggggtcctcgtgcctatggaatccttctttttataactaagtttaagaaatactttttttataaaatctttggagtatgcgtgagcaaattaaaagttctttgaagtcctacagtaactt

SEQ ID NO: 16094 - protein, 532 aa, Homo sapiens
MNGVLIPHTPIAVDFWSLRRAGTARLFFLSHMHSDHTVGLSSTWARPLYCSPITAHLLHRHLQVSKQWIQALEVGESHVLPLDEIGQETMTVTLLDANHCPGSVMFLFEGYFGTILYTGDFRYTPSMLKEPALTLGKQIHTLYLDNTNCNPALVLPSRQEAAHQIVQLIRKHPQHNIKIGLYSLGKESLLEQLALEFQTWVVLSPRRLELVQLLGLADVFTVEEKAGRIHAVDHMEICHSNMLRWNQTHPTIAILPTSRKIHSSHPDIHVIPYSDHSSYSELRAFVAALKPCQVVPIVSRRPCGGFQDSLSPRISVPLIPDSVQQYMSSSSRKPSLLWLLERRLKRPRTQGVVFESPEESADQSQADRDSKKAKKEKLSPWPADLEKQPSHHPLRIKKQLFPDLYSKEWNKAVPFCESQKRVTMLTAPLGFSVHLRSTDEEFISQKTREEIGLGSPLVPMGDDDGGPEATGNQSAWMGHGSPLSHSSKGTPLLATEFRGLALKYLLTPVNFFQAGYSSRRFDQQVEKYHKPC

SEQ ID NO: 16095 - DNA, 1898 bp, Homo sapiens
  CDS (168)..(1817)
agctgctggctgggctgcctgttgagtcagccttcttccctcacggctcttctcccggtccctgaaactcggctgccaggggagctggagccacctgcgaaggtgtcctcccatactggacccctacaggaagctccgtgtgcccagctggggcacagccccagctgatgccccagaggggccacccatcgcaagaggggctttgggctctgccctccctccccatggcgcatgggccaaagcctgagactgaaggactgttggacctcagcttcctgacagaggaggagcaggaggccattgctggcgtcctccaacgagatgcccgcctgcgccagctggaggaggggcgggtcagcaagctccgggcctcagtggcagaccctgggcagctgaagatcctgacaggggactggttccaggaagcacgctcccagcggcaccacaatgcccacttcggctctgaccttgtccgagcgtctatgcgcaggaagaagagcaccaggggagaccaggctccaggccacgacagggaggctgaggctgctgtgaaagagaaggaagaggggccagagcccaggctcaccattgatgaggcccctcaggagaggctcagggagactgaggcttcagatcctgaggaggcgtcccaggcccaggaagatcctggccaaggagaccaacaggtctgtgccgaggaggctgacccggagctggagcccgcgtcggggggagagcaggagccgcggccccagcaagcccagaccaaggccgcgtcccagatcctggagaatggggaggaggccccggggcccgacccctctctcgaccgcatgctcagcagcagctcctcggtgtccagccttaactcctccacgctgagcggcagccagatgagcctgtcaggcgacgcggaggcggtgcaggtccgcggctccgtgcacttcgcgctgcactacgagccgggcgccgccgagctgcgcgtgcacgtgatccagtgccagggcctggccgccgcccggcgccgccgctcggacccctacgtcaaaagctacctcctcccggataagcagagcaagcgcaagacggcggtgaagaaacggaatctgaatccggttttcaacgagactctccggtactccgtcccgcaggccgagcttcagggccgcgtgctgagcctgtctgtgtggcaccgcgaaagcctgggtcgcaacatctttctgggcgaagttgaagtgcccctggacacgtgggactggggctctgagcccacctggctccccctgcagccccgggtcccaccctctcccgacgaccttccgagccgcgggttactcgccctgtccctcaagtacgtccccgccggctccgagggcgcaggactgcccccgagcggggagctgcacttctgggtgaaggaggctcgggacctcctgccgctgcgggcaggatccctggacacttacgtacaatgcttcgtgctgcctgatgacagccaggccagccgccagcgtacaagggttgtgcgacgcagcctcagccctgtgttcaatcacaccatggtgtacgatggctttgggcctgctgacctgcgccaggcttgtgccgagctctccctctgggaccatggggccctggccaaccgccagctggggggcacacgcctcagcctgggcaccggcagcagctatgggctgcaggtgccctggatggattccacacctgaggagaagcagctgtggcaagccctcctggagcagccgtgcgaatgggtggatggccttctacccctcagaaccaacctggcccccaggacgtagccccaccaagcctctctctctggacccccatctcagggcctgcccttggctaaagtcaataaagtctattctaagagc

SEQ ID NO: 16096 - protein, 550 aa, Homo sapiens
MPQRGHPSQEGLWALPSLPMAHGPKPETEGLLDLSFLTEEEQEAIAGVLQRDARLRQLEEGRVSKLRASVADPGQLKILTGDWFQEARSQRHHNAHFGSDLVRASMRRKKSTRGDQAPGHDREAEAAVKEKEEGPEPRLTIDEAPQERLRETEASDPEEASQAQEDPGQGDQQVCAEEADPELEPASGGEQEPRPQQAQTKAASQILENGEEAPGPDPSLDRMLSSSSSVSSLNSSTLSGSQMSLSGDAEAVQVRGSVHFALHYEPGAAELRVHVIQCQGLAAARRRRSDPYVKSYLLPDKQSKRKTAVKKRNLNPVFNETLRYSVPQAELQGRVLSLSVWHRESLGRNIFLGEVEVPLDTWDWGSEPTWLPLQPRVPPSPDDLPSRGLLALSLKYVPAGSEGAGLPPSGELHFWVKEARDLLPLRAGSLDTYVQCFVLPDDSQASRQRTRVVRRSLSPVFNHTMVYDGFGPADLRQACAELSLWDHGALANRQLGGTRLSLGTGSSYGLQVPWMDSTPEEKQLWQALLEQPCEWVDGLLPLRTNLAPRT

SEQ ID NO: 16097 - DNA, 1759 bp, Homo sapiens
  CDS (429)..(1259)
ccggagactcgggaggctgagctttcctcggcctgagccagccagaccccgggcaccgcgctcacccctcttcgccgccacgtccgcgaaggcctcacgcgcgaggccaggcgaggccccgaggcgcccaccacttcacgacaccggagcgaaccgggcgccagaggctgcgacccccctgccccgaatcctgccggtgggagtggctgcatttgaaccaaacggccttcgcgggcagcagccgtcgccccgcagtcccggggctcccaagggcctgtgaccgacgccgccctccgcgtcttcgtccccgaagccccgggaaccatccgccctcgggagaccatgctgcagatgcgaggaaagccgtttcctggaacatcggaattctaaccccagggtgaaggactcacgacaggcgaggggcagacatgctgaattccacgggcgaactggagttttcgaacgaagaagatcccgagatcatctcccaactcacttccctgcctctgtccggtgggaaaagctcagctggtgtgcccgaaaaaacgggctatccggactccgtttatgtcatggcagccaacatttttcagggtattcgaatcgaaaagtcggcacagaaagtcttaatcaagtatgggaatgaacccctgcggtccttgtccgagtctgaggatcagtcctttcagcgtttgtcttatgagctggctttcagtgccctgaaatatcaagatattttggaaactatattgatagacagctgtatcttcccaagtaccacaacaccagatcatttgagcagtcttattattgtgatgctatatgatttccaagatagaaaatttcaaactcgtgtcctttctgataatgaagagcccatatcagaagttcaagaagtagagaaccttcttaacagttttaagataaaattggctgcagcattggcaagatgtcgaatcaagcatgatgccctttcaatttaccacatccttccagaaacagttaggaaacaggaactaagggcctccactttaccactttatgcttggataaatacttgtaaaatcagccctgaagaagtttataataatttgaagagaagaggctataataaagtcaaatctgtattgcatattgatgataaagtctttgctgtggatcaacattgctatgatgtcttaatttttccatctcatcttaaaaatgatcttataaatatagatcttttcaaagattacaaacttatatttcaggtaaactaatatttactttcattgtgattctcaacaatccaacctagccaaagaacttctccacttaaaaataaaacctaacactgtttatatttttatagattatcagggaggtttataaggcctaattgtcaccttgaataaaattaatacctctacaatcagtgcatctggttggcatctttgtctcatgtgaatttataaagaacatattcttctcccagattccatgaatgggaagatttgcattgctggcagctgtaaggttctacttttctcccctaaaggagaattcaagagaaagtacaatgagaccttttcttccttccctttctggggaagatgctagtgccatcttgcatatgaaaaaacaattgtaatagtttttcataatttctttaatatagtcttatagctttgatttgtaagaggtatataaaggctatcaatataggaagagaatgtgaggtataatgtagattcaacagaacgaaaataaaaggtat

SEQ ID NO: 16098 - protein, 277 aa, Homo sapiens
MLNSTGELEFSNEEDPEIISQLTSLPLSGGKSSAGVPEKTGYPDSVYVMAANIFQGIRIEKSAQKVLIKYGNEPLRSLSESEDQSFQRLSYELAFSALKYQDILETILIDSCIFPSTTTPDHLSSLIIVMLYDFQDRKFQTRVLSDNEEPISEVQEVENLLNSFKIKLAAALARCRIKHDALSIYHILPETVRKQELRASTLPLYAWINTCKISPEEVYNNLKRRGYNKVKSVLHIDDKVFAVDQHCYDVLIFPSHLKNDLINIDLFKDYKLIFQVN

SEQ ID NO: 16099 - DNA, 1757 bp, Homo sapiens
  CDS (208)..(1392)
gcttgtcgtgcagctggccccaagcgcgcggggcaaggcggccctgcaggggtgagctttcctctgagaacccggggccttagcgacacgtaatccggttttccgtctccttggtgcagatgaagaaaccgacgcccatgggcgaaagggacctgctcaagttcactcaagaccacagagctgggcagcaagaaggagctcaagtccatgcccttcatcacctacctctcaggtttgctgacagcccagatgctgtcagatgaccagctcatttcaggtgtggagattcgctgtgaggagaaggggcgctgtccatctacctgtcacctttgccgccggccaggcaaggagcagctgagccccacaccagtgctgctggaaatcaaccgtgtggtgccactttataccctcatccaagacaatggcacaaaggaggccttcaagagtgcaccgatgagttcctactggtgctcagggaaaggggatgtgatcgatgactggtgcaggtgtgacctcagcgcctttgatgccaatgggctccccaactgcagcccccttctgcagccggtgctgcggctgtccccaacagtggagccctccagtactgtggtctccttggagtgggtggatgttcagccagctattgggaccaaggtctccgactatattctgcagcataagaaagtggatgaatacacagacactgacctgtacacaggagaattcctgagttttgctgatgacttactctctggcctgggcacatcttgtgtagcagctggtcggagccatggagaggtccctgaagtcagtatctactcagtcatcttcaagtgtctggagcccgacggtctctacaagttcactctgtatgctgtggatacacgagggaggcactcagagctaagcacggtgaccctgaggacggcctgtccactggtagatgacaacaaggcagaagaaatagctgacaagatctacaatctgtacaatgggtacacaagtggaaaggagcagcagatggcctacaacacactgatggaggtctcagcctcgatgctgttccgagtccagcaccactacaactctcactatgaaaagtttggcgacttcgtctggagaagtgaggatgagctggggcccaggaaggcccacctgattctacggcgactggagagggtgagtagccactgctccagcctcctgcggagtgcctacatccagagccgcgtggaaacagtgccctatcttttctgccgcagcgaggaggtccggcctgcaggcatggtgtggtatagcatcctcaaggacaccaaaatcacgtgtgaggagaagatggtgtcaatggcccgaaacacatattatttgactctatcaaaagtctctcctttttaaaccttttcttatggatggctgtcaatcccgaggcagaagttttcaggtggagaccaagcggcctttgctcttcttccttcttcctgccacactctgctttcttcctgccatggacccctggaggagacctatggagggacagttttgacctgacccctagaggagacagttttgacctcttcagcaccaggaaggaagctctgaggatggttgcagtgaggaagcatgggtctttaaggacttctctctcttttttgctggacattattgagtttgtgggaccctgcctcttcctgctacctgtgggtctgcccagagtccctgcaggcctgtccatgcattaaaaattcctattgtctctc

SEQ ID NO: 16100 - protein, 395 aa, Homo sapiens [sequence omitted]

SEQ ID NO: 16101 - DNA, 1793 bp, Homo sapiens
  CDS (17)..(1198)
agcgcaccgcgggaagatggcgttggaggtcggcgatatggaagatgggcagctttccgactcggattccgacatgacggtcgcacccagcgacaggccgctgcaattgccaaaagtgctaggtggcgacagtgctatgagggccttccagaacacggcaactgcatgtgcaccagtatcacattatcgagctgttgaaagtgtggattcaagtgaagaaagtttttctgattcagatgatgatagctgtctttggaaacgcaaacgacagaaatgttttaaccctcctcccaaaccagagccttttcagtttggccagagcagtcagaaaccacctgttgctggaggaaagaagattaacaacatatggggtgctgtgctgcaggaacagaatcaagatgcagtggccactgaacttggtatcttgggaatggagggcactattgacagaagcagacaatccgagacctacaattatttgcttgccaagaaacttaggaaggaatctcaagagcatacaaaagatctagacaaggaactagatgaatatatgcatggtggcaaaaaaatgggatcaaaggaagaggaaaatgggcaaggtcatctcaaaaggaaacgacctgtcaaagacaggctagggaacagaccagaaatgaactataaaggtcgatacgagatcacagcggaagattctcaagagaaagtggctgatgaaatttcattcaggttacaggaaccaaagaaagacctgatagcccgagtagtgaggattattggtaacaaaaaggcaattgaacttctgatggaaaccgctgaagttgaacaaaatggtggtctctttataatgaatggtagtcgaagaagaacaccaggtggagtttttctgaatctcttgaaaaacactcctagtatcagcgaggaacaaattaaggacattttctacattgaaaaccaaaaggaatatgaaaataaaaaagctgctaggaagaggagaacacaagtgttggggaaaaagatgaaacaagctattaaaagtctaaattttcaagaagatgatgatacatcacgagaaacttttgcaagtgacacgaatgaggccttggcctctcttgatgagtcacaggaaggacatgcagaagccaagttggaggcagaggaagccattgaagttgatcattctcatgatttggacatcttttaagtacattttcaacagtttgaggactaagcctttctaaaataacattgtaataaaccatttttactgagattgcaacgttttgcactgataaacatgagaatctggaggaaagacaattgttttcttgtttaaaatatgtgtggaaaggaatgcaattgatagaacatttaaagatatatctgacaaaatacttaagagtatatagcacaggatttaatttctcaatctgttgcatgtgctaattatgagtattactagttgataatcagttttgtctaggtcataacataccatttgtaagtttgtttgctttttcaggtttatctttgcagtgaattatgctttgctttaaaacattccgctaaaatcataatgggacatataaattattaagctgttagaaatgcattcaaatttgttttttctgtgttctaagaactcaggcaattttaaggataaaaactaacattgagccaccatgcctggtgggactttaacttttaactttggagcacttactccttttctctggagcccatgtttctggatgactattctcagatttttgctggaataaactctcaaaaactgg

SEQ ID NO: 16102 - protein, 394 aa, Homo sapiens
MALEVGDMEDGQLSDSDSDMTVAPSDRPLQLPKVLGGDSAMRAFQNTATACAPVSHYRAVESVDSSEESFSDSDDDSCLWKRKRQKCFNPPPKPEPFQFGQSSQKPPVAGGKKINNIWGAVLQEQNQDAVATELGILGMEGTIDRSRQSETYNYLLAKKLRKESQEHTKDLDKELDEYMHGGKKMGSKEEENGQGHLKRKRPVKDRLGNRPEMNYKGRYEITAEDSQEKVADEISFRLQEPKKDLIARVVRIIGNKKAIELLMETAEVEQNGGLFIMNGSRRRTPGGVFLNLLKNTPSISEEQIKDIFYIENQKEYENKKAARKRRTQVLGKKMKQAIKSLNFQEDDDTSRETFASDTNEALASLDESQEGHAEAKLEAEEAIEVDHSHDLDIF

SEQ ID NO: 16103 - DNA, 1938 bp, Homo sapiens
  CDS (147)..(1196)
gtatcgccacgcctggtctctgggacgcccctccggaccggtttcgcctcgcggagccggtaggtccaggtgcagcggccgcagtgctgcgtccgtgcgccgcgggctggggcggtctcaggtgtgccgaagctctggtcagtgccatgatccggcaggagcgctccacatcctaccaggagctgagtgaggagttggtccaggtggttgagaactcagagctggcagacgagcaggacaaggagacggtcagagtccaaggtccgggtatcttaccaggcctggacagcgagtccgcctccagcagcatccgcttcagcaaggcctgcctgaagaacgtcttctcggtcctactcatcttcatctacctgctgctcatggctgtggccgtcttcctggtctaccggaccatcacagactttcgtgagaaactcaagcaccctgtcatgtctgtgtcttacaaggaagtggatcgctatgatgccccaggtattgccttgtaccccggtcaggcccagttgctcagctgtaagcaccattacgaggtcattcctcctctgacaagccctggccagccgggtgacatgaattgcaccacccagaggatcaactacacggaccccttctccaatcagactgtgaaatctgccctgattgtccaggggccccgggaagtgaaaaagcgggagctggtcttcctccagttccgcctgaacaagagtagtgaggacttcagcgccattgattacctcctcttctcttctttccaggagttcctgcaaagcccaaacagggtaggcttcatgcaggcctgtgagagtgcctattccagctggaagttctctgggggcttccgcacctgggtcaagatgtcactggtaaagaccaaggaggaggatgggcgggaagcagtggagttccggcaggagacaagtgtggttaactacattgaccagaggccagctgccaaaaaaagtgctcaattgttttttgtggtctttgaatggaaagatcctttcatccagaaagtccaagatatagtcactgccaatccttggaacacaattgctcttctctgtggcgccttcttggcattatttaaagcagcagagtttgccaaactgagtataaaatggatgatcaaaattagaaagagataccttaaaagaagaggtcaggcaacgagccacataagctgaagtcacctcgcgttgtttagagaactgtccacatcaatgggagctgtcatcacttccactttgtaaacggagctatcaacaatcctgtactcacttgaagaaatggggccttgctgggaggaacagcatgtaaaactggaacttctaaccccgtcccaaaagaggcggtgtagagcctaatagaagagactaatggataaacctacaagttatttaaatatttaaattattaataaactttttaaagagctggccaatgacttttgaatagggtttgtagaagatgcctttcttcctgtttggttcattgtattgtattaggttaagctctactagggtaatgaaggctctacttttcactttttaaaagtggacaaaagagtgtgattttctttttccaaaaattcctgagtatcaagacgtgcaggtcatgctttggagcctatgcactgtacacaaaggcaaaaccctatgactttggcatcatctgccattgatgtccagcctctgacatgctctttgatttgttaaatgttaaatgagactttaaggctactagaaactagtaattaagtttcttaatggactgagtagccacctacttgtccggctagaatgtttgttgatgtatgagtttagattaacactcaaaagcactaggacagatgtacatagaaggtgcctactcattgtattttgatgatttcattaacaggtaaataaaagttaatacaaaagg

SEQ ID NO: 16104 - protein, 350 aa, Homo sapiens
MIRQERSTSYQELSEELVQVVENSELADEQDKETVRVQGPGILPGLDSESASSSIRFSKACLKNVFSVLLIFIYLLLMAVAVFLVYRTITDFREKLKHPVMSVSYKEVDRYDAPGIALYPGQAQLLSCKHHYEVIPPLTSPGQPGDMNCTTQRINYTDPFSNQTVKSALIVQGPREVKKRELVFLQFRLNKSSEDFSAIDYLLFSSFQEFLQSPNRVGFMQACESAYSSWKFSGGFRTWVKMSLVKTKEEDGREAVEFRQETSVVNYIDQRPAAKKSAQLFFVVFEWKDPFIQKVQDIVTANPWNTIALLCGAFLALFKAAEFAKLSIKWMIKIRKRYLKRRGQATSHIS

SEQ ID NO: 16105 - DNA, 1793 bp, Homo sapiens
  CDS (15)..(818)
acggcgccggagagatggcggagttggacatcgggcagcactgccaggtggagcattgccggcagcgagattttcttccatttgtgtgtgatgattgttcaggaatattttgccttgaacacagaagcagggagtctcatggttgtcctgaggtgactgtaatcaatgagagactgaagacagatcaacatacatcttacccatgctctttcaaagactgtgctgagagagaacttgtggcagttatatgtccttattgtgagaagaatttttgcctgagacaccgtcatcagtcagatcatgagtgtgaaaaactggaaatcccaaagcctcgaatggctgccactcagaaacttgttaaagacattattgattccaagacaggagaaacagcaagtaaacgatggaaaggtgccaaaaatagtgaaacagctgcaaaggttgcattgatgaaattaaagatgcatgctgatggcgataagtcattaccacagacagaaagaatttactttcaggttttcttacctaaagggagcaaagagaagagcaaaccaatgctcttttgccaccgatggagcattggaaaggccatagactttgccgcttctctagccaggcttaaaaatgacaataacaaatttacagctaagaaattaaggctgtgtcacattacttcaggagaagccttacccttggatcatactttggaaacctggattgctaaggaggattgtcctttatataatggtggaaatataatcttggaatatctcaatgatgaagaacaattctgtaaaaatgttgaatcttacttggaatagtcattcaaagattcaagtcagaaatcacagggaaaattctattacatgtttaagtccatttattttactacaaatactatttttgtaatttttaaaagttgctttttaacttatttccccttatgtcacattttaaattatgagttttctattagagttttttggttttaagtttaattgtgtacggatcctcaattattagcaaattcttatatttaattagctttcattagtttatgctgtagtgacaacaacaaagatgtatttcctggtgggggatgtcagctgttgattggctgtgacactgctttgtgtcatcttcttaccatgatcaaaggcgaaggaagggatctcttttgggacattgtgattgttttagcagagagagaaagagatgaaatacacttcggttttctcttaaaagatgcatgtatcatacgtgctttaagcaagtcatgtggccaagcctagcatcatggagccagaaagtatagccttgctgtctgtctacatcatgatgtataaattgatatatctacatgaattatagaaacttagaagtgatctttattcagtcttataatttttacatgaagaatcttaggcctaggaggagaaaatgattttctttctattacctaactagattggggcatatttctgataaagacccacctctagtgagattcatcttttttgtttgtgtgactatattccatagagaagaaagatgggatagctcaacttcattatataccaaagcaaaacacatgccaaatgatgactacattttaccaacatatttagacgagtattcttgactagtgtttactatctatacccccaaaactactactatatagacagaatggaaagtatttctatttgtcctttttttgttttctgttctaattgtcagggacatatgtagtggctataggtttacttaaagggaataaatttggaatgctc

SEQ ID NO: 16106 - protein, 268 aa, Homo sapiens
MAELDIGQHCQVEHCRQRDFLPFVCDDCSGIFCLEHRSRESHGCPEVTVINERLKTDQHTSYPCSFKDCAERELVAVICPYCEKNFCLRHRHQSDHECEKLEIPKPRMAATQKLVKDIIDSKTGETASKRWKGAKNSETAAKVALMKLKMHADGDKSLPQTERIYFQVFLPKGSKEKSKPMLFCHRWSIGKAIDFAASLARLKNDNNKFTAKKLRLCHITSGEALPLDHTLETWIAKEDCPLYNGGNIILEYLNDEEQFCKNVESYLE

SEQ ID NO: 16107 - DNA, 1723 bp, Homo sapiens
  CDS (342)..(1721)
ggcagaccgtcacgtgacgacgtcgattcgcgtgcggcagtggcgaagttgacaaaccccgcgaaaatcgactctttgcatcgcacattttgttgattttccctcgtttttctttctctctttcccccgtccatccgaaagagggttggaaaaaaacaaaacaaacaaacaaacaaaaaaaaaaaacctaacgctgttgggacccggaagcggaaagggcatctttgaggtcgatacttccgggtcattgggagagtgcgggattcctgggccgagagcgggtggctgagccgggacctcgcgtgattctcggaacccgaggagaagcggcgtccggggctatggctgtgactctggacaaagacgcttattatcggcgagtgaagagactgtacagcaattggcggaaaggagaagatgagtatgccaacgttgatgccattgttgtatcagtgggtgttgatgaagaaattgtttatgccaaatcaactgccttacagacatggctctttggttatgaactaactgatactatcatggtcttttgtgatgacaaaatcatctttatggccagcaagaaaaaagtggagttcttgaaacagattgccaacactaagggcaatgagaatgctaatggagcccctgccatcacactgctaatacgagaaaagaatgaaagtaataagagtagctttgacaaaatgattgaagccattaaagaaagcaagaatggcaagaagattggagtgttcagcaaagacaaattccctggagagttcatgaagagctggaatgactgcctcaacaaagaaggctttgacaaaatagatatcagtgcagttgtggcatataccatcgctgtaaaggaggatggggagctcaacctaatgaagaaagcagccagcatcacttctgaagtcttcaacaaattcttcaaggaaagagtcatggaaatagttgatgcagatgagaaagttcgacacagcaaactggctgagtctgtggaaaaggccattgaagagaaaaaataccttgctggggcagacccttctactgtggaaatgtgttaccctcctatcattcagagtggtggcgactataatctcaagttcagtgtggtgagtgacaagaatcatatgcactttggggctatcacttgtgccatgggtattcgcttcaagtcttactgctccaaccttgttcgcactttgatggttgatccttctcaagaagttcaagaaaattataactttttgctccagcttcaagaggagctgctgaaggaattaagacatggtgtgaagatatgtgacgtgtataacgctgtcatggacgtggttaaaaagcagaagccagaactgctgaacaaaattaccaaaaacctagggtttgggatgggaattgaattccgtgaaggctccctagtaatcaatagcaaaaatcaatacaaactgaagaaaggaatggttttcagcatcaatttaggattctcagacctgactaacaaggaggggaaaaagccagaagagaaaacctatgccctgttcattggtgacacagtgcttgtggatgaggatggcccagctactgttctcacttctgtgaagaagaaagtgaagaatgtggggattttcctaaagaatgaagatgaggaagaagaggaggaggagaaagatgaggcagaggaccttttgggaagaggttctcgggcagcattacttac

SEQ ID NO: 16108 - protein, 460 aa, Homo sapiens
MAVTLDKDAYYRRVKRLYSNWRKGEDEYANVDAIVVSVGVDEEIVYAKSTALQTWLFGYELTDTIMVFCDDKIIFMASKKKVEFLKQIANTKGNENANGAPAITLLIREKNESNKSSFDKMIEAIKESKNGKKIGVFSKDKFPGEFMKSWNDCLNKEGFDKIDISAVVAYTIAVKEDGELNLMKKAASITSEVFNKFFKERVMEIVDADEKVRHSKLAESVEKAIEEKKYLAGADPSTVEMCYPPIIQSGGDYNLKFSVVSDKNHMHFGAITCAMGIRFKSYCSNLVRTLMVDPSQEVQENYNFLLQLQEELLKELRHGVKICDVYNAVMDVVKKQKPELLNKITKNLGFGMGIEFREGSLVINSKNQYKLKKGMVFSINLGFSDLTNKEGKKPEEKTYALFIGDTVLVDEDGPATVLTSVKKKVKNVGIFLKNEDEEEEEEEKDEAEDLLGRGSRAALL

SEQ ID NO: 16109 - DNA, 1892 bp, Homo sapiens
  CDS (207)..(1382)
gtaaaacctttagtcgaagcttctctcttaaacttcatcagaacattcatacgggagagaagccttttgaatgcagtaattgtagaaaagctttcagacagatctcatccatcctacttcatcagagaattcacagtggaaagaaaagccatgaatgcaataaatgtggggaaagcttcaatcaaagaacaacccttattctacatatgagaattcatgatggaaaggaaattcttgactgtgggaaggccttgagtcaatgtcagtctttcaatatacatcagaaaattcatgttgttgggaatgtctgccagtgcagaaagtgcggaaaagccttcaatcagatgtcatcccttttacttcataagaaaattcacaatggaaagaaaacacataaatataataaatgtgggagaggcttcaaaaagaaatcagtctttgttgtacataaaagaatccatgctggagagaaaatccctgaaaatgcgaaggccttaagtcagagtctacagcaaagaagtcaccatttagagaatccttttaaatgcagaaaatgtgggaaattatttaataggatttcacccctgatgcttcaccagagaattcacacttcagagaaaccgtacaaatgtgataaatgtgacaagttcttcaggcggctttcaacccttattctgcatctaagaattcataatggagaaaaactatacagatgcaataaatgtgagaaggtctgcaatcggcattcatcccttattcaacatcagaaagttcatacaaagaaaaagaaactatttgagtgtaaggaatgtgggaagatgttttctggaactgcaaaccttaaaatacatcagaatattcattctgaagagaaacctttcaaatgcaataaatgtagtaaagttttcggccgccaatcatttcttattgaacatcaaagaattcatactggagaaaaaccctaccagtgtgaggaatgtggaaaagccttcagccaccgaatatctctcacacgacataagagaattcatactgaagatagaccctatgaatgtgatcagtgtgggaaggccttcagccagagtacacacctcgcccaacatgaaagaattcacactggagagaagccatatacatgcaaaacatgtggtaaggcctttagtcagcgcacatctcttattctacatgaaagaagtcatactggagagaaaccctatgaatgtaatgaatgtgggaaggcatttagcagtggctcagaccttattcgacatcagagaagtcattcttcagagaaaccctatgaatgtagtaaatgtgggaaggcatatggtcggagttcatccctgattcgacatcagaatacacattctgaagaaaaagcctaaggttgttttaaatctataaaatcaacgaatgaggctatcaaacatatggcaaatatgtatttgtctataatgtaaattttgtgtatatgggaccatttgatgatatgtcccactttgaaagccaaagagcaaaagtcattggtgattttgacctcaggatttgaaattaactgaaggaaactcagaagtttggtcagtcattgtgaatgaagatcatttttcatttgataagaattactggctgggcgcagtggcttacacctgtaaccccagcactttgggaggctgagacaggcggatcacgaggtcaagagtttgagaccacggtgaaaccctgtctctactaaaaaatacaaaattagctgggcgtggtggtgcgcacctgtaatctcagctactggagaggctgaggcaggagaatcgcttgaacccaggaggtgggggttgcaccgagcagagattgcaccactgcactccagtctgggcaacagagcaagactctgtgtc

SEQ ID NO: 16110 - protein, 392 aa, Homo sapiens
MRIHDGKEILDCGKALSQCQSFNIHQKIHVVGNVCQCRKCGKAFNQMSSLLLHKKIHNGKKTHKYNKCGRGFKKKSVFVVHKRIHAGEKIPENAKALSQSLQQRSHHLENPFKCRKCGKLFNRISPLMLHQRIHTSEKPYKCDKCDKFFRRLSTLILHLRIHNGEKLYRCNKCEKVCNRHSSLIQHQKVHTKKKKLFECKECGKMFSGTANLKIHQNIHSEEKPFKCNKCSKVFGRQSFLIEHQRIHTGEKPYQCEECGKAFSHRISLTRHKRIHTEDRPYECDQCGKAFSQSTHLAQHERIHTGEKPYTCKTCGKAFSQRTSLILHERSHTGEKPYECNECGKAFSSGSDLIRHQRSHSSEKPYECSKCGKAYGRSSSLIRHQNTHSEEKA

SEQ ID NO: 16111 - DNA, 601 bp, Homo sapiens
  misc_feature (592)..(592): "n" may be a, t, c, g, other or unknown
  misc_feature (599)..(600): "n" may be a, t, c, g, other or unknown
gagaattaagtaaaccctatttaaaccctattcaagatggctcccctggtgtcaccaccggacatggtgcttggggctttgtgaatgatcagtggaggacttgcccacgtgaggcaaaatacggaactaattgtcacgggggtctcacatatcagggcggttgcaaattgtggcaaggcaggtgcgaggggacaccttggagtcccttgggcttcccagggcctctgggggcaccgcagcctctacacagacttgcatgtacctgctgagagtccctcccactcccactcactgaccctgtcccacatcttaaagctgtgcctcctgtttcctggccatgctgacaggtgggacaccttctgcttgctgggtggtgactggatcggcacacatgtgtgacccagcggggggtgtggggtgcaggtgccagagccccaggggctgcagagcctgctccctccctgccctgggtttcaacttcctcagtctcagcaccacctaacgcaccaccttgccctgcatttccccggctttaacatgtgaagccactctgcagggaaacaacgggtcggagtggggtggagtggggtgnggggtgnng

SEQ ID NO: 16112 - DNA, 831 bp, Homo sapiens
  misc_feature (736)..(736): "n" may be a, t, c, g, other or unknown
  misc_feature (804)..(804): "n" may be a, t, c, g, other or unknown
  misc_feature (826)..(826): "n" may be a, t, c, g, other or unknown
tagttcaactttaaatttgcccacagaaccctctaaatccccttgtaaatttaactgttagtccaaagaggaacagctctttggacactaggaaaaaaccttgtagagagagtaaaaaatttaacacccatagtaggcctaaaagcagccaccaattaagaaagcgttcaagctcaacacccactacctaaaaaatcccaaacatataactgaactcctcacacccaattggaccaatctatcaccctatagaagaactaatgttagtataagtaacatgaaaacattctcctccgcataagcctgcgtcagattaaaacactgaactgacaattaacagcccaatatctacaatcaaccaacaagtcattattaccctcactgtcaacccaacacaggcatgctcataaggaaaggttaaaaaaagtaaaaggaactcggcaaatcttaccccgcctgtttaccaaaaaaatggaagcaaacagaacaggctgatcttataaatgagctatatcaaggcaagctgaaggactacgtgagatgtctggaatgtggttatgagggctggcgaatcgacacatatcttgatattccattggtcatccgaccttatgggtccagccaagcatttgctagtgtggaagaagcattgcatgcatttattcagccagagattctggatggcccaaatcagtatttttgggaacgttgtaagaagaagtgtgatgcacggaanggccttcggtttttgcattttccttatctgctgccttcagctgaaagatcgatttgatatacaaaaanccccccccaaatttttgggggnccccc

SEQ ID NO: 16113 - DNA, 857 bp, Homo sapiens
  misc_feature (741)..(741): "n" may be a, t, c, g, other or unknown
  misc_feature (761)..(761): "n" may be a, t, c, g, other or unknown
  misc_feature (772)..(772): "n" may be a, t, c, g, other or unknown
  misc_feature (844)..(844): "n" may be a, t, c, g, other or unknown
gtcggcagtcggacacagcccagggcactcgactgagagggcttaacgggactgtcggggcacggaggggacttcactcagcctcagggccaaaggaggcttcctggaggaagtgatgactaggcagggtcttgaaggaaaagttcacctgccaggcagaggaagcaggggcactagcctggcatggcatggcgcggggctggctgatgagcggagcagctggggtgggggccttggtctccgaggacctgggagcaagctaaggaacttgggctttctcctacgggcagcgggaagccctggcaagtttaagcaaagagtggacacactcaggctgggaggcgtctttacccctggggagtggagaggagaggatagagtcaggggttcagcaggagtaggagaggatgtgtggcctgggggcttctccgagtcagcaatacataaggggaagccctaggaaggcccctcacgcctcagagccagagccactgacccctgtgtcttctccctgcccagaggagaccaactcacaggaccaccgtccccctagcggtgctcagaaaccagccccctcggtgagtgacttgagtggggatccaggcctctcattccctgctgggggttgtgggttctagagtcggggaatgagccctctgcatggggtaaggcactgcactccccacggcggggcacttccagagtggatggatcaaagatgatcacctcgtgccctttctnaccaagccatatgctgggcnggcacacaganggcaccacttgcctttgtctgatggaagaattcaagtcttaaagaatgaagtgactttcccagtgttagtancattcctggtctc

SEQ ID NO: 16114 - DNA, 647 bp, Homo sapiens
  misc_feature (578)..(578): "n" may be a, t, c, g, other or unknown
  misc_feature (586)..(586): "n" may be a, t, c, g, other or unknown
  misc_feature (622)..(622): "n" may be a, t, c, g, other or unknown
tttaaatgaaaaatcaagacacgcctaattaaacacagatattaaaagttttatttgacctttggctggttcctttttatggtcttaagtgctttagagaatttttaaacagattgtttatttaagctgttggcaaaagcatagtttcattagtaagttccattctgcaagtttagctactggatcccaaccattttcaggttgcgtattgcatattgttgattttcacatcttactctctcactgttcccttgtggaggaataaaagattttagaatagagtactgggaaatatcaaaatgtacacaccttgtatgcatatcactgtagctggcaagtgcaaaaaaagaagtagcatgaagtgtaaaaggagaagggaggtaattgaagtgttagatggtttgattgactgcaaatgggacaggaaaaaaaaggtagtcatcacctatttggagctaaatatgttgggaccacagaagccccctaaaatgtttcctggaagggacttggtacaattggctatgaaattgtactcaaaaccacttagtcagtactgcccagggaaatggaacctgtanctggctgncaacacacatacaatgtggtcatggcggggcggtanggaaggattatttacatttttttag

SEQ ID NO: 16115 - DNA, 698 bp, Homo sapiens
  misc_feature (501)..(501): "n" may be a, t, c, g, other or unknown
  misc_feature (542)..(542): "n" may be a, t, c, g, other or unknown
  misc_feature (577)..(577): "n" may be a, t, c, g, other or unknown
  misc_feature (668)..(668): "n" may be a, t, c, g, other or unknown
  misc_feature (683)..(683): "n" may be a, t, c, g, other or unknown
  misc_feature (695)..(695): "n" may be a, t, c, g, other or unknown
ttctctcttcccaaaactcagacactgagagaggttctcgtcagagtccaaaatgcacattaagttgtggggatcttattaacaatgatgattctgatgctgtaggtttgaagacgactcaagattccctggagacatcaatgctgctggtccatgggccacggcttggatagaaagggtttagggagaggttgacaagtaataatgcagggtgggtgagtactgctctactggcattctaaaagcagagtgagacagagaggggtatggggagtggggaggaggcaggcagagcctcctagaagtgagtgacttggaccctgaataggtgagtcaatttaccaagcagaaaagtaggaaaggcctttggtcagagggagcaccatggatgtggaccccggctggctcctgcatagagtgaagaatgcagaggaaggtgatgggacgatggccagagaggaggctggaaagctcaccagggtctggatggtgaagggtcanctctgattgccatggtaagacctaagactccagtcagcacnggagtcttgaggtttcacagaggtctggttatagnggacatgacaaactgctttgaaaatagccaatactacatcatgttagagaatttgcataacccatcacgggcgcggtggctcacgcctgtnatcctagcactttgngaggccgatgcnggc

SEQ ID NO: 16116 - DNA, 850 bp, Homo sapiens
  misc_feature (715)..(715): "n" may be a, t, c, g, other or unknown
  misc_feature (720)..(720): "n" may be a, t, c, g, other or unknown
  misc_feature (753)..(753): "n" may be a, t, c, g, other or unknown
aaaccctatgaatgtataaaatgtggcaaagcctttagatgttccagagtcctcagagtccatgaaaggactcacagtggagaaaagccctatgaatgtaaacaatgtggtaaagccttcaaatattctagtaacctatgtgagcatgaaagaactcacactggagtgaaaccttatggatgtaaggaatgtggtaagtcgtttacttcttccagtgcccttcgaagccatgaaaggactcatactggagaaaaaccctatgaatgtaagaaatgtggtaaagccttcagttgttccagttcccttcgaaagcatgaaagagcttatatgtggtaaaaaacaacaacaacaaaacacctctgtcaatgtaagaagtgtgttaaagctttcagttattctagtttcattagaacacgtgaaaaaattaaaaactcaaattagagagaaacccaacacatgtaaggaagattagaatgtatgcaattttcctagttcccttctaaaacttagaaggacccgtcctgggaaagaacgtcataaaatacgaaaaatgtgttagaacactttattttcccagccgctttcaaatatatttttatcagtggttcattgttaaagaaggtgtctatactttagattttcagttttttgcagggaatcatggagctgagaatttcacagatactttataagccatagtacatgagcttaatangctgngttttggttctcatcagttaacataatttttgnctattcatttaaaaatttgtgggatccctagactaagttgaaatgtatttctaatagtaggcaattttaattttcatgtagttggttaatggtctct

SEQ ID NO: 16117 - DNA, 791 bp, Homo sapiens
  misc_feature (659)..(659): "n" may be a, t, c, g, other or unknown
  misc_feature (741)..(741): "n" may be a, t, c, g, other or unknown
  misc_feature (775)..(775): "n" may be a, t, c, g, other or unknown
  misc_feature (778)..(778): "n" may be a, t, c, g, other or unknown
agcttccacccgtcctagccagggtgagaccaccctgcctgctggtggagccaggcgggcccagagcccacctggaagatggaggctgcacggcactgcgtggtccggggcagccccagggcagcagagcattccctggccttccctgctggtgccagctccttaccacagagacgccgcgtggaactcactactggcgatcgtggacgccccaggaaggcgagtggcacgaggtgtggcggggctgccacaggcagtcacggagcacccgctggtgccaggctcacccctcagatacagcctcgtgggctggctcagtggcggccctgactctccaaggtctgaggtctgctctgtcttccattccatgactcacaggaggttcaaggttacttccactgtggcagctgcctccctcctccctctccaggatggaaggaggtcctgctgtgcaaacctgcctggctgtccccttccgggacacggacggggggtttcctggcagttcctggtcctcccttgagggctaagggtccccccgttctgtggccgcctccagcacatccacccagagtccctgggcgtgaacacagccgctggggacgatcaccggctgcccagcgtgcagccctggggctgcgtccttatctccgctcctnctgccttctgcccagctgttcaacgtctacccatggctcggggccctgcttcagctgcaccggcccgtcctgcgcaagatcnaggaggtcctgccattctgaggaaccttctggangcncggaggccccact

SEQ ID NO: 16118 - DNA, 794 bp, Homo sapiens
  misc_feature (714)..(714): "n" may be a, t, c, g, other or unknown
  misc_feature (748)..(748): "n" may be a, t, c, g, other or unknown
  misc_feature (777)..(777): "n" may be a, t, c, g, other or unknown
ctttgcgggccactcggccaactgacgtcggcctctcctgtctggatgtccagtttctgtggctcactcctcaagccagatcatctgggactgagggtggcctctgggctcctgtagacttccacagccaggatttcacatccctccccagagcctcggaccgaacagccacaagcagccatgagtgtcgtgcctggactaagctggagagacaaaggcgtttgtggcaagggcccagctggaagccctggcaggccagagcatgcatgtgctggcttgcacgagcatactttggtgtttgtgttggggacaccgggcttctgagggactggcgtggctccagggtggggagcagcctggttgaagcgtggccaggcactcactctgttgttcagatcccagctccactgcctgctgtgtccacagtctcctcacctgtcaaatgggaatatctatgtggcgggagggtgctgaggtttccacgagctaatctgcctgctgtgtagtaactagtagcttttcttactgttagtgaacttgttttagtctgaaggaaggcacccatgccccaggtgaagtccagctgagttcagtgaggacgatggagacccttggtcttggcacccttctgccttacactgggaatgcctcagcttgctcctgctgtgtgtctgtggttgcccactttctgctggtctccgagagatgattcangtgttcaggaatctggtcgctattacatcacctncttgggagaaataaaagtggagcagcctnatccagacagcaaagca

SEQ ID NO: 16119 - DNA, 767 bp, Homo sapiens
  misc_feature (630)..(630): "n" may be a, t, c, g, other or unknown
  misc_feature (671)..(671): "n" may be a, t, c, g, other or unknown
  misc_feature (738)..(738): "n" may be a, t, c, g, other or unknown
  misc_feature (752)..(752): "n" may be a, t, c, g, other or unknown
gagctgatgtccactaatagaaagaatagaaagatctgattatttcctttttgccagtgtgtagtcaccttggtaaaaggccataggtccctttggaaaaggctgggagaaagatttaccttataaatgtttggcggtggagtggagttcttccacaatagtacctactctccccttcattcaaagagttctgggtctgtaaaccagctcaggtctggtaattgattgaggggatatgactctatttttatgtttcaagttagacttgttcatttgacctacaactcttccacttctacaaagcaagtcagaatttgctagacttcccagctgtttcacttccaggaacaccatgatcaactagtcagcataggtctctgagtcagactattttgactgctgtttcaactccattgtccattatggtaaccacacccgccttgcttttggtggtttattgccaccacttggctgccaccaacctggggcccaattacccccattgcacttaggttttccaacttgatggcagcagtttccacatccttgacatctattctcacagatattcctcaaattgctgtctgtctgtttaaattggaaaaatcatttagttcttttgaagtgtancgcaccttctcatgggtcatactttgtacttcacctttcanggcttgctgggatttgagtccagttatcaagttgataaggaaagtgggatgggggtgggtcctgaanagaatcagtggggnctttcatgacagctg

SEQ ID NO: 16120 - DNA, 679 bp, Homo sapiens
  misc_feature (590)..(590): "n" may be a, t, c, g, other or unknown
  misc_feature (611)..(611): "n" may be a, t, c, g, other or unknown
  misc_feature (620)..(620): "n" may be a, t, c, g, other or unknown
aaggtgggcctcgagcaaagccgctagaggtggggtgcgggtggtcggcctcaggcgagccccggggcacagcccggggcgggaggcggagcttggcggccgagatctccgcgctgcagttagccccgccgagcgccaggagctgcgggtaggaggggcgagagaaaggatgggggtacagaaccggaagaaacgaagggctcgtccgcttcggcttgtcctaatttggtgcccaatctgaagctgggctgtaccattgcatacctgggggaggctgtggcaaaggtgacaagaaggccgaaggcacaaagggaagctgcacccattcctggaggagcttaaatagtgactcgagtgcaagaatttaaaaataccgagacagccctaggtggaaaacttccggaaggcccaagcgttcgtaagggctctctaccccgctcggagcatagatggtaccgtccggaagtccgggcggagaccgtagctgcgcttctcgcgaaagggcaggcatcgcggggctggccactttcgtacttccgctttccgcccagccagcgcccgcgatgactgcactcttcgccctacctgantgccgtgcggccacattgcangctggcctntgctggagaacttcttctccaagttgtggaacgacacaacaagccggaagtggaaatca

SEQ ID NO: 16121 - DNA, 727 bp, Homo sapiens
  misc_feature (657)..(657): "n" may be a, t, c, g, other or unknown
  misc_feature (688)..(688): "n" may be a, t, c, g, other or unknown
  misc_feature (694)..(694): "n" may be a, t, c, g, other or unknown
tttgcatcccaataatacagccctttggcagaaataccttttattttgccagagccagtttagtaccttttcgatatcaaaaattcacagtctttatggaaaatgcttgagcactttgtctgctgttaaggacggcagcatcttatctcaccctgcgttgcctggcacggaagaggccatgtttgcactctttcttcagcagtgccactttctgcggcaggctggccactctgagaaggccatctcattgttccaggccatggtggacttcaccttcttcaaacccgacagcgtaaaagatctgcctaccaaaggacaggtggaattctttgaacccttttgggacagtggagagccccgggctggggagaagggagcccgaggctggaaggcgtggatgcaccagcaggaacgaggtggctgggtggtcatcaacccagatgaggatgacgatgaaccagaagaggatgaccaggaaataaaagataagactctgcccaggtggcagatctggcttgctgctgagcgttcccgtgaccagaggcactggcggccctggcgccctgataagaccaagaagcaaaccgaggaagactgtgaggatcccgagagacaggtgttgtttgatgatattgggcaatctttgatcagactttncagccatgatcttcagttccagctggtggangccttnctgcagttcttgggtgtgccttctggctttact

SEQ ID NO: 16122 - DNA, 863 bp, Homo sapiens
  misc_feature (766)..(766): "n" may be a, t, c, g, other or unknown
  misc_feature (803)..(803): "n" may be a, t, c, g, other or unknown
  misc_feature (861)..(861): "n" may be a, t, c, g, other or unknown
aacagaaaaatccattagtattaaccattatctttcatttgtggattcttacactgtttcaatggaagtgccttctccccagaaggaaatagaaaatgtgaaatatgaaaagaaaaaatacagggttaacaatattttctaaattactggtaacctgataagaattcatattaatttttgacactaaactaacttaagtataaagccatttttgttaaataaatgagtagatgatacttagattcccatctttactgtttgtttaaatataatttgcttgttacagtataaaaccaactagtttgtatcaaagcttggatactttatcctagtaaacattctgtctaccttgagtaaaaattctggtaaacagtttttttttaatcagaagaacacttttttcattaaaaagaagagctccatttaaaaaacaaacttcatttctagctctaaaatataacaagggttaattaaatctagactaaacaaaattaaacagttatcctgtaatagttaatagcctgttgtttgagtagctaaatgatttaaaaaacagatcaagtacattgatacctttgtatatttatttttgcaggtgaaaaaagccaagatgcaggaatcaggagagcaaactataaggtatgtaaagtttgctttctttttaatgaactactcataagttttggttttttttttcacatgctgattagcgtatgggcatgctttgccctctttttgggtcttaccatcagctggtacattttgnaattatttgggttaaagaataaaaatttccttttccnaataggtttttcctggaacttggggcactggatttggtccttatgcctttcattattnat

SEQ ID NO: 16123 - DNA, 658 bp, Homo sapiens
  misc_feature (452)..(452): "n" may be a, t, c, g, other or unknown
  misc_feature (573)..(573): "n" may be a, t, c, g, other or unknown
  misc_feature (637)..(637): "n" may be a, t, c, g, other or unknown
  misc_feature (653)..(653): "n" may be a, t, c, g, other or unknown
cttgcacttaacattgttttgatttaattggtatttttaaataactagactcaaagatgaagtgtctgaaatgttgattatgtatcttcagtgggtcatcgccagagagcggtttcagcaagctgcagatctgattgatgctgagcaacgaatgaagaagtccatgtggggtcagttctggtctgcacaccagaggttcttcaaatacttatgcatagcatccaaagttaaaagggttgtgcaactagctcgagaggaaatcaagaatggaaaagtaagtagaagaactcattaagagattgtttgggggttatgttgtttagtctttgtgggtgctgaggttttctgcttgtaaaatctggttttcctaaaggatagtaaaacttctaaaaaatacatttcttaaaattataaaagcaatgcctgcttagagaatttagagagttcagaanagtataacaaagtaaacatcactataattggtcatccatagctggtagcactggtaacatatggatgtgtattgcgttaaggttttttcttttcggtgaatatttatctacttaaagcatnagatactataaactgtcaagggcaggggcttcactcatgcttactactgctgcaatcctatctnctggctaaatttttgncaaat

SEQ ID NO: 16124 - DNA, 854 bp, Homo sapiens
  misc_feature (755)..(755): "n" may be a, t, c, g, other or unknown
  misc_feature (798)..(798): "n" may be a, t, c, g, other or unknown
  misc_feature (833)..(833): "n" may be a, t, c, g, other or unknown
atagataagtagtacatggtggataacttctacttttaggaggactactctcttctgacagtcctagactggtcttctacactaagacaccatgaaggagtatgtgctcctattattcctggctttgtgctctgccaaacccttctttagcccttcacacatcgcactgaagaatatgatgctgaaggatatggaagacacagatgatgatgatgatgatgatgatgatgatgatgatgatgatgatgatgatgaggacaactctctttttccaacaagagagccaagaagccatttttttccatttgatctgtttccaatgtgtccatttggatgtcagtgctattcacgagttgtacattgctcagatttaggtttgacctcagtcccaaccaacattccatttgatactcgaatgcttgatcttcaaaacaataaaattaaggaaatcaaagaaaatgattttaaaggactcacttcactttatggtctgatcctgaacaacaacaagctaacgaagattcacccaaaagcctttctaaccacaaagaagttgcgaaggctgtatctgtcccacaatcaactaagtgaaataccacttaatcttcccaaatcattagcagaactcagaattcatgaaaataaagttaagaaaatacaaaaggacacattcaaaggaatgaatgctttacacgttttggaaatgagtgcaaaccctcttgataataatgggatagagccaggggcatttgaangggtgacggtgttccatatcagaattgcagaagcaaaactggnctcagttcctaaagataatcttccttcattctaantcaattgcaagagtgggagta

SEQ ID NO: 16125 - DNA, 845 bp, Homo sapiens
  misc_feature (773)..(773): "n" may be a, t, c, g, other or unknown
  misc_feature (832)..(832): "n" may be a, t, c, g, other or unknown
  misc_feature (836)..(836): "n" may be a, t, c, g, other or unknown
acgttatcttcagggagtttcaggaggtttttggctcaaggcacccaactgtcaggcacaaagaaagcattgtgtccctaccctcactgctctcctgtgcccaggttattaacacaaattccattattgtcaaggctttggctagaatggcttgttcctgctggggctgaccattagaactgagatggaggaacaaaagctcccccgatcccgatcctaaccttccacccagtcccctcccactccccaggtcccataaagtggcgggagcatcgtagcgtaggaagaagccgccacaccttcctccataacctgggaggatggaagagctcttcgaagctttgctcttcgtgtccccctgaaacaagggttactgtgagtcttgcacacaaggaacatgcgctccaaggttcctagccaggtgggtgctctgcaaagttagggcaaagagagtctggccacatgcagcctctccactggagaaggattttcatctgccaggtggcggggcccttagcctcgttaatcctgcttaatcctgctagaacatacctacagggagcccactttccacgcagagcatcccttgaaggaggggcttcccagaatgctgaggattctgggcttctcagactccgatcagatgcaccttagccctgggatcagtgccccagccctgcctgccagtttcctttttcacttcaccatgagcataagtttgggtgggaactcaacctgtcattcactttatactgagttccactctgtgccanggcctgacctgtgcactggcaaaaagagcagggaacagcaaaaccctttcttccaccgngggncttggaaaa

SEQ ID NO: 16126 - DNA, 767 bp, Homo sapiens
  misc_feature (703)..(703): "n" may be a, t, c, g, other or unknown
  misc_feature (720)..(720): "n" may be a, t, c, g, other or unknown
  misc_feature (739)..(739): "n" may be a, t, c, g, other or unknown
aatacattattataaaaaattacttgtcagttggacttagatccacaaaaggatattaattaaatgctaaatgtattcaatctattaggattctcaaaagtcacacttcaatttcttccagcagcaactgccaatctgaaaaagtgtttgaaaatgtaatgcttatgggtagaagcctggtaatgtgactcaatttaaattcatctggataggaaaattggcagcttttatctaaccttatagccaagatgatggaactcaggtgtgtcagggccctctagctttcggcaaaggaaaaaagtaggtcccggtacaattcaagcccacaggaaaaatacccaaaacaccataacactttgatctctgcaaggatgaaataaatgaatttggacccttttctctcagtctgccacattggtccaaattatattcaaaaacctctgttacatttgagtaaagaaattaattttttaaggggacaaacccatttattagtgaacgtagcatggaagacttagcgtgccgaaataaatgggaaactcatacaaaaagaaatgtgaacaatctgaaaaacagcctggcagttgcctgatgaaacacgccgtacactttactgcctacagaacccttccagtcctcctcccagcccgccatcacaggtcccttagttggcaaggagttgtaagaaagggggagggaaatnccaggaacgtggaagtngatactctctaccatgaanacactcggggatcgctcctgagtctagg

SEQ ID NO: 16127 - DNA, 231 bp, Homo sapiens
  misc_feature (195)..(195): "n" may be a, t, c, g, other or unknown
  misc_feature (201)..(201): "n" may be a, t, c, g, other or unknown
  misc_feature (224)..(224): "n" may be a, t, c, g, other or unknown
atgcatgtgtgcctgtgtgtgtgtgcctgtgtgtgtgggtgcacatttgtgtgtgtgtgtgtgcctgtgtgtgtgtgtgcacgtatgtatgtgtgcacacttgtatgcatgtgtgcctgtgtgtgtgggtgcacatttgtgtgtgtgtgcctgtgtgtgtgggtgcacatttgtgtgtgtgggtgcacatttgtntgtgtntgcccctgtgtgggtgcacattngtgtgtg

SEQ ID NO: 16128 - DNA, 817 bp, Homo sapiens
  misc_feature (734)..(734): "n" may be a, t, c, g, other or unknown
  misc_feature (790)..(790): "n" may be a, t, c, g, other or unknown
  misc_feature (802)..(802): "n" may be a, t, c, g, other or unknown
ctatcgagaatcactgcagtatccagcagcaaaggaagattgctcagtacctgaaaggaatattcggagacaaactggacctgtcatctgttgatacaggggagtgcaagcagcttccaagccctcaaagtttgaaaggcaaaattctagtgaagggtaagaagttgccttatcaccttggggatgatgcagaggaaggggaagtttccgatgaggacagtgcagatgaaattgaagacgagtgcaaattcaagctccattatagtaatgggaccactgagcatcaggtggaatctttcataaggaaaaaactggagtcactgttaaaagaatctcaaattcgagataaagaagatcctgatagtttcacagtgcgggcactactgaaggccacgcatgaaggcttaaatgcacacctgaagcagagtccagatgtaaaggaaagtggaaagaaatcacatggacgatccctcatgaccaactttggaaaacataagaaaactacaaaatcacggtctaaatcttacagtactgatgatgaggaagacacacagcagagtactggcaaggagggtggccagctgtacagattgggtcgccgaaggaaaaccatgaagctctgccgagaactctctgatttggttgtgtacacaaactccgtggccgctcaggacattgtggatgacggaaccacaggaaatgtgttatcattcagtgaaacaagagcacatcangttgttcagcaaaaatcagagcagttcatgatttataatcaaaagcaacttacgangatttacccctntggctaccgcattga

SEQ ID NO: 16129 - DNA, 799 bp, Homo sapiens
  misc_feature (671)..(671): "n" may be a, t, c, g, other or unknown
  misc_feature (739)..(739): "n" may be a, t, c, g, other or unknown
  misc_feature (761)..(761): "n" may be a, t, c, g, other or unknown
  misc_feature (794)..(794): "n" may be a, t, c, g, other or unknown
taactaatacatgtacaaccaatcagacttgccatggtatgggatctatataatcttccaagcccccttaagtgggcgataatgaaaactttatcattaggaggaggtttagagagttgtttttattgacatcttgtcttgattcctcttctgtgtgacccactggattcagaggtccccatgagcaccctcaggttcaatgattcatgagtagaactcagaggtagggaaaactgttatatgcacatttagcatttattacaacaaaaggatgcagatgaaaagcagcaaatgtgaaaggcacctctagagagagtccaagagagcccaggcacaagcttccagtggggttgcacagtcagcatctaatcctcccagaaataatgtttaacaacacgtggagtattgtcagccaggaaagctcatccaagttttggtgtccaggggatgtttgggggtatggagtaggtatggagtgccttcatggcctgcatggctaaacttagttattcagtctccagtccctctagaggtcaagctgatactgcacgacctaaggccccaccataaatcacattgttaacataaactatctgtcatggcacgaagccccaggtacaagagacactcatcaggcaggatattccaaggatttacaggggattccccangagctggtcaaggaccagatgttcctctgaaaggtcaggatttgagctcatctgtggagtacgtctgnggagtcaactttcttctgcatncccacatactgatttgccccttcattggatcanaatcc

SEQ ID NO: 16130 - DNA, 770 bp, Homo sapiens
  misc_feature (731)..(731): "n" may be a, t, c, g, other or unknown
  misc_feature (735)..(735): "n" may be a, t, c, g, other or unknown
  misc_feature (749)..(749): "n" may be a, t, c, g, other or unknown
atttcaagggatccgtagactgaaagaattaattctaagctccaacaaaattacttatctgcacaataaaacatttcacccagttcccaatctccgcaatctggacctctcctacaataagcttcagacattgcaatctgaacaatttaaaggccttcggaaactcatcattttgcacttgagatctaactcactaaagactgtgcccataagagtttttcaagactgtcggaatcttgattttttggatttgggttacaatcgtcttcgaagcttgtcccgaaatgcatttgctggcctcttgaagttaaaggagctccacctggagcacaaccagttttccaagatcaactttgctcattttccacgtctcttcaacctccgctcaatttacttacaatggaacaggattcgctccattagccaaggtttgacatggacttggagttccttacacaacttggatttatcagggaatgacatccaaggaattgagccgggcacatttaaatgcctccccaatttacaaaaattgaatttggattccaacaagctcaccaatatctcacaggaaactgtcaatgcgtggatatcattaatatccatcacattgtctggaaatatgtgggaatgcagtcggagcatttgcctttattttattggcttaagaatttcaaaggaaataaggaaagcaccatgatatgtgcgggacctaagcacattcagggtgnaaanggtagtggatgcantgggaaacatataatatctgg

SEQ ID NO: 16131 - DNA, 560 bp, Homo sapiens
  misc_feature (479)..(479): "n" may be a, t, c, g, other or unknown
  misc_feature (523)..(523): "n" may be a, t, c, g, other or unknown
  misc_feature (534)..(534): "n" may be a, t, c, g, other or unknown
aaaaaaggacagcgagcggggagccccgaggacccccttttccctgcccagggattgagctccagagcctgttagggagctacccagacaggctttagttcctaaagtgctgaggaaacgcacggggcggtaaaggggaggctcgtcggtgagatggcgccggatctcgcttctcagaggcattcagagagcttccccagcgtgaactctcggccgaatgtaattttgccaggccgcgagggacgcagagaggggctgccaccaggcgggggcacgcgcggtagtcttgtccctacccgcccggtgccgccgtccccggctcccctcgggacgagtccgtacagctggagccgttccggacccggaaggggcggtggcgcagggtcctcgcgcgtcccacgtggggtcccgggcccagcagtctgcgcaccgggctcgctgctgcaccacgcgtcacccacgcagaccatggcagccgncgacggttcgctcttcgacaaccccaggacgttctccagacgtnccccagcccangcgagtcggcaagcaaaggctacgaa

SEQ ID NO: 16132 - DNA, 700 bp, Homo sapiens
  misc_feature (607)..(607): "n" may be a, t, c, g, other or unknown
  misc_feature (651)..(651): "n" may be a, t, c, g, other or unknown
  misc_feature (674)..(674): "n" may be a, t, c, g, other or unknown
tgactatacatttgcaggccttacacgccatactgacaggtgccacttacgtgactcatcagatgatgtcaccattgctgccaattatgggaaataactaatgcctattccagggatgagcccaaaccacacataaatgggttctaaatctcaccctcctaacctgcagtgagtccccccgttccaccctcttgaggctgcaaatctactgagaaggaatgggaaggattctacaacccaacttttgatactttttggccatctctcagtctctcccagcccctacccccacaccacctccctgctcccaggcagagaccgggttgcactttgttagggccagcaggtcaactgtaatggccaagagtgagttaaggctggaatgagaaatatgccccaagcttggaggggtaagcaggaataacacaaagcaaggaaagagattctttttgccctagtgaggaaaggaagcttcagaatgagggctggaggatagcaacttaggactgcagaagggggcagcttatgaagatgggagaaagtgggactgaagttgtaggggagcaggagggtagtgattttccgcttttctttctttctttctttntctttctttctctttctttctctctctctctctctctttctttntctttcttctttctttctctttntctttcctctttttctttctttcttt

SEQ ID NO: 16133 - DNA, 452 bp, Homo sapiens
  misc_feature (380)..(380): "n" may be a, t, c, g, other or unknown
  misc_feature (383)..(383): "n" may be a, t, c, g, other or unknown
  misc_feature (393)..(393): "n" may be a, t, c, g, other or unknown
  misc_feature (421)..(421): "n" may be a, t, c, g, other or unknown
  misc_feature (426)..(426): "n" may be a, t, c, g, other or unknown
aagggaccggcacccaggggacagggcgggcgcccggggcctgcgcccctcagcggtatctggaaatatttttggttgtcatgatggggtggggtacaggccaggggtgctgcttagcatctggacagcccccactatggagaatgatgaggctgagaaagctccccaggccggggctctcctgtgaggcaagtctcctggcagtcttcaggtgtggcaggggttggggtgggcccgggggtcatgtcccatctcagctggtcctgagaagctgcctggtatacagtcaccggcacagagagctggaaagtgccctcgaccccagaacctgggtcctgtgaagacatccaccctgtgtgaggccagggaatgctcatcanatnggggcagcanggggtgtcaccatgggtgggggttcctnccaangcaggcagctgatctggccccacctc

SEQ ID NO: 16134 - DNA, 429 bp, Homo sapiens
  misc_feature (178)..(178): "n" may be a, t, c, g, other or unknown
  misc_feature (248)..(248): "n" may be a, t, c, g, other or unknown
  misc_feature (270)..(270): "n" may be a, t, c, g, other or unknown
  misc_feature (410)..(410): "n" may be a, t, c, g, other or unknown
  misc_feature (425)..(425): "n" may be a, t, c, g, other or unknown
  misc_feature (427)..(427): "n" may be a, t, c, g, other or unknown
aataggaaacaggattgggcctgtttgataaaggatgtgcttgtgtgtgtgcatgtgcgtgtgtgtgtgtgtgtgtatgtgtgtgtgtattggaggtctttaggaggagagaagcgtggaaggacagcatcaacacctggcatgggagccaggctttggcactggtggtagtggggangcaaggtgtgttatggggcatgcaagcacccttactccttgggacactcatcattccccagacattgctngcctgtgacatctctgtggcangggtgagacgtgatgctgacaggggcagtagagtaggggttaagagcacgacgtttgaagttgcacaaacctggaatttcagcgtcaacttttactgtgcccttggatgagctactgatcccttctggggtgttttttcntattattattacacntnaa

SEQ ID NO: 16135 - DNA, 668 bp, Homo sapiens
  misc_feature (276)..(276): "n" may be a, t, c, g, other or unknown
  misc_feature (402)..(402): "n" may be a, t, c, g, other or unknown
  misc_feature (502)..(502): "n" may be a, t, c, g, other or unknown
  misc_feature (584)..(584): "n" may be a, t, c, g, other or unknown
  misc_feature (597)..(597): "n" may be a, t, c, g, other or unknown
  misc_feature (601)..(601): "n" may be a, t, c, g, other or unknown
  misc_feature (643)..(643): "n" may be a, t, c, g, other or unknown
  misc_feature (650)..(650): "n" may be a, t, c, g, other or unknown
acgtcagtccccgcgcttttcggaggctgccagcgtcccacaccagccgcaggtgaaaaccggcagaaagacattaagagattttcctgcagtcactgctggcagatgatagagccaggatttgaaagcaggcagcctggctccagaccctgtgctcttaactcccgttttgcatcaagaacagaatcctatgaaaggcttgtacagtgcttggtactgagtaggcactccgtcagtattttagtagctattattccaaaggacactgtattctangtactaagacaatgtgaatggaatggaaaacaattcctccctgcagaagccaactgtctaggaagacagataatgacattattaaaataatcagaacattggcaaaataaagaagattgaaatgcngttcatatgacagtgctaattaatcatactttttagatctatgaaaggccataaaggttaaattgacttggaaatggtaaacaagacaatggttgtgtcnctgatcggtgatggccactttttggttatccttatttgccatttaaatgattgaattgaaaggaagaagtaagacttggaanatgaatattgaangaanggtgaagatgggaaaagataaaggggtttattctgaaaacantgactanaactctgaggatagcagc

SEQ ID NO: 16136 - DNA, 481 bp, Homo sapiens
  misc_feature (443)..(444): "n" may be a, t, c, g, other or unknown
  misc_feature (448)..(448): "n" may be a, t, c, g, other or unknown
gatgcagcagctggctgaaggctccagagggttccccgaggtgggactggcctctccccgtgtgtgtgggcaccacagtccctgggcaagcagggtgctctgggaccgcacttcatcgagctcacgagccagctaggctctgtttgtgatagaaaaatcaagaccatgttaatgatcgtaataaaagctttctactgtcgttggggtggtgggtggggctgggaaaaaactggtttgagcttttagagtttgcctttgtaccttagagatgtgtctcagggccaggcatgggacctgccatcgagggttcctccccgcaccctcgattttcctgttttgcttctctctccatttctgtccaggcctccgcccaattccacagtgaggggtggttaggagctatgggccaggatggctccttgggaagggaatcgggatcccannctangaagaactggcagcccgtcccactgggcccaca

SEQ ID NO: 16137 - DNA, 568 bp, Homo sapiens
  misc_feature (127)..(127): "n" may be a, t, c, g, other or unknown
  misc_feature (495)..(495): "n" may be a, t, c, g, other or unknown
  misc_feature (537)..(537): "n" may be a, t, c, g, other or unknown
  misc_feature (541)..(541): "n" may be a, t, c, g, other or unknown
  misc_feature (546)..(546): "n" may be a, t, c, g, other or unknown
  misc_feature (554)..(554): "n" may be a, t, c, g, other or unknown
gaacaggacagcttcatcgagccctatgccaccacctcacagctgaggcctcgaccaaattggcagagtgagatgggaagaagatcttctttgccatcctttgaaacactggactatggggacgaanaggacatttaaactcagctgtcatccagcggcaaggaattgggggatgtcagtgcccgggaggacagaggaggccacagtgatgacctgtacgctgtgccacacagaaatcaggtgccattgttacatggggtgaacagtgaagacgatgaaaatatttctcatcaagatgggtttccaggctcccctcctgcaccacagcggacacaacaaaaagatggtaaacaccctgttctgaatttaaaggatgaaaaacctccattatgtgagaaacctccaccctccccaggtcccacattgttacaagatctttggggtgtcgcttttctggtcggaaatgtctgtggtgccagtgtgcctttgcctganttcttgtcctgcgtccagaaagaatgagatataactggtagnagcncgtcnaagatatncagaaataaccaga

SEQ ID NO: 16138 - DNA, 855 bp, Homo sapiens
  misc_feature (169)..(169): "n" may be a, t, c, g, other or unknown
  misc_feature (534)..(534): "n" may be a, t, c, g, other or unknown
  misc_feature (603)..(603): "n" may be a, t, c, g, other or unknown
  misc_feature (627)..(627): "n" may be a, t, c, g, other or unknown
  misc_feature (641)..(641): "n" may be a, t, c, g, other or unknown
  misc_feature (721)..(721): "n" may be a, t, c, g, other or unknown
  misc_feature (781)..(781): "n" may be a, t, c, g, other or unknown
  misc_feature (786)..(786): "n" may be a, t, c, g, other or unknown
  misc_feature (800)..(800): "n" may be a, t, c, g, other or unknown
  misc_feature (821)..(821): "n" may be a, t, c, g, other or unknown
  misc_feature (827)..(827): "n" may be a, t, c, g, other or unknown
ctcaagtgctcatactgtgacaagtcattcaccaaaaactttgacctgcagcagcacatccgaagccacaccggtgagaagcccttccagtgcattgcatgtggccgtgcctttgcccagaagtctaatgttaagaaacacatgcagacccacaaggtgtggcctccangacacagtggtggcaccgtgtctcgaaactctgtgaccgtacaggtcatggccctgaaccccagcaggcaggaggacgaggaaagcacagggttgggccagcccctgccgggtgcgccacagccccaggccttgtccacagctggtgaggaagagggggacaagccggagtccaagcaggtggtcctcatcgacagctcctacctgtgccaattctgccccagcaaattcagcacctacttccagctcaagtctcacatgacccagcataagaatgagcaggtgtacaagtgtgtggtcaaaagctgtgcccagacgttcccaaagctcgacacatttctggagcacatcaagagccaccaggangagctgagctaccgctgccacctctgcggcaaggacttcccctcgctgtacgacctgggcgtgcaccantactcccacagcctcctgccacancacagcccaagaangacaatgccgtctacaaatgtgtcaaatgtgtcaacaaatactccacccccttgaaggccttggaaacaccacctggcanaccgccactcacaaacttcccctggccccacacttgccaaaaaaggtgttttccttgttnaaacnctaccctggcgggngttcatcttgccccacccacnggcaancgggggggcaaggtttcaaatttccaaa

SEQ ID NO: 16139 - DNA, 594 bp, Homo sapiens
  misc_feature (246)..(246): "n" may be a, t, c, g, other or unknown
  misc_feature (455)..(455): "n" may be a, t, c, g, other or unknown
  misc_feature (480)..(480): "n" may be a, t, c, g, other or unknown
  misc_feature (492)..(492): "n" may be a, t, c, g, other or unknown
  misc_feature (532)..(532): "n" may be a, t, c, g, other or unknown
  misc_feature (549)..(549): "n" may be a, t, c, g, other or unknown
  misc_feature (558)..(558): "n" may be a, t, c, g, other or unknown
  misc_feature (589)..(589): "n" may be a, t, c, g, other or unknown
  misc_feature (594)..(594): "n" may be a, t, c, g, other or unknown
gttttcagtaacattcccacagtgcttgccacaggagccctgcttaaagaaagcaccagttcctggcctgcagacccactaaatgaagatgatagtggtacctcttcccctgcccaacaccacgccctctggcacaaggtggatggccactggcagtgatggggatggagtaagtgctatgagactaggagaggaacaccccaggaacacctgaggtcacagagtgaatgaaggcaggtaaaggancaaagggaatgggggcccccacatacgtgaccccagggcagcagcttggcctgcaccgagtcctccatcacacacactcccccgccccacccccgcatcctggctgtctaaccacaatccctgctgccttcagttaatcaaccaatgagtggtcattcattgcacatctgttctgggcctcatgggggcagcgggaggtgatgaagaancaagggttctacaaagaagtcaaanctacgtgagganccggggaatggcttgcttttttttttttttttttttagangggctctcactctgtcncccacggcngggaagtgcattgggcatgatcattgctccnctgcn

SEQ ID NO: 16140 - DNA, 550 bp, Homo sapiens
  misc_feature (394)..(394): "n" may be a, t, c, g, other or unknown
  misc_feature (402)..(402): "n" may be a, t, c, g, other or unknown
  misc_feature (409)..(409): "n" may be a, t, c, g, other or unknown
  misc_feature (456)..(456): "n" may be a, t, c, g, other or unknown
  misc_feature (526)..(526): "n" may be a, t, c, g, other or unknown
  misc_feature (537)..(537): "n" may be a, t, c, g, other or unknown
  misc_feature (543)..(543): "n" may be a, t, c, g, other or unknown
  misc_feature (548)..(548): "n" may be a, t, c, g, other or unknown
ttgttcataggggtccctcgttttctgagacacctcatctgagcactgacgaggggacacaactcttggctgggaagcaggagactgagcattgccttcaagccatccccacacatgtgacctcagtcagcattctgccctttcatgggtgtcagttgtctcgtccataaaatgggatgatgttcttgttccagccggcatactggatgactaaatgagggaacaggtaagaagctgcattggaaaaaggtaccattcagctgcaagacatccttgtgcagttcccccagggctaatggggtttggttgcccacctttgctgtgtctcttcgtggcgccagcaggtggcagcattgcctttgcatgtgccggctccacctctggcctctcccanacatgcancgtgtanggcaagggaccattcttcacccaattcatttcaggggtcatgggaangaaggatctgaaatgccctgaatgggaaaggcctggaaagaaaatgaaaatctcattcctcccctcaaanaaacacagatnagccangaaanca

SEQ ID NO: 16141 - DNA, 759 bp, Homo sapiens
  misc_feature (123)..(123): "n" may be a, t, c, g, other or unknown
  misc_feature (474)..(474): "n" may be a, t, c, g, other or unknown
  misc_feature (477)..(477): "n" may be a, t, c, g, other or unknown
  misc_feature (700)..(700): "n" may be a, t, c, g, other or unknown
  misc_feature (720)..(720): "n" may be a, t, c, g, other or unknown
  misc_feature (746)..(746): "n" may be a, t, c, g, other or unknown
  misc_feature (755)..(756): "n" may be a, t, c, g, other or unknown
aaagttagtctaactattagactgtcagactctgaagtgtttcttattttggaaaggtgaagacttgctttagtttgttcatagtttccttggcagctgctgatggttttgatggagattcanatggatttggaactaatgctaacttctgcttggtgaagatgctaaccaagttagatactcttcagtgaattctggtactgtgtacgattaatcctcatccacagtattacgctgtgcaaggctatatatacacaggattaatctttccatgatttccactgccctgaaggaaattagaatgtagtctggctccaagaaaacactagaaactacttcagctggtgatggaaaatagtggaattctatacatcctttgagacaatggaagcagcaaaccagcgttctttggattggggaatatttttggtactaactgaaaaacatcattttaagcctgggccctgcttaaanganacttgttttctcttccctctctccctctcttccttttttccctccttcctctttttctttcctcctttccttcttgtctccctcccttctccttccttccttcttcctctttttctttcctccttccctccctccctcccttccttccttttttcctttctcccctccttccttccttttttttcttccttccttcctccctccctccccttcttttcctccnttcttcctttggcccccctnaaacttggggggaccctgcctgctcntttgttttnnaaa

SEQ ID NO: 16142 - DNA, 676 bp, Homo sapiens
  misc_feature (352)..(352): "n" may be a, t, c, g, other or unknown
  misc_feature (368)..(368): "n" may be a, t, c, g, other or unknown
  misc_feature (508)..(508): "n" may be a, t, c, g, other or unknown
  misc_feature (625)..(625): "n" may be a, t, c, g, other or unknown
  misc_feature (633)..(633): "n" may be a, t, c, g, other or unknown
  misc_feature (639)..(639): "n" may be a, t, c, g, other or unknown
  misc_feature (658)..(658): "n" may be a, t, c, g, other or unknown
  misc_feature (666)..(666): "n" may be a, t, c, g, other or unknown
agatcaagcattacaagcatcctacaagcctgcttatgtctcctcccaatcatcacttccttccttctcctaagagataacctctatactgacttctaacagattaatattacctatcttttacatttatataaatggaatcacatagtacatatttcatgtatgcattcttgtactaaacattctttgtgagattcatttatgttgtggcacataacagtaattttctgatttccagtactgtatagtatgctattgaatggatatacctgattttatttatctgttttcagctgttatgaataatggtgctagaagcattcttctttacttctcttggggcattcatgtnggcatttatctcagancagaatgaatgcatacttcagcattcttaatttcagttactatattttttgattctagaatttgcatttggttcttttttatagtttccattcataagatggagttctacatcttgttaacacatttctcaaatatgttnatcaaacttattttaaagcatttagctcacaactcccatatttggatctatatgttaggcctaattctattatctgtttatttttcccctggtcttgtccttggtatgcccgaaaantttttgantttaangaaagaaattggggtttcnaaacttangaaatttttt

SEQ ID NO: 16143 - DNA, 719 bp, Homo sapiens
  misc_feature (65)..(65): "n" may be a, t, c, g, other or unknown
  misc_feature (68)..(68): "n" may be a, t, c, g, other or unknown
  misc_feature (259)..(259): "n" may be a, t, c, g, other or unknown
  misc_feature (360)..(360): "n" may be a, t, c, g, other or unknown
  misc_feature (424)..(424): "n" may be a, t, c, g, other or unknown
  misc_feature (492)..(492): "n" may be a, t, c, g, other or unknown
  misc_feature (552)..(552): "n" may be a, t, c, g, other or unknown
  misc_feature (638)..(638): "n" may be a, t, c, g, other or unknown
  misc_feature (645)..(645): "n" may be a, t, c, g, other or unknown
  misc_feature (651)..(651): "n" may be a, t, c, g, other or unknown
  misc_feature (686)..(686): "n" may be a, t, c, g, other or unknown
  misc_feature (699)..(699): "n" may be a, t, c, g, other or unknown
agtttcagccgcgacagcaagaacggcagagccggcgaccgcggcggcggcgacggcggaagcangancagcctgggcgggtcgcagggtctccgcgggcgcaggaaggcgagcagagcacaaatgaggatgtcccaatttctgccttttgggttttaccagctgctgtaggttttccacactgagtagttgcagtagactggctgccctctgtccaacatgcaatgccacttggtatcattcatggtttgatcccganaacaatccacctattatataattttcccctcacatgtcattccactgacctcaatcaactgatgtggtgatgaaatgaaacacgttcatggagaagctganaaaagtgtgcaaagtacacctacaaggagagtttccccatgttttccataatgtggccatccangatgaggaaggaacaagaatacttgaacatcacagagaccaaaccatttccatacgtcaaaaccaganagcctgggatcaaagttatacttggaaaaaggctgtaagaaatgaaaaaccacctagcancatctgttcttcccttaaaatccaacctccactggcttcctctgaatccatcagggtctttaatatttaaagaaaggctaaattcncaaagtntttaanaaatgggcaggcctgctgggtcctgatgaatccantgcctcccggganctgccccatggggccagcca

SEQ ID NO: 16144 - DNA, 498 bp, Homo sapiens
  misc_feature (420)..(420): "n" may be a, t, c, g, other or unknown
  misc_feature (426)..(426): "n" may be a, t, c, g, other or unknown
  misc_feature (455)..(455): "n" may be a, t, c, g, other or unknown
  misc_feature (457)..(457): "n" may be a, t, c, g, other or unknown
  misc_feature (493)..(493): "n" may be a, t, c, g, other or unknown
cgccttgcagtttgatctcagactgctgtgctagcaatcagcgagactccgtgggcgtaggaccctccgagccagtgagatgaacccggtacctcagatggaaatgcagaaatcacccgtcttctgcgtcgctcacgctgggagctgtagaccggagctgttcctgttcggccatcttggctcctccctcaggtatccttcagaaagcctgggcaataaaccgaaggcttctaaaaagagcaaagtgtctggtgagtcaagcagaatctcaaagctgaactaaatttggtgaatctggactttgccagccctgaagaagaataagcatgaaggaactcttcaagtagctagtgcatttgtgttgctgtcagcaaaatagccagttggagagctatgctgttctccactaaaagaattgtngaaccnttgggctttaatagatttgaaagactgtntnattgaatttataatcctctggcttaaaaaatatgcnaaatc

SEQ ID NO: 16145 - DNA, 669 bp, Homo sapiens
  misc_feature (447)..(447): "n" may be a, t, c, g, other or unknown
  misc_feature (449)..(449): "n" may be a, t, c, g, other or unknown
  misc_feature (462)..(462): "n" may be a, t, c, g, other or unknown
  misc_feature (482)..(482): "n" may be a, t, c, g, other or unknown
  misc_feature (526)..(526): "n" may be a, t, c, g, other or unknown
  misc_feature (599)..(599): "n" may be a, t, c, g, other or unknown
  misc_feature (604)..(604): "n" may be a, t, c, g, other or unknown
  misc_feature (622)..(622): "n" may be a, t, c, g, other or unknown
  misc_feature (630)..(630): "n" may be a, t, c, g, other or unknown
  misc_feature (650)..(650): "n" may be a, t, c, g, other or unknown
attcccagagaggaactggatgaacgaattgctcgggaagagttcagaagaccccgggagtccttactgaatatttgcactgagttctataagcactgtgggccacggctgaagatcttgcaaaatctggctggggagcctcgggtcattgccttggaactgctggatgtgaagtctcacatgaggttggcagaaattgcacactcccttctgaagctggcaccatatgacactcagacaatggaaagtcgtgggcttcggcgctacatcatggagatgctacccattactgactggacagctgaggcagtgaggccggccctcatcctcattttaaaaagattggatagaatgttcaacaaaattcataagatgcctactttgaggcgacaggttgagtgggagcctgccagcaatttgattgaaggggtttgtttgacacttcanangcagccaatcatntccttcctgcctcaccttangtcactgatcaatgtctgtgtcaatctggtgatgggaatggtangaccttccagtgttgctgatggattaccccttcttcatctcagcccttatctctcaccacctctgcccttcancacancttttgtccggcttgttncattgcanattcaggctttaaaaaaaanattttcctttaagccatgt

SEQ ID NO: 16146 - DNA, 533 bp, Homo sapiens
  misc_feature (148)..(148): "n" may be a, t, c, g, other or unknown
  misc_feature (312)..(312): "n" may be a, t, c, g, other or unknown
  misc_feature (315)..(315): "n" may be a, t, c, g, other or unknown
  misc_feature (362)..(362): "n" may be a, t, c, g, other or unknown
  misc_feature (470)..(470): "n" may be a, t, c, g, other or unknown
  misc_feature (487)..(487): "n" may be a, t, c, g, other or unknown
  misc_feature (495)..(496): "n" may be a, t, c, g, other or unknown
  misc_feature (525)..(525): "n" may be a, t, c, g, other or unknown
cattaatcctccactcaaccttcaagaaactcaagtcactatagaagaaatcactcctcttgtccccccacaatcaggagataaagggcaagaagatctcacaagctattttcttgaagcacttctaaaatacatagtcattcaggtnaaaagtttagaatggaagaacaaagaaaaccaagaaaggggattttcatttttgttttcacattttaagaaatattacttgccttatatttttccaaacatctgtaaggaaaacagtttatatcatcctatacttgacatcccgcagatgagaccaaagccacnttntgtcgtgataaagaaagatgctgaaaccaatgaagcaatctattgtncaaaggagcctttcattaaggctcgtgttattgtcattcgttggctggtttctttctggctgggagccaaaaccacatacagggacctcatattcctggggatggaangtgaagtcttgcccaanaatattcnnaaaagccgctgctagtttagtatccaganaagaaagc

SEQ ID NO: 16147 - DNA, 662 bp, Homo sapiens
  misc_feature (259)..(259): "n" may be a, t, c, g, other or unknown
  misc_feature (278)..(278): "n" may be a, t, c, g, other or unknown
  misc_feature (414)..(414): "n" may be a, t, c, g, other or unknown
  misc_feature (438)..(438): "n" may be a, t, c, g, other or unknown
  misc_feature (458)..(458): "n" may be a, t, c, g, other or unknown
  misc_feature (494)..(494): "n" may be a, t, c, g, other or unknown
  misc_feature (601)..(601): "n" may be a, t, c, g, other or unknown
  misc_feature (613)..(614): "n" may be a, t, c, g, other or unknown
  misc_feature (641)..(641): "n" may be a, t, c, g, other or unknown
  misc_feature (653)..(653): "n" may be a, t, c, g, other or unknown
tgattctgaagatgaattgagaatgatgattgcgaaagaggaaaacttacagagaactacacaaccctcaataaatgaatctgaaagtgatccttttgaagttgtaagggatgatttcaaatcaggcgttcacaaactgcattctttaataggtttaggtatcaaaaatcgtgtctcttgccatgatagtgatgatgatattatgagaaatgatcgtgagtatgactcaggagatacagatgaaattattgcgatgaanaaaaatgttgctaaggtcnaaaacagtacagaattttcacaaatggaaaaatctacgaagaaaacttctttcaaaaatagagaaaactgtgagctttctgatcactgtattaaactacaaaaaagaaaaagcaatgtagagtcagccctcagtcntggattaaagtctcttaatcgtanatctccctctcactccggtngcagtgaagatgctgattctgcatcagaattagctnactctgaaggaggtgaggagtattatgccctgatggaaaactgccttcgtgtgaatctcactttagctgatttggaacaattggctggcagtgatctgaaggttccnaatgaagatctnngaatgatggacccagaaaccccccccntgcagtttgacngaagctccc

SEQ ID NO: 16148 - DNA, 736 bp, Homo sapiens
  misc_feature (128)..(128): "n" may be a, t, c, g, other or unknown
  misc_feature (377)..(377): "n" may be a, t, c, g, other or unknown
  misc_feature (383)..(383): "n" may be a, t, c, g, other or unknown
  misc_feature (436)..(436): "n" may be a, t, c, g, other or unknown
  misc_feature (453)..(453): "n" may be a, t, c, g, other or unknown
  misc_feature (555)..(555): "n" may be a, t, c, g, other or unknown
  misc_feature (609)..(609): "n" may be a, t, c, g, other or unknown
  misc_feature (664)..(664): "n" may be a, t, c, g, other or unknown
  misc_feature (684)..(684): "n" may be a, t, c, g, other or unknown
  misc_feature (691)..(691): "n" may be a, t, c, g, other or unknown
  misc_feature (716)..(716): "n" may be a, t, c, g, other or unknown
  misc_feature (735)..(735): "n" may be a, t, c, g, other or unknown
cgggtcctgaggaatcctacacaagctacttatatcagtgatcactaggataatccatagaacttttgggaaagaagtttaagacctttctcccaccatttcagcaggataaattccaactggattanaaaatgaaatgttaataatgcaaataagtacatatttatatctgtatataaaatacagttgatatttgcctggtgtttaggtgtctaaaggactttctaagcataaaggcaaaaaaaagtcataaaaatgctatagcagtttgagactctatgcaggaaagggcatcatcacgtgcatggatgaatctgtatctaattttaaacaatttccaatggtgcctgtttccttttctttgaaaatctctgganaaatanttcctcttgctgtgtctttctttaggcaagaatttttactaattgatgtgtantctgaatcctggctaantataaaccttttattttttatacctgttcttaatgaaaatgaaactgtgactttttttttaattccttttgttggtcaaaaactacaattaactcttctgantttcttctctggctgaacaaacaatggtcccattggcctttcagggaactccangccgtctcaaaaacctccatgtttcatttcttttcaaaactcccaaaaaaaatancttgctcttgacattgttcnttgttantggaatgatcaggacacttgcaaanaaaaaaaaattgtgtttcna

SEQ ID NO: 16149 - DNA, 606 bp, Homo sapiens
  misc_feature (46)..(46): "n" may be a, t, c, g, other or unknown
  misc_feature (319)..(319): "n" may be a, t, c, g, other or unknown
  misc_feature (379)..(379): "n" may be a, t, c, g, other or unknown
  misc_feature (514)..(514): "n" may be a, t, c, g, other or unknown
  misc_feature (533)..(533): "n" may be a, t, c, g, other or unknown
  misc_feature (537)..(537): "n" may be a, t, c, g, other or unknown
  misc_feature (597)..(597): "n" may be a, t, c, g, other or unknown
  misc_feature (602)..(602): "n" may be a, t, c, g, other or unknown
agcgcatcaacagaagaaaaccatctagagtgggttggattagtanaatctaaaatccgtgtacttgttggaaacttggaacggaatgaatttattactcttgcccatgtgaatccccagtcattcccaggggaataaggaacatcataaagacaacaattacgtatcaatgtggttccttgggataatttttcggagagtagaaaatgcagaaagtgtcaacatagacttgacatatgatatacagtcatttactgatacagtgtacagacaggcaaacaatataaatatgctaaaggagggaatgagaattgaagcnactcatgtaaagaaaaaacaacttcaccactaccttcctgcagaaattcttcaaaagaanaaaaagcaaagtctctctgatgtcaatcgaagctcgggcgggacttcaatccaaaagattgtctctggatagcagttgtctggatagctccagaaacctgataatggaacaccttttaattctccagcgtccaantctgatagccccttctgtngganaaacagaaaggaatatggctgaaccctgctgctgttattgtgggaaaaaccactggggtnttccnccca

SEQ ID NO: 16150 - DNA, 755 bp, Homo sapiens
  misc_feature (8)..(8): "n" may be a, t, c, g, other or unknown
  misc_feature (191)..(191): "n" may be a, t, c, g, other or unknown
  misc_feature (336)..(336): "n" may be a, t, c, g, other or unknown
  misc_feature (534)..(534): "n" may be a, t, c, g, other or unknown
  misc_feature (581)..(581): "n" may be a, t, c, g, other or unknown
  misc_feature (643)..(643): "n" may be a, t, c, g, other or unknown
  misc_feature (666)..(666): "n" may be a, t, c, g, other or unknown
  misc_feature (713)..(713): "n" may be a, t, c, g, other or unknown
  misc_feature (736)..(736): "n" may be a, t, c, g, other or unknown
  misc_feature (742)..(742): "n" may be a, t, c, g, other or unknown
  misc_feature (752)..(752): "n" may be a, t, c, g, other or unknown
tggagganagaagatggcggaagcggagtgagtgactagatgatttaaggaccatagtacagctatggatactgaaccaaacccgggaacatcttctgtgtcaacaacaaccagcagtaccaccaccaccaccatcaccacttcctcctctcgaatgcagcagccacagatctctgtctacagtggttcanaccgacatgctgtacaggcattgcatcggccccccagctcagctgctcagtaccttcagcaaatgtatgcagcccaacaacagcacttgatgctgcatactgcagctcttcagcagcagcatttaagcagctcccagcttcaganccttgctgctgttcaggcaagtttgtccagcggaaagacatctacatctcccacaggaagtgtcacacagcagtcaagtatgtcccaaacgtctatcaacctctccacttctcctacacctgcacagttaataagccgttcccaggcttccagttctaccagcggcagtattacccaacagactatgttactagggantacttccctaccctaacggcaaagccaagctcaaatgtttctccganctcaaatggtaagatatgaactaccaaattttttccagtgttttaaggacttgaaaaaatcnaaatgtttccttgatttgatacnataagaagttttttttaatattttaaaaaaatgttttaattgttgtnttttttgcattgccggggcgttnccttcngcctccttgnttc

SEQ ID NO: 16151 - DNA, 842 bp, Homo sapiens
  misc_feature (452)..(452): "n" may be a, t, c, g, other or unknown
  misc_feature (686)..(686): "n" may be a, t, c, g, other or unknown
  misc_feature (707)..(707): "n" may be a, t, c, g, other or unknown
  misc_feature (727)..(727): "n" may be a, t, c, g, other or unknown
  misc_feature (774)..(774): "n" may be a, t, c, g, other or unknown
  misc_feature (780)..(780): "n" may be a, t, c, g, other or unknown
  misc_feature (829)..(829): "n" may be a, t, c, g, other or unknown
  misc_feature (834)..(834): "n" may be a, t, c, g, other or unknown
  misc_feature (838)..(838): "n" may be a, t, c, g, other or unknown
aaaaaaacctatctaaggaggagccaagatggccgcataggaacagctccagtccacagctcccagcgtgagcgacgcagaagacgggtgatttctgcatttccatctgaggtaccgggttcttctcactagggagttccagacagtgggcgcagcaggcttttcttcttggagctgaaacaggcgcactggcgagggttgtgaggaaaggtttgcagccccctgccttggtctgctatagccagtgacacgatcaataccagggtgagcagcagaggaagctcagggaagattatgaagatgagaattcattacctatcaaagaaaatgcgtaaactctagaagtattgcttgctcctttgccacaaagtgtacattcaagagtaaattgtttaaagccaaagggccttgcgccacgtccttagcctcagctttctacttgctaaaatggnaataacaacagtacctaccttacagacctggcgtgaggattaaattataccagcaaagtgcctggcacctagaatttgcctgagttctgatcaatgctaaaaacaccatttaacaagtgccctttcctgcctgggaagcccacaaaggatttcgcttttcacttattactcatcaaactgactccggttcacagtggaaaagagaagaaaagctgatggagaaattggcagtgnagaaggagaacaaaatgtcangagcaaatacttttgagcgnccttaccctccggtcctgcaaatatttgcaaaaagtcaagtcctatnagaccntggaaggcccaaccaggggaacccctcaagggccctgggggcaatcaanggaantggngggg

SEQ ID NO: 16152 - DNA, 906 bp, Homo sapiens
  misc_feature (718)..(718): "n" may be a, t, c, g, other or unknown
  misc_feature (777)..(777): "n" may be a, t, c, g, other or unknown
  misc_feature (793)..(793): "n" may be a, t, c, g, other or unknown
  misc_feature (829)..(829): "n" may be a, t, c, g, other or unknown
aatattccaaaatttgaattagttcggcaaaatatcctaagcctccctctgggcagccagattatcgcagtccctgtgaactcatccctgtcttggcacataaacaagctgagagaaactggaaaggaagcctacaatgttagctatgcctggaagatggtacaagacacttcctttattctgtgtattgtggtgatacaaccagaaatacctgtgaaacaactgaagaacctcaacactgttcccagcagcaagctgctgtaccaccggctggatctccttggccagcccagtgcttgcctccacttcaaacagctggcaaccctagaaagtcccaccatcatgctgtctgctggcagcttttcctccccctatgagcacctcagccagccagagacaaagcgcatggtagagcactacaccgcctatctcagcgacaacacccgcctcattgctaacccgggcctcaaattctctgtcagaaatgaagtaatggctaccagccacgtcacagatgaatggatgacacaaatggaaatgagtagcctgaacacttacattgtccgccgttacatagcaacacccaatggcgtcctcagaatttatcctggttccctcatggacaaagcatttgaccccactaggagacaatggtatctccatgcagtagctaatccagggttgatttctttgactggtccttacttagatgttggangaactggttatgttgtgacaatcaagtcacacaattcattcatccagtacacaagctgncttctgggcacactgnggctgtgatggcattgacttcacactcagatacttntacaaagttctgatggacctattacctgctgtaccaaaagggggaacaaaataagggctttataatggaggacaggg

SEQ ID NO: 16153 - DNA, 667 bp, Homo sapiens
  misc_feature (483)..(483): "n" may be a, t, c, g, other or unknown
  misc_feature (493)..(493): "n" may be a, t, c, g, other or unknown
  misc_feature (586)..(586): "n" may be a, t, c, g, other or unknown
  misc_feature (624)..(624): "n" may be a, t, c, g, other or unknown
  misc_feature (657)..(657): "n" may be a, t, c, g, other or unknown
ataacgggaggagagcgccaggcggagctggggcgtccctcccgctcgcttcttgactcgcgttgctgccggcctcctcccgcgcctagtgtccgggacgcgcctgaacctgccgcctccgtgcctggggcggcgccgcgcggccccgagcgctccagaaagctgcggcgcgagtccgcggggccgacctcggagacgcagctggggccgggcgcggcttggcgggagggtctgcagcgccgagggaggctgccagtgcgtgaggaagagagctagagactggacaggggagacagagcagcgtcggagccgcgcaggggacgggagtgagagcgggagtgagagcaggaacgacgcagagcggccgtcctcaaggtgctgctgcttctccccactcagacttggagccccgtaggagcaggaaatccacctgactgtgatgctccactggcctctgccttgcctaggtcatccttcagcagntcctcagagntgtccagcagccacggcccggggttttcaaggcttaatcgaagagatggagctggtggctggaccccacttgtgtcaaataaataccaatggntgcaaattgaccttggaagagagaatggaggtcactgnttgtcgccacccaaggagggatatgggagcttntgactggggt

SEQ ID NO: 16154 - DNA, 836 bp, Homo sapiens
  misc_feature (787)..(787): "n" may be a, t, c, g, other or unknown
  misc_feature (821)..(821): "n" may be a, t, c, g, other or unknown
  misc_feature (835)..(835): "n" may be a, t, c, g, other or unknown
aggaaatttaaactgaagccgcggccgaaaacgccaagagattgatgctgtagctgccctgagataaccaggactgtggaatcgggaagagctcatggagctcgcgaatgtaatacggaggcctctgaggaaggagtacggaggccgagaaggagccggcatttgatgagcgaaccgggaaagggagacgattgcctcgagctggagagttccatggctgagagtaggctccgggccccggacctaggagtttccaggtgtctaggaaaatgccagaagaactcaccaggtgccaggaagcatcccttttccggaaagtccttttacttggatctgcctgctggcaagaatctccagtttttgacgggggccattcagcaactgggtggggtaattgagggttttctgagcaaagaagtaagttacatcgtgtccagccgcagagaagtaaaggcagagagcagtgggaaaagccatagaggctgccctagccctagccccagtgaggtcagagtggaaacatcggccatggttgatccaaaaggcagccaccccaggccttcacggaaacccgttgactcggtgcctctaagcagagggaaggagctgctgcagaaggctatcagaaaccaggtgagctggggcaagatgggacagagcccgtggtctccagcatagggagggatttcactcttcttccaggttcttctgaagcacccacacaaaatgcacactctgcgatatgtagtattggcattatttccttcttctacatcaggtaatggangctcagacaagttatttagccattcacctagagnagtaagtgttgaanc

SEQ ID NO: 16155 - DNA, 852 bp, Homo sapiens
  misc_feature (680)..(680): "n" may be a, t, c, g, other or unknown
  misc_feature (716)..(716): "n" may be a, t, c, g, other or unknown
  misc_feature (781)..(781): "n" may be a, t, c, g, other or unknown
  misc_feature (786)..(786): "n" may be a, t, c, g, other or unknown
  misc_feature (845)..(845): "n" may be a, t, c, g, other or unknown
ttcaacacctgcagaacatagtggactttgggaaaaatgtcatgaaggagtttttgggggagaactatgttcattatggggaggtcgttcagctacctttagagtttgtgaaacagctttgtttaaagatacaatctgaaagaccagagtctcgctgtgacaaggacctggatactctcagtggttacgctatgtgccttcctaatttaaccagactccaaacctaccgctttgcagagcaccggccgattctgtgtgtagagattaagccaaaatgtgggtttattcctttctcgagtgatgtcacgcatgagatgaagcataaggtctgtcgatactgcatgcaccagcacctcaaggtagcaactgggaagtggaagcagatcagcaaatactgtccccttgatctctactcaggaaacaaacagagaatgcactttgccttgaagagtttgctgcaggaggcacagaacaacttgaagatatttaagaatggtgagctgatttacggctgcaaagatgcccggagccccgtggctgactggagcgagcttgcacaccacctgaagccgttcttcttcccttccaacggcctggccagtgggccccactgcacaagggctgtgatcagggagctggtgcacgcgatcacacgggtgctgctgagtggctcggacaanggccgggcaggcaccctgagtccgggctcgggcctnaaggcccgcgagtctgcgaagccagccctttcataggacctgcgctgccaagaaaaacacccaancgctnggggtaccgaaggctgctttgtccaaaccctcaggtgcaatgttggcctgttgacatcnaggcttt

SEQ ID NO: 16156 - DNA, 847 bp, Homo sapiens
  misc_feature (607)..(607): "n" may be a, t, c, g, other or unknown
  misc_feature (704)..(704): "n" may be a, t, c, g, other or unknown
  misc_feature (755)..(755): "n" may be a, t, c, g, other or unknown
  misc_feature (833)..(833): "n" may be a, t, c, g, other or unknown
  misc_feature (836)..(836): "n" may be a, t, c, g, other or unknown
tttttttaaggtccagtgacttttcacatgaaagaaatgcattctggacttccattaggatacgagaatcattacaatccattccatattgcttaatgagcatcataaacttcttacaatgagggtaaggtttctcatgatcctctgaagctgtttcagagggccgagttaagtcatcaggttcatctctaaatgagtttgctttttgacctttttcttttcatttgacattttctttgcaggcctagcatactctttgttctccttcctaggaaatcgctgatggtaagtttttccactctttctttgttgaattaatttatcatcatcgtcagcagatgtactatcatatacgtttttttgatactttttttttttaactttcgtgcttctttctagcttcttcaacctgtggctgtttattttcactttcaagcttttcctgttcttcctctgatgtcacttgtacttcttgttctgctttggatgtttgttcgttcttcctttctattgctttcttcacaacagaatctttcatttccatggtaggctttagggaaggatgtttttcaggaggcccttctccctttccatttactatatattntttccttttttatatgaaggtccaagtaaagactttgaaacactctcagggatacactgcttggtagtaaaagtcaagtcttcatcatctggtttangccatgagtcaacacacagtttttttttaatactgaatgcagatgcttcanaactcccagaatcttttgacttgctcctccggtttcaaactgcattcttcttggagcttcttctggggtggcattttnaanaccatttcaag

SEQ ID NO: 16157 - DNA, 724 bp, Homo sapiens
  misc_feature (456)..(456): "n" may be a, t, c, g, other or unknown
  misc_feature (471)..(471): "n" may be a, t, c, g, other or unknown
  misc_feature (660)..(660): "n" may be a, t, c, g, other or unknown
  misc_feature (708)..(708): "n" may be a, t, c, g, other or unknown
  misc_feature (718)..(718): "n" may be a, t, c, g, other or unknown
acaggctcccgggccacgagaaaccggccgagcagtccgggccaagctccccggaaccctcggccgtcgcaacccccgacgccagggctgaagcgccgggcactgccgcctccctcggtcgcccgcccgcacgcccggagcggggaagcacgccgcctccctacgcaccagcatggcacctcgcacaagtagcgccgccaaagtttccccacgagggggctgagggacaaaagcccctcccgaaactcgcccgaacttcgagggcctccgacctgcacggccctacgcccaggcggcggccccgagcgccgggggcccgcacgggcacatgcagccctttgttttctgtccagccgggcgctgcctacgtgcagcatcagggatgtcggagcgtttcgcaggggccggacactggacgatcaccctgggtaggggtccggaccccgcgccccgaanagtccggagcctggncccccgaccctcccctcgggagcaggcccatttaatcaaagttttgcagtgtccttgatgagaaacgcccggagtatccgccccgcacgggcgggagagttggcgactttcactctgctttttaaactggcaagacgccatcatcagcaaaccacattgtcctgccggccggacctgcccgacggcggncgcatcccacgggccaagcggggctggacattcggacaaaggaccaanggtccgcaancccgaa

SEQ ID NO: 16158 - DNA, 522 bp, Homo sapiens
  misc_feature (477)..(477): "n" may be a, t, c, g, other or unknown
  misc_feature (480)..(480): "n" may be a, t, c, g, other or unknown
  misc_feature (518)..(518): "n" may be a, t, c, g, other or unknown
gtccggcagcgcctgcccaggtgtgctcggagcgtagctgtagcaacggggcgggccttggttcgcctggggcgtggtcgctgtctggggctcccacgtggttcgcctcatgggcctggagctgggcttctctcgcctcctgtcgtctggctgcaccgactttgcccacgccctcacgggagacgcagacactagggacccggggaggcgcccgggcggggccgccatgttggcagagagtcccagcgtcccgcgcctcggttccggaacccgcggcgcggggatggagctgggctgcccttgggcgccgtcctgggctggtgcccaccctggccgcgtggtcaccggcaagaagcccagggcctcacccaggcgtgggggccgggggaaggaccggaccctcccgaagtcgcggaccaggccgggcggcacccgggctggggtggctgctaccccgagctaagctggctgcgccgnatntacggtccccggggcccgagcgctgcgcctggaccggnccga

SEQ ID NO: 16159 - DNA, 632 bp, Homo sapiens
  misc_feature (621)..(621): "n" may be a, t, c, g, other or unknown
  misc_feature (625)..(625): "n" may be a, t, c, g, other or unknown
  misc_feature (630)..(630): "n" may be a, t, c, g, other or unknown
acatgacccggcggcagtagccgtggcagcagccgcggcggctccgcgagctcgccgggtgggctcagttcagcgcacgccggagccgagcgcagggggcggggaagggacctgctgcagctgcagccgcctgggcgctcctggagcgcgcggtgactcccccggtcggcccgctccatgcagctccgttgcggaagtgtagcggggggaggcggcggccaccgcggcactaagcacgagaggccggggctcggccccctgcagcactaggctctgggagccgcgcgcggcgcgtcccagtggcccgactcgccgtgcgcccggcgcccaccgcagcctgcatgccccgcgctgcgccttgcccggcccccgccgcctcctgctcgcaccgctgcagccgggcgccggagtaatatgctcactcgagtgaaatctgccgtggccaatttcatgggcggcatcatggctggcagctcaggctccgagcacggcggcggcagctgcggaggctcggacctgcccctgcgtttcccctacgggcggcaagagttcctggggcttgtctcaggaccaaggttggaattgcaacgccgaccacattggcccggcccccattccttnattnccccnaa

SEQ ID NO: 16160 - DNA, 707 bp, Homo sapiens
  misc_feature (639)..(639): "n" may be a, t, c, g, other or unknown
  misc_feature (644)..(644): "n" may be a, t, c, g, other or unknown
  misc_feature (651)..(651): "n" may be a, t, c, g, other or unknown
gtcatgttttccaagggtgatttatattcctaggggatttgggtggttctcgcttctcaaaacccatatcaaatgactttgcctgtgactttttacaaaaattcttattctaatacctctctgtgcccttcccaagcacacagatgatgttcagtaaatgccagacctctttcctcccatttcccatgtgccctgcctccctcacagccagtctgctctccttctttcctcccttcctctctttgccctcttcatccctctttcctttcccactatattctcatttgtgcaatttcccagttaaggtcagtgtcaccctgacttctctttctttttttaatcatcatctgtctttcttgacatttcacatcctgaataatttccttcagagaatcagttctttaagacatcagaacatgagtcaccctgcgaggtaccaccagactaacaccagggaccagcacccattctagcaaaacactgcctaagcagcctgaactgcgctagtttctttaatgagggttgtagcacagaaagttgctttcttttttttttaaagaaaggaaatcctctagcccaactaagctttcctggttaaacaagtgctttgagagacccattcagagtacttttcactanaaggncctttantgtgttttgtgagaaggaaggacaggcacaaacatgctgttagaatgtgccatggg

SEQ ID NO: 16161 - DNA, 779 bp, Homo sapiens
  misc_feature (564)..(564): "n" may be a, t, c, g, other or unknown
  misc_feature (641)..(641): "n" may be a, t, c, g, other or unknown
  misc_feature (721)..(721): "n" may be a, t, c, g, other or unknown
  misc_feature (735)..(735): "n" may be a, t, c, g, other or unknown
  misc_feature (743)..(743): "n" may be a, t, c, g, other or unknown
  misc_feature (757)..(757): "n" may be a, t, c, g, other or unknown
  misc_feature (763)..(763): "n" may be a, t, c, g, other or unknown
aagcctcagtatgtgagagaggcagagagcctccctctgtgactcaccattctattggagatccaagcaacccaggcctagggatagcactttgtttctcccaagcccttgaggtaatttggggagagtcttggagatgctgtgagggaaagacaccgggaaaagctgcaggcattttcccagaactgggaccaagaacatcatgccagttttaatctgggtgcatataaagtcagtcattctttgatgacccagaagtgtggctctgcaggcattttattctcaagccaaagactagagggcttgctcttgaggagagtagggacctccaaagccataattgtggaaagcaccttagcagtatggctggaattgcacactctccctaattgcaagcctgggacaggaggagagctgctacagctgtggtttcttctggctgaggagacttgcagccggggccagcttgacaacctggcactgttctgcatgtgtcattgctgggtgccccagcctgctcccctgaaattgtggtgcaggggggcctctctgatccactcctangcagaactccagggaatttagagtacatactttcctgggaccaagaagcctcagtcaccccaaccctttctgtgaanagatcggggtaaagcaagccctctccactctatgcctaaggcagaactcatgacattcagagcaactgctcaaccatcancagtcacccaaccnttccctgngcaaacattgggcnatgttnggggggcaacttctca

SEQ ID NO: 16162 - DNA, 726 bp, Homo sapiens
  misc_feature (533)..(533): "n" may be a, t, c, g, other or unknown
  misc_feature (617)..(617): "n" may be a, t, c, g, other or unknown
  misc_feature (641)..(641): "n" may be a, t, c, g, other or unknown
  misc_feature (643)..(643): "n" may be a, t, c, g, other or unknown
  misc_feature (647)..(647): "n" may be a, t, c, g, other or unknown
  misc_feature (691)..(691): "n" may be a, t, c, g, other or unknown
  misc_feature (724)..(724): "n" may be a, t, c, g, other or unknown
aaggaggaagctggttcctggcctgcccagttgcgtgtagattctgcagaagtggcctccctttggggcagtgtggaaaaggggagaagagaggcctcattctcgtgcaggagcctccggccatcctgatgctgcccagccaggtggccttgtctgagcgagaagctctgggatggacgctgacccggctctgagccgcacacgccacacacacgtgtgctcccagggtgggccatgggcacagtggagggtggtggctgtgtttgtctctggatttctggggtcccaaaggtccctctctgctgtcacctctctgagtgtccttggggagagttttccaatctctgtaggtgaaaccatgtttggaaccctggaaagcatgtggagctggggcccccagagaggcctcctcccctggtgccagggtgcccacttgcaagcaactgggaggctgggctcccctgagaaaccaccaagaagcaggcaagcctcagctggaccttgtggggcctgtcatagggaagtgtgggcanaggggccttccatctctccccaagggttgtgtctcgcaaggtccctggggctgaaattgtgggaaggaagcaattgtccaaagnagttgggggaaggacccccgggcnanccangggggaaaaaggcccttctgttgccccaatccaatgttaaaagnccctccctggccccttggcccttggggttgttnaa

SEQ ID NO: 16163 - DNA, 785 bp, Homo sapiens
  misc_feature (618)..(618): "n" may be a, t, c, g, other or unknown
  misc_feature (642)..(642): "n" may be a, t, c, g, other or unknown
  misc_feature (679)..(679): "n" may be a, t, c, g, other or unknown
  misc_feature (712)..(712): "n" may be a, t, c, g, other or unknown
  misc_feature (736)..(736): "n" may be a, t, c, g, other or unknown
  misc_feature (741)..(741): "n" may be a, t, c, g, other or unknown
  misc_feature (762)..(762): "n" may be a, t, c, g, other or unknown
  misc_feature (784)..(784): "n" may be a, t, c, g, other or unknown
cattagcttccgcagtgagagccgccctgacatcctcgccccccgaccctggtccaagaaatgccgccccctcgagcacgaaacggagagatagcaagctgtggagtgagaccttcgatgtgtgcgtcaatcagatgcttacatccaaggaaatcaaacgtcaggaggcgatctttgagctttcccaaggagaagaagacttgatagaagacttgaaattagcaaaaaaggcctatcatgaccccatgctgaaactctccataatgacagaacaagagttgaatcaaatttttggaacactggactctctaattcctctacatgaagagctccttagtcagcttcgagatgttaggaagcctgatggctcgactgaacatgttggtcccatcctcgtgggctggctcccttgcctcagctcctatgatagctactgcagcaatcaagtagccgccaaagctctgctggaccacaaaaagcaagatcaccgagtccaggatttcctacagcgatgtttagaatccccctttagccgcaaactagatctctggaatttcctcgatattccaagaagccgcctggtaaaataccctctgcttctccgagaaatcttgaggnacacaccaaatgataatccagatnagcagcacttgggaagaagctattaaatatcattcanggaattgtgggaaaaatcaacaccaagactggngaatctgaatgccgctattataangagcnggttctttacttgggaaaaanggcaaaaaggactccccggatng

SEQ ID NO: 16164 - DNA, 727 bp, Homo sapiens
  misc_feature (640)..(640): "n" may be a, t, c, g, other or unknown
  misc_feature (691)..(691): "n" may be a, t, c, g, other or unknown
  misc_feature (712)..(712): "n" may be a, t, c, g, other or unknown
agttcggttttgctttcactgtgacaaagcagcatcaaattcaatgcgatgtctcacaatagctgcgctctccctcttccaagcacagagattctctctctacgccacaaagccactgccatgggatggggacaggtggcatcagcaactcaagactgtcttccctaccctcttcattgcctctttcaacagtatgaagttaaaatcaggactacccaggcagggggagctgcaaagaccttggtttctctggcccttccaacagcaagtatcgccaggagcagctccctaatctacatactacagatctatccacaagaagacagatggaaccactcttttcttctgaattctagaaccttaaggaagttaacctgagtggctcagcttggatcaagtgcccatcctggtccaaacaactgtagcagcacatctgtgtatttgtgtatcttgttcctccataatcttgcagtccggggaaagtgtgcagatggatgggtccctgaaaagcaagagttgtttagacaacgctagaggtgttcagttctgggagacaagagttgggccaaggttgataactagcctaagagagtccggatcagatgaataagaactaagatcttgggtgacaacctagatnaagagtcttgaggttcagtcatttcaaaaaagctcaagtctcaatgcttcntgggcttcctgggtaaagatnaaggtgcaagtatcc

SEQ ID NO: 16165 - DNA, 547 bp, Homo sapiens
  misc_feature (465)..(465): "n" may be a, t, c, g, other or unknown
  misc_feature (496)..(496): "n" may be a, t, c, g, other or unknown
  misc_feature (507)..(507): "n" may be a, t, c, g, other or unknown
  misc_feature (509)..(509): "n" may be a, t, c, g, other or unknown
  misc_feature (511)..(511): "n" may be a, t, c, g, other or unknown
  misc_feature (547)..(547): "n" may be a, t, c, g, other or unknown
gagacagggtctcactctgcttcccaggctggagtgcagtggtgggagcacagctcactgcagcctcaacctcctaagctcaaccaatcctccagcctcagcctcctgagtagctgggaccacaggcatgcaccaccacacctggctaattttcgtattttttggtaagagatgaggtctcaccaaaaaatagcctgttgcccaggctggtctcaagactcctgggctcaagcgatcctcctgcctcaacctcccaaactgttgggattataggcgtgagccatcatgcccggccacagacctgctgtctaacaagacctccaggtggtgctcgtgcccttgaagtctgagaagccccgagcatccccttgttctctctggacagcattgagactgccatgctgtgccgggtacggttgctgcccatggcctgggaaggtggggactgagtactggcagataggnttctccaattttgagactttgcttaagaaanggggaaaaatngngngggcatttatggggccctttggtggcccccttggan

SEQ ID NO: 16166 - DNA, 557 bp, Homo sapiens
  misc_feature (507)..(507): "n" may be a, t, c, g, other or unknown
  misc_feature (536)..(536): "n" may be a, t, c, g, other or unknown
  misc_feature (555)..(555): "n" may be a, t, c, g, other or unknown
gaatgaacaaatgttttattggcatgttcattgttgtaaacagcatctggcatgaaaaagttttaccaaaaccttttttattgatttttataaattagatggtatgtcaaaatttatgtagaattgtgttcattgagtacttttatttagcaaagcaaaaacttgctgatactaataaactctgcaatgaaatcatgttgactgcatcagtctgtaccatgacctgacctcattagcaagtttattcagaacaatgttaagacgtttcccaaaagttaaactacatgtaactacaaattgactctaaaaattaaaactggacttacaagcattctagaagattcaaacttgaagtaaatcttcaaaactagatgtacaaagagaaaaaaattgaagccgctgaacagagaaacctcattaacaagggcaacgacaatcctatgggacctagcactgaggaacctcactgaggattacatttacatagattgctatacttctcaatgnacacaaatgtaccgaatgaatgatacgtngaaaagaataatcatgggngg

SEQ ID NO: 16167 - DNA, 548 bp, Homo sapiens
  misc_feature (464)..(464): "n" may be a, t, c, g, other or unknown
  misc_feature (466)..(466): "n" may be a, t, c, g, other or unknown
  misc_feature (488)..(488): "n" may be a, t, c, g, other or unknown
  misc_feature (513)..(514): "n" may be a, t, c, g, other or unknown
  misc_feature (518)..(518): "n" may be a, t, c, g, other or unknown
  misc_feature (531)..(531): "n" may be a, t, c, g, other or unknown
gagatggagttttgctcttgttgcccaggctagagtgcaatggcgtgctctcagctcaccgcaacctccacctcccagattcaagcgattctcctgcctcagcctcctgagtacctgggattacaggtgtccgccactacacccagctaatttttgtatttttaatagagacggggtatcaccatgttggccaggctggtctcgaactcctgaccttgtgatctgcacacctcggcctcccaaagtgctgggattataggcatgagccaccacgcctggcccctcatcagatgttcttttattattattttcttttttttgagacggagtctcgctctgtcgcccaggctggaatgcagtggcgcgatctcggctcactgcaaactctgcctcccgggttcatgccattcttctgcctcagcctcccgagtagctgggactacaggtgcccaccaccacacccngntaaatttttggatttttaaganaaaccggggttcactggggtaaccnngaanggcttaatctctngaccttggaaccgccaa

SEQ ID NO: 16168 - DNA, 483 bp, Homo sapiens
  misc_feature (419)..(419): "n" may be a, t, c, g, other or unknown
  misc_feature (436)..(436): "n" may be a, t, c, g, other or unknown
  misc_feature (440)..(440): "n" may be a, t, c, g, other or unknown
  misc_feature (448)..(448): "n" may be a, t, c, g, other or unknown
  misc_feature (460)..(460): "n" may be a, t, c, g, other or unknown
  misc_feature (463)..(463): "n" may be a, t, c, g, other or unknown
  misc_feature (482)..(482): "n" may be a, t, c, g, other or unknown
gcggcggggccggggagacagggcctccctctgtcgcccagtctggagtgcagcggcacgatcacaactcactgcagcctcagtctcctggattcaagtgaccttcccacctcattcccacctcagcctcccaaatagcctggaccgtaagtgcgtgccaccacgccagactaattttttaatttttttagagacaaggtctccctatgctggccaggctggtcttgaattcctggactcaagtgatcgtcccgcctcagtctcccaaagtgttgagattacaggcatgggccacgtgcccacaccacagcacttttataataccacctcagtggcaggctagcatgctgcactgtaatcacaagtttaatcttctctccactttcctataaaggtcttaaaaacaaggaccacatatnaccgtatcaccagcatntaangacaatgnggcacgatcatntgnaacgcttaaaaaaaaaaang

SEQ ID NO: 16169 - DNA, 581 bp, Homo sapiens
  misc_feature (508)..(508): "n" may be a, t, c, g, other or unknown
  misc_feature (562)..(562): "n" may be a, t, c, g, other or unknown
aaacatttaagaaaatccttcccaccctttactgaatgaacgccctctcaattctctcacagcattgctgaatcagacaactggtgcagcatgccacccacaagaccaactgagcttccagctgatgatggcatcagaaccccacacatgagaaaaggcacttggcaatctatcaacatggtaactatccgatctaccaggtcatttcctaggcaaaaattcatgggagctccaaatcaacattaataataagttaacaaatacctcctgttatcaacaaactgcatgctttgccaaaatgtagtgcttcaattaattaaatgaatgacttcctcttcacaattctttgatgagacaggatttattgcatcctttctacaggtgagaaaactaagattcagaaagttaattaattttcttgaggttatatagctagaaagcagggaaccagaaatcaatttctgttctggttgtcccccaagcctgtggaagtctaaaaacctgcctntaactacaggcttactcctttggaaaataatcctggcctgggagtgttcaagcncaatctcctttgggtatgc

SEQ ID NO: 16170 - DNA, 593 bp, Homo sapiens
  misc_feature (542)..(542): "n" may be a, t, c, g, other or unknown
  misc_feature (563)..(563): "n" may be a, t, c, g, other or unknown
  misc_feature (582)..(582): "n" may be a, t, c, g, other or unknown
  misc_feature (591)..(591): "n" may be a, t, c, g, other or unknown
aatgccataatcctgtaatatacaatttattgtagtgctaattacacataatataaactagttatgcataattcatagtaacttacaaaactgtactataccacatattatatagctacttatacacatataagtatacatgtagacatgccatatatacagatgatgctatactatatggtatactagggcacaccaatttgactataaatgcaaaaggccccaacaatacactggaaaattgaacgttatcaatatgggttgagtgtttcttatctgaaatacttgggaacggaagtgctttggatttcagacttttaacattttggaatatttgcagaaaacttactggatgagcatccctaatccaaatatcaaaaatcctctaatgagcatttctgttgagcataagactggtgctcaaacagtttttgacttcggagcatttcagatttggtattggaatctggggtttacagatgttcaacctgtagataaaatacttatattccatggatgaagacaaattcacccagataccntaatatattatatctggaagnccgttaacgtaatagactntcatagaangc

SEQ ID NO: 16171 - DNA, 546 bp, Homo sapiens
  misc_feature (482)..(482): "n" may be a, t, c, g, other or unknown
  misc_feature (485)..(485): "n" may be a, t, c, g, other or unknown
  misc_feature (488)..(488): "n" may be a, t, c, g, other or unknown
  misc_feature (512)..(512): "n" may be a, t, c, g, other or unknown
  misc_feature (516)..(516): "n" may be a, t, c, g, other or unknown
  misc_feature (520)..(520): "n" may be a, t, c, g, other or unknown
ctcggttaatttttttgtatttttagtagagacagggtttcaccatgttgggcaggctggtctcgaactcctgacctcgtgattcgcctgcctcggcctcccaaagtgctgggattacaggcatgagccaccgcaccgggtcagtgtttccatttttgccactgcagtgctgcttgtcttcaggggctgaggtgccctccccccgccccaaggaagcctctggcgccagtgcctgtctctgaaggagaatgtgggccttgcctccctgcaccagtcatacgcatggccccagtggcttggctcagagtctggcactgcaggccgactgcctccaggcacagctgcaggaagtgttccaggagcgggaatggaatggggtctgcaggagtcccaggacctggggggtgcagggctcgcacgctgaggacacccacctgcgcctgctctggtggatccagccacccgtggctccttgagcccanctntangtcttgggggcctgggggactagnggtnggantcactttagggtggaaaatggccggc

SEQ ID NO: 16172 - DNA, 573 bp, Homo sapiens
  misc_feature (478)..(478): "n" may be a, t, c, g, other or unknown
  misc_feature (514)..(514): "n" may be a, t, c, g, other or unknown
  misc_feature (516)..(516): "n" may be a, t, c, g, other or unknown
  misc_feature (540)..(540): "n" may be a, t, c, g, other or unknown
  misc_feature (571)..(571): "n" may be a, t, c, g, other or unknown
gccgttctacaaggaaggtgttgacactgcctccccaactttattgctgaactcgaactttatgggtttcaaattgcagctatcattaggcatagccagtccagaatcaacttaattccccaactggggctgcctgttgagaaagacagggacccaagaaccaatgggcccagataatggtgcaggacaggagagggctaagtggctttttcctcggtgcccttcgatgctcctttcgtgagacctgggcctggggaggtgtagctctctccccagaccagcctccactcctgctggagcccagaccagcctccactcctggagcccagaccagcctccactcctgccggagcccagaccagcctccactcctgctggagaccagtccagcctccactcctgctggagaccagtccagcctcactcctgctggagcaggccaaaagcaccccctggaacctgtcccagacctcatggnttgccgtgtaacaacttgctggggctatggcagaancnctgggaagcaccctgggcaacctnggaaagcttttccagggaaacaaatgggttngg

SEQ ID NO: 16173 - DNA, 571 bp, Homo sapiens
  misc_feature (547)..(547): "n" may be a, t, c, g, other or unknown
  misc_feature (568)..(568): "n" may be a, t, c, g, other or unknown
agacaaattctcagtctgtgatgttcaggctggagtccagtggtgcgatctcagcccactgcaaactctgcctctcagattcaagcgattttcccacctcagcctcccaagaagctggaaatacaggcatgcaccacgatgcctggctaatttttgtatttttttagtagagacagggtttcaccatgttggccaggcttgtcttgaactcctgacctcaagtgatccacccaccttggcctcccaaagtgctggaattataggcataagacaatgcccagccaggaacagaattttaagaataaattctctgaattggtttgggggtttctggaattggttctctaaatgactagatttagaagcactaatgactctagttccaatagtgaataaagcactgatagtcatcggtgtgatgtggtaatagagatacacaaaaatatcactattagatactcctaatcaaataattatgataggcaaggtctgggtgaccaccgtattttgatacgtagaacatttccgcaactaatgggcataatgnacttggctggtgctcctaatnggg

SEQ ID NO: 16174 - DNA, 561 bp, Homo sapiens
  misc_feature (423)..(423): "n" may be a, t, c, g, other or unknown
  misc_feature (483)..(483): "n" may be a, t, c, g, other or unknown
  misc_feature (489)..(489): "n" may be a, t, c, g, other or unknown
  misc_feature (491)..(491): "n" may be a, t, c, g, other or unknown
  misc_feature (514)..(514): "n" may be a, t, c, g, other or unknown
  misc_feature (524)..(524): "n" may be a, t, c, g, other or unknown
  misc_feature (538)..(538): "n" may be a, t, c, g, other or unknown
cagtatatccttacagttctgctcataaaatggcagggccccagccaccattttgcatacgatgatgccaaggctccaaacgttgatggcagggcattggtatccatggcccaagaagagttctgggcctgcataagggagagtcccatcaaacgttcccttttcagtgttgtctctctttgcaaatgttgaactaaacccatagttggctattttgatgttacgttctttgtcaaagaagatattaagctttgttctgaccccaggagagctcttcccacctgtctttttttctgtttctctctggcagacttgctggcctccagtgtagcccgcacctcccaggctctccgtcgcctcccagttgcctttcaagcacaacctccactgttctggaaaagtgtgcttaaccttggacttctncgagcttgttgccatgaagcaagttcctttgggagcaactcgacctttgtttctggctgntggttntnaggcaaacccttgagccaaactntgggctggcncaaggggcattttnttggggaacctgctgtaggaccg

SEQ ID NO: 16175 - DNA, 618 bp, Homo sapiens
  misc_feature (452)..(452): "n" may be a, t, c, g, other or unknown
  misc_feature (482)..(482): "n" may be a, t, c, g, other or unknown
  misc_feature (503)..(503): "n" may be a, t, c, g, other or unknown
  misc_feature (547)..(547): "n" may be a, t, c, g, other or unknown
  misc_feature (584)..(584): "n" may be a, t, c, g, other or unknown
  misc_feature (589)..(589): "n" may be a, t, c, g, other or unknown
  misc_feature (615)..(615): "n" may be a, t, c, g, other or unknown
  misc_feature (617)..(618): "n" may be a, t, c, g, other or unknown
cgagacggagtcttgctgtgtcgcccaggctggagtgcagtggcgcgatcttggctcactgcaagctctgcctcccaggttcacgccattctcctgccttagccttccgagtagctgggactacaggcgccagccaccacacccggctaattttttgtatttttagtagagacgggggtttcaccatgttagccaggatggtctcgatctcctgacctcgtgatccgtccgcctcggcctcccaaagtgctgggattacagacgtgagccaccgcgcctggcctcaaatgggcttttaaataacaacagtgatgctcttgacatcttgttttctgtaaaatgccctcaaggaatctttgatttgttttaaacctcctcccatgcagcaagtaatgtgctcgcaatctgttcgagcagccgctttatcctctcgggggctcactgcccactgntaaaagccattcctggctctcaagggacangttgccactgggggtttgganggaacccactgatcagaggccacgcccttttaagttttgaaccngatgagaagaagccttgatcaaatggggcctgaggcncccanttgttgcattgggaacatgggttggncnn

SEQ ID NO: 16176 - DNA, 555 bp, Homo sapiens
  misc_feature (398)..(398): "n" may be a, t, c, g, other or unknown
  misc_feature (520)..(520): "n" may be a, t, c, g, other or unknown
  misc_feature (524)..(524): "n" may be a, t, c, g, other or unknown
  misc_feature (551)..(551): "n" may be a, t, c, g, other or unknown
  misc_feature (553)..(553): "n" may be a, t, c, g, other or unknown
aaatgagacagcatcttgctctgccaccaacccaggatggagttcagtggcgcaatcttggctcaccacaacttctggcccctgggctcaagcaatcctcctgcctcagccccgagtagctgggactaaaggtgtgcaccaccattcctggataattgtttttgtgttttttatagagacagcatcttgctatgtcgcccaggctggtctcaaactactgaactcaagcgatctgcccacctagacctccaaaagtggagccaccacacctggccagttaagttcctttttttttttgagacagagtctttgtcgcccaggctggagtgcagtggcgcattcttggctcactgtaacctccgcctcgtgggttcaagccattctcctgcctcagtctnccaagtagctgggattataggctcaagtcaccacgccgagctaaattttggggttttaagtagaaacaaggttccgcatgttgggctcttataaggaagaaactaaaggtcttttaaagggngatngggaaaagatgaccgatgattaattgntngt

SEQ ID NO: 16177 - DNA, 527 bp, Homo sapiens
  misc_feature (468)..(468): "n" may be a, t, c, g, other or unknown
  misc_feature (483)..(483): "n" may be a, t, c, g, other or unknown
  misc_feature (487)..(487): "n" may be a, t, c, g, other or unknown
  misc_feature (495)..(495): "n" may be a, t, c, g, other or unknown
gagaccgagtctctctgtcacccaggctggagtgcaatggtgccatctcagctcactgcaacctccgccgcctgggttcaagcaattctcctgcctcagcctctccagtagctgggattacaggtgcccgccaccacgcctggctagtttttgtatttttagtagagacgaggtttcaccgtgttggccaggctggtctcaaactcctgagctctcgtgatccaccagactcagcctcccaaagtgcctggattacaggcgtgagccccatgtattgcttttgaaaggagcatctgaatgcatcccgaggcacaaaatagtagagcagcaagtttattttgctcagtttactaccagagtttgaatgtggaggttaggcaaactaaaaacaatgcctaaaacattttaaaatctatttctgaagatctcatgcttatttcaactttttaaggagactttatttaattnaatttttttttttgnaaangggcttanttttgccgcccaaagggaatggaatggaatgg

SEQ ID NO: 16178 - DNA, 574 bp, Homo sapiens
  misc_feature (481)..(481): "n" may be a, t, c, g, other or unknown
  misc_feature (526)..(526): "n" may be a, t, c, g, other or unknown
  misc_feature (538)..(538): "n" may be a, t, c, g, other or unknown
  misc_feature (564)..(564): "n" may be a, t, c, g, other or unknown
atttcaaaccaatatttttaatgaaaatttccctgttttctgattttacatatgttgaatgccaataagaaatacataaagaactctgagcatttatatagagctttcggtttctgtctgtttaatttgatgctctgcttattcagttatactagatgtgtttctcagagttatccagtccatacgtatttgaagagacaatttggtgtagaattgttagtgtccaggctcttccaagcaaggtcttccaaagggatatctcaaaaatattccttagagttgaagtggcaatgttatatagcctaacaattttcatgctattaaaagcttataatagctgatcattaaaatgcgagttacagattttatgaaacactacacgtttttacagagatttttaaatcaggtaataattaaaaaaaaaaaagcatatgctatagccccaacccagctcttatgagtagcatttatcaaggttggnaatggacattactggaggcttaatttaagaaataagttttaaccntaaggacggctntagacctggataagggaattcaatangattttccaa

SEQ ID NO: 16179 - DNA, 558 bp, Homo sapiens
  misc_feature (497)..(497): "n" may be a, t, c, g, other or unknown
  misc_feature (505)..(505): "n" may be a, t, c, g, other or unknown
  misc_feature (529)..(529): "n" may be a, t, c, g, other or unknown
  misc_feature (546)..(546): "n" may be a, t, c, g, other or unknown
  misc_feature (558)..(558): "n" may be a, t, c, g, other or unknown
ggtagagatggggtcaccatgttgcctgggctggtcttgaactcctggcctcaagtgatctgcctgccttggcctcccaaagtgctgggattacaggcatgagccaccgcgcacggcccacatctttcctctaaccttgcaggatatgacagctgagcagcatctttacttattaaaagtatttatttccagaaagagaaaattaaaactaagcactacttggcccaaaccaaacccctctagagatccagaacacacagggggcgctctttgggaggggtgctgagtgttagctgaaccccggggccctagcctttggctcccttcctcccttttgcaatcccccaagtgtgccgatgtgtgtgggatgtcagacaacacctggtctccctggctggggactgcttggacttgtaccgggagggacttcaggttttcagctaggttgatcatcctggaagctgaggaacttgaggtctcacaatgaagctgagganaaggtcangggtgggagcgcgtttctactggngcccgttcaaggccatntgacagcctgan

SEQ ID NO: 16180 - DNA, 507 bp, Homo sapiens
  misc_feature (244)..(244): "n" may be a, t, c, g, other or unknown
  misc_feature (299)..(299): "n" may be a, t, c, g, other or unknown
  misc_feature (354)..(354): "n" may be a, t, c, g, other or unknown
  misc_feature (376)..(376): "n" may be a, t, c, g, other or unknown
  misc_feature (412)..(412): "n" may be a, t, c, g, other or unknown
  misc_feature (418)..(418): "n" may be a, t, c, g, other or unknown
  misc_feature (451)..(451): "n" may be a, t, c, g, other or unknown
  misc_feature (478)..(478): "n" may be a, t, c, g, other or unknown
  misc_feature (483)..(483): "n" may be a, t, c, g, other or unknown
  misc_feature (494)..(494): "n" may be a, t, c, g, other or unknown
  misc_feature (503)..(503): "n" may be a, t, c, g, other or unknown
gccttacttgagaatttgggtttttgagtaaacgccattattctctctttttttaagcacacttttgcatctcaaccacctaacacactgcatccctgagcaacccggaggggccggttcctgcacccaggccaacacaacttaaaccccaacacaccagaagaggaataaaggccaaccaacttccgcccacccactacaaacgtcgagagaaattcgtagatgaggccttgtcaaaattcanaggcgtcctacgtctgctttcccaatgagacagttcctttttgtttgtctcaganactggggtttttttttttttaaaagactgtaggcagaaaaaacaccccaaccggntgttgtgacaatcaaacgtgtntaagaaaattcagccaatgagagtgcgaaagtgccntcttgngttggccaatgagaacagcgacccgttcgccanggcccgccaatggggcccaagccaccncggtntttgaattctngaacaaggnttca

SEQ ID NO: 16181 - DNA, 549 bp, Homo sapiens
  misc_feature (493)..(493): "n" may be a, t, c, g, other or unknown
  misc_feature (508)..(508): "n" may be a, t, c, g, other or unknown
  misc_feature (510)..(510): "n" may be a, t, c, g, other or unknown
  misc_feature (528)..(528): "n" may be a, t, c, g, other or unknown
  misc_feature (532)..(532): "n" may be a, t, c, g, other or unknown
agtagagatggggtttcaccatgtcggccaggacggtctcgatctcctgacctcatgatcctcccgcctccgcctcccacagtgctgggattacaggcgtgagccaccgcgcccggccctaaaatgttttaattgaggtacaacatacatgaaaatgcaccagtgataaatatgcaggttgacggatgacagacctgaaccagccacataagcagcaccagaccaacagacacagcgttcccacccggacggctccagcgagccgctgccagcccatctggcccatcacgtgaatggtgtcccagttcactctctctggctgagattcgcctatgccggtggctgtaaccgtctgcctcagaccgtggtgtccacggcgtgaacagaccacgtctgggtggcttcagactccctatcaacgataccgtctgatggacacaggtgccgtctgtggattgccacccgggggacatgggcagggacctttttttanctttgggaacttggncnaaccattttaaaatcggnaggnctggtttctggttacaa

SEQ ID NO: 16182 - DNA, 545 bp, Homo sapiens
  misc_feature (252)..(252): "n" may be a, t, c, g, other or unknown
  misc_feature (277)..(277): "n" may be a, t, c, g, other or unknown
  misc_feature (448)..(448): "n" may be a, t, c, g, other or unknown
  misc_feature (486)..(486): "n" may be a, t, c, g, other or unknown
  misc_feature (519)..(519): "n" may be a, t, c, g, other or unknown
gaagaaaaaaatgatgaatatttatttgggttcagttttttaaatcttgccagcttacttttatattcaagaagagaagagagatcagtctgggtttggggattcaggtctcggaaatttccatcttcattacacattctaactgtctggggaaaggcactttgcacatttctgctttagcctgctcagtcggcctgcaaaagctagagtctagagagttttcttttccttcaatgtcttttgctgtttcanatacaggcagcgacaaagctcccanaaggtttctgtcaacaggcatagagacagggcgtgcttgcaaactgcgtgtggtcctcctcagcacgccatcttgatctcttgtggcctcggacacagaatcctttatctccaccatttcttggaagcccattttgctctttttcctgcctttggctggggcgctagctgngccgtcgcaaaattctatctccaatggatcgctttccnacataatggggaaatgggtttctgaaaaactgngcctaggatcttaatggacaagccct

SEQ ID NO: 16183 - DNA, 457 bp, Homo sapiens
  misc_feature (372)..(372): "n" may be a, t, c, g, other or unknown
  misc_feature (408)..(408): "n" may be a, t, c, g, other or unknown
  misc_feature (423)..(423): "n" may be a, t, c, g, other or unknown
  misc_feature (430)..(430): "n" may be a, t, c, g, other or unknown
  misc_feature (438)..(438): "n" may be a, t, c, g, other or unknown
  misc_feature (444)..(444): "n" may be a, t, c, g, other or unknown
  misc_feature (454)..(454): "n" may be a, t, c, g, other or unknown
acctggaagaatgaagtttaatgacgttacgcatgtaactgcacaatctccttcatcagaacagatacagtcactgtcccatctctttcacctcatctgctaaccactggtggccacatacatacacactaattagtaggagttccagatcagtagcaccccctgaggctttcttattgccctagctatcccctaaatcaggacacattcagctcagaaggggtcaaacctcttatgaactccaggagaccagttggactccaggcagtcgtcagccactcctgggccctgttttccttctgcctttgctgctgttgtggctgatggtatgactgtagaaaactggccccaaggagtcctctgagcctttgnccttgatgctaggccagatccttgcataagcctcanaggtattccgcattngagcttnttaaagantatagncatgctcagncat

SEQ ID NO: 16184 - DNA, 556 bp, Homo sapiens
  misc_feature (450)..(450): "n" may be a, t, c, g, other or unknown
  misc_feature (510)..(510): "n" may be a, t, c, g, other or unknown
  misc_feature (515)..(515): "n" may be a, t, c, g, other or unknown
  misc_feature (540)..(540): "n" may be a, t, c, g, other or unknown
  misc_feature (545)..(545): "n" may be a, t, c, g, other or unknown
aagggcaattgcttatacagtttccttttaggaatttattatctgggattacttctcttattttcaatgatacacaaaaaagaagaaaatgaattctttgaagaacagttcaatagtccaaattgtactgagttagagattatttcaaattcagtgctttgtcagaaaacattttcattagcatttgtagttaggactatggaaaaattggagtatatgctatcaaagagcaattatattttccaactgttaactagcattagaaagggcaacatctttaattactcattaaaactgtcttttgaaagagtgatcatctaaaatcagatactaaaacattatattgccagaatttaacctctcttcactagtttcttccagcaacaaggccttagtaggcagtctttgcacataatgatcaacattaccaagaaaagaacaatttacatncagcattacttattgccaggttggaaattggggactattttggctgctcctaccatgganctggnaggggaccttttaaataaataatcngaaancgggtccaaat

SEQ ID NO: 16185 - DNA, 548 bp, Homo sapiens
  misc_feature (457)..(457): "n" may be a, t, c, g, other or unknown
  misc_feature (474)..(474): "n" may be a, t, c, g, other or unknown
  misc_feature (523)..(523): "n" may be a, t, c, g, other or unknown
  misc_feature (530)..(530): "n" may be a, t, c, g, other or unknown
  misc_feature (538)..(538): "n" may be a, t, c, g, other or unknown
  misc_feature (548)..(548): "n" may be a, t, c, g, other or unknown
aagcacgaaagtctacatttatttgggacacagaactgacattgtgactcttcacagccgtatctcctttgtctcctagcctcctggcacggtggaaattccccaggaggagaggaaattaagaactgcacagacagaacagtatgcttcaagcggaaaaaaatacggagaaggtggaggaaagcagcacaggtgatttaggtgcatcttctgaaaaagaaatgcacgcgccggacagccaaggaggatgccaagggacagttggcgcccagggcgggctgcaggtatctttcctttctgggaaaaaggtgactgcactccatccagggacaatcaaggacagccaccggagaccaacagaaaacctaatgtcagccttaaaatcaggtggcttagaaactccattttccggccattcggtggtacttcttatcaactcgtcaacataatggatggnattaaaaagccagggtncctttcttctggcttaagggtgaagttctttacgtgccaaagaaggacnccttttntggaatgnggaaaattcn

SEQ ID NO: 16186 - DNA, 438 bp, Homo sapiens
  misc_feature (36)..(36): "n" may be a, t, c, g, other or unknown
  misc_feature (42)..(42): "n" may be a, t, c, g, other or unknown
  misc_feature (92)..(92): "n" may be a, t, c, g, other or unknown
  misc_feature (94)..(94): "n" may be a, t, c, g, other or unknown
  misc_feature (97)..(97): "n" may be a, t, c, g, other or unknown
  misc_feature (164)..(164): "n" may be a, t, c, g, other or unknown
  misc_feature (179)..(179): "n" may be a, t, c, g, other or unknown
  misc_feature (190)..(190): "n" may be a, t, c, g, other or unknown
  misc_feature (263)..(263): "n" may be a, t, c, g, other or unknown
  misc_feature (352)..(352): "n" may be a, t, c, g, other or unknown
  misc_feature (389)..(389): "n" may be a, t, c, g, other or unknown
  misc_feature (391)..(391): "n" may be a, t, c, g, other or unknown
  misc_feature (396)..(397): "n" may be a, t, c, g, other or unknown
  misc_feature (423)..(423): "n" may be a, t, c, g, other or unknown
  misc_feature (428)..(428): "n" may be a, t, c, g, other or unknown
gcaattctgcatccctttatttataaacgagttganaatggngtggtccatttgagagcaagaatgggataggagcaggggggcagggggcncncanagttgggggaggctgattccagtagttcgcgttattcagcaccagagtaaatgcttgggcataaggncgtgctttaacccanacaggtcttgncttatatgtacagcatagtcttaagtatgtatgctctacttatggctttgtccctggacacatcgcagtgacncaacagaggaaaactagaaagaagtctagagaggagaagttgcaaatgcctcatgagctatttcttttttaaaaatctgatggccaaanactagtgctgaacggatgcctaagaaacaggcacatntntgctnnaaacgggctcatctgcttaacttganccagngacaccgttt

SEQ ID NO: 16187 - DNA, 270 bp, Homo sapiens
  misc_feature (8)..(8): "n" may be a, t, c, g, other or unknown
  misc_feature (56)..(56): "n" may be a, t, c, g, other or unknown
  misc_feature (63)..(63): "n" may be a, t, c, g, other or unknown
  misc_feature (77)..(77): "n" may be a, t, c, g, other or unknown
  misc_feature (107)..(107): "n" may be a, t, c, g, other or unknown
  misc_feature (114)..(114): "n" may be a, t, c, g, other or unknown
  misc_feature (220)..(220): "n" may be a, t, c, g, other or unknown
  misc_feature (222)..(222): "n" may be a, t, c, g, other or unknown
  misc_feature (231)..(231): "n" may be a, t, c, g, other or unknown
  misc_feature (256)..(256): "n" may be a, t, c, g, other or unknown
  misc_feature (261)..(261): "n" may be a, t, c, g, other or unknown
gctgtggntcatctttaatagatgcctgaaacataaagtcacacttcaatgggaanggggaancagtgggtgaacangaagctgtgccccgtgactgacaacaattnactctcnctgcaaacacaggctatgccaaaacccagcacacacaggcagaactctgccctgctggctcctgagccctgcgctggcccccaccccacgctcctggagggctctnangaagaacanaagtggggaaacatgggaaatgggnacagncttccacaa

SEQ ID NO: 16188 - DNA, 519 bp, Homo sapiens
  misc_feature (116)..(116): "n" may be a, t, c, g, other or unknown
  misc_feature (425)..(425): "n" may be a, t, c, g, other or unknown
  misc_feature (483)..(483): "n" may be a, t, c, g, other or unknown
  misc_feature (486)..(486): "n" may be a, t, c, g, other or unknown
  misc_feature (493)..(493): "n" may be a, t, c, g, other or unknown
  misc_feature (513)..(513): "n" may be a, t, c, g, other or unknown
aggattaaacaaatttttattgggaggtctgaagagactctccagacctccacaaacaagtttattggaggtctgaaagtttggaggtctgaactccccaaacctccatgatttancaggagacaagataagggtaatcaccccagcactgggatccatgtagattaagtaaatttacttaggttccagaggaatgtcttcaggactcagaccttagttatagattagaagaagttaatcacttatatctttagatgcctgcacacttacacatagacatatagcttagaaggtatataagctctggaaaactttgtaattttgagttggtctggcgattttttccaggtcttctccctgtacccggttacaaaaataactctcttctttcccagttcatctgcatctccatattgggctgcaanaataagcagcagacctcagtttggtctgggaacaatgtctcctccaacctcaatggcnggntgttgtngcaaaaaccccattctctancctcca

SEQ ID NO: 16189 - DNA, 292 bp, Homo sapiens
  misc_feature (27)..(27): "n" may be a, t, c, g, other or unknown
  misc_feature (120)..(120): "n" may be a, t, c, g, other or unknown
  misc_feature (252)..(252): "n" may be a, t, c, g, other or unknown
  misc_feature (257)..(257): "n" may be a, t, c, g, other or unknown
  misc_feature (263)..(263): "n" may be a, t, c, g, other or unknown
  misc_feature (267)..(267): "n" may be a, t, c, g, other or unknown
  misc_feature (281)..(281): "n" may be a, t, c, g, other or unknown
agggataatagtgacttttattctttntacttatctctattttctcatgtttctgtaatgaacatgtttcataaaacaaaatgggtctgttataaaaatctgaaaacttgcttttgaaanagagcagtattacaggctgtagtgtcaaataaaatattaatgttaaatatcacacgctcccgtgaaaataaccaacattcttaattaacctttcagttctgtgaatctaatactagatcacaccttgggtanttccnaaaaanttangccctgaataaaanttaaaaaccat

SEQ ID NO: 16190 - DNA, 289 bp, Homo sapiens
  misc_feature (3)..(3): "n" may be a, t, c, g, other or unknown
  misc_feature (212)..(212): "n" may be a, t, c, g, other or unknown
  misc_feature (228)..(228): "n" may be a, t, c, g, other or unknown
  misc_feature (256)..(256): "n" may be a, t, c, g, other or unknown
  misc_feature (268)..(268): "n" may be a, t, c, g, other or unknown
  misc_feature (279)..(279): "n" may be a, t, c, g, other or unknown
aanagatcaaaatgcatttaatgtggtctagtctcatcgcctacgtctttagatactgctatgtattgaaaataacatgaaaactctccagtttcaccatttaaaataatttgacattctatgccctcacgcagggcagacaccccgtacaggggcctcccaacggtggctcctccccgccccccaggaccctctgggtggggaccacgcancacagcaccagcagangctcagggggtggccaccgtgctctgancaacaagcatangctgcacacanacacacactc

SEQ ID NO: 16191 - DNA, 313 bp, Homo sapiens
  misc_feature (245)..(245): "n" may be a, t, c, g, other or unknown
  misc_feature (261)..(261): "n" may be a, t, c, g, other or unknown
  misc_feature (264)..(264): "n" may be a, t, c, g, other or unknown
aatggattaaactatgagaccatttatttcttccctgccctgcagcgttcagtgggcttacgcacctccggctgccaccatgggctgccctgcagggaaggcctgtgtgaggcagacctttcaggccagaggaggctacaccacgggctcccgcagattctagcaggtgggggcatgagacttcaggtcataggagcagacatcgcagccgtccaacaagtctggcctgagagacgccattgaanggttgggggcaaccanaanctctggggttgtcctgcacgcctgtcctcgtgagtgtgtcctggaaaaa

SEQ ID NO: 16192 - DNA, 559 bp, Homo sapiens
  misc_feature (127)..(127): "n" may be a, t, c, g, other or unknown
  misc_feature (130)..(130): "n" may be a, t, c, g, other or unknown
  misc_feature (132)..(132): "n" may be a, t, c, g, other or unknown
  misc_feature (149)..(149): "n" may be a, t, c, g, other or unknown
  misc_feature (152)..(152): "n" may be a, t, c, g, other or unknown
  misc_feature (157)..(157): "n" may be a, t, c, g, other or unknown
  misc_feature (274)..(274): "n" may be a, t, c, g, other or unknown
  misc_feature (336)..(336): "n" may be a, t, c, g, other or unknown
  misc_feature (365)..(365): "n" may be a, t, c, g, other or unknown
  misc_feature (370)..(370): "n" may be a, t, c, g, other or unknown
  misc_feature (381)..(381): "n" may be a, t, c, g, other or unknown
  misc_feature (393)..(393): "n" may be a, t, c, g, other or unknown
  misc_feature (454)..(454): "n" may be a, t, c, g, other or unknown
  misc_feature (473)..(473): "n" may be a, t, c, g, other or unknown
  misc_feature (494)..(494): "n" may be a, t, c, g, other or unknown
  misc_feature (523)..(523): "n" may be a, t, c, g, other or unknown
  misc_feature (536)..(536): "n" may be a, t, c, g, other or unknown
  misc_feature (539)..(539): "n" may be a, t, c, g, other or unknown
  misc_feature (541)..(541): "n" may be a, t, c, g, other or unknown
atgacaaaaacatttattgagcactttctgcgtgccgggcaccatgccaagcccctggcgcacttcatcatactggatccccaggacaaccctatgaggtagtagtatcgtaagccccattgtacanatnangaacacggggctcaaanaantgaantgacttgcccaaggtcacacagcaagtgcatggcaactcttggatttgaagccagatctgtctcatagctgcagtctagccgtgacacctgagtgcctcctaaaagctacatcacanagctgtctgaggatgctgtggggaacgtctgtgaaaaggtgcaacacgtaaactccgaaaantttatggcaggcctcctgaagaacagcanactanaagctacccanaagcacctgganacaaaatggggaagaatgcctgtctcctctccaagggggcccgaacaccaacctaaacacnggaatctgggtggtcaggntccaccatctctctcctgccncatggtctgccaaaaacctggatggcctnccccacccaaaanttncnggcttccggcagaaaagg

SEQ ID NO: 16193 - DNA, 575 bp, Homo sapiens
  misc_feature (7)..(7): "n" may be a, t, c, g, other or unknown
  misc_feature (54)..(54): "n" may be a, t, c, g, other or unknown
  misc_feature (182)..(182): "n" may be a, t, c, g, other or unknown
  misc_feature (193)..(193): "n" may be a, t, c, g, other or unknown
  misc_feature (204)..(204): "n" may be a, t, c, g, other or unknown
  misc_feature (209)..(209): "n" may be a, t, c, g, other or unknown
  misc_feature (337)..(337): "n" may be a, t, c, g, other or unknown
  misc_feature (369)..(369): "n" may be a, t, c, g, other or unknown
  misc_feature (474)..(474): "n" may be a, t, c, g, other or unknown
  misc_feature (481)..(481): "n" may be a, t, c, g, other or unknown
  misc_feature (489)..(489): "n" may be a, t, c, g, other or unknown
  misc_feature (529)..(530): "n" may be a, t, c, g, other or unknown
  misc_feature (555)..(555): "n" may be a, t, c, g, other or unknown
  misc_feature (558)..(558): "n" may be a, t, c, g, other or unknown
  misc_feature (574)..(574): "n" may be a, t, c, g, other or unknown
aaacaanatggaaatttatttctcttgcatgaaatgtgagtggcacgtgggganttggcagttgtgctccatgagggcatccaaaaacccaggctcctcgtttgtggcttccccatgccctcatctatgtcatttacaggactgaaaacagcccaccatggcctcatctgtgttccggccantggcaaggganggaaggggaangtaancactctggttactatgttgtataataagttaccctaaaacttggcagcttcaagcaaccattgtacatcactcaggattttgtgggtcaggatcaggaaatgctccccctggcagttcttgctttgantctcacatgcggatactatcaaaagttggcanggttgtggttaacaatccactgggctgatgcctgaaaaggccattcccatgctaatgctggctgttgaatttcaccggggctgtttgaacaattgttcctacatnttggccnccccatcngaaaatccttggggttattggacttaaatggtaactggtnncccgcctggaattttttaaaaaaanccnaataaaaaaggctttnc

SEQ ID NO: 16194 - DNA, 585 bp, Homo sapiens
  misc_feature (326)..(327): "n" may be a, t, c, g, other or unknown
  misc_feature (338)..(338): "n" may be a, t, c, g, other or unknown
  misc_feature (398)..(398): "n" may be a, t, c, g, other or unknown
  misc_feature (402)..(402): "n" may be a, t, c, g, other or unknown
  misc_feature (498)..(498): "n" may be a, t, c, g, other or unknown
  misc_feature (505)..(505): "n" may be a, t, c, g, other or unknown
  misc_feature (525)..(525): "n" may be a, t, c, g, other or unknown
  misc_feature (540)..(540): "n" may be a, t, c, g, other or unknown
  misc_feature (559)..(559): "n" may be a, t, c, g, other or unknown
  misc_feature (571)..(571): "n" may be a, t, c, g, other or unknown
  misc_feature (574)..(574): "n" may be a, t, c, g, other or unknown
gctgagtggcatctacttctgactcatggcgtatcctccctggaaggacagatcctaacaccagcaagatagtgaattctccttgtggataaaccccccatgttttatgtgttatgtctcctctggttgcattcgccaatgttggtaacatttgaagcttaaaaggatgatatttgaaaaattttgggccaggcacaatggctcacgcccgtaatccccatactttgggaagctgaggcaaggggattgcttgagctcaggagttcaagaccagcctgggcagcacagcaagacccatctattgaaaaaaaatagaaaaattaccnngttttggtggnacacacccctaattcccactacctaaaaggctgaaggtaggaaggaacacttgaattccncttnttcaaaattacagtgagctatgatcgcccaactgttctccaccctgaaccaataaaatgatttcctatctcttaaaaaataataataataattctnttgcccnggttggaattcaatgctttnctctttggccttganggtacataatctccccctnccttggcctgangcntcctcctctct

SEQ ID NO: 16195 - DNA, 509 bp, Homo sapiens
  misc_feature (404)..(404): "n" may be a, t, c, g, other or unknown
  misc_feature (488)..(488): "n" may be a, t, c, g, other or unknown
  misc_feature (492)..(492): "n" may be a, t, c, g, other or unknown
  misc_feature (505)..(509): "n" may be a, t, c, g, other or unknown
ccttaaaacaacacccatttattatctcacagttctgtagatcttaagtccaggtgggctcaactgggtcctctgtttagggtctcacaaggtagaaatcaagatgttggtcagaagctgggctcttatctggaggctctggggaagaatttgcttccaggcgcaatcagattgtttgcagaattcagttccttgctgttgtaggactatggtccctagtttttttggttggctgttggcagggactactctcagcttctagaggcttccctcaggtccttgtctgtgggaaattgtcatttcagcaatggagaacattcctcctgtagagtctctttcacactttgaatctctcagacttcctctactgccacaagcaggagaaaactctctgttcttaaagngctcacttgattaggttaggtctacctagaatattgcccttttgattaattcagagtcaattgattagcaaccttaattacatntccnaaattccttgcannnnn

SEQ ID NO: 16196 - DNA, 573 bp, Homo sapiens
  misc_feature (479)..(479): "n" may be a, t, c, g, other or unknown
  misc_feature (495)..(495): "n" may be a, t, c, g, other or unknown
  misc_feature (503)..(503): "n" may be a, t, c, g, other or unknown
  misc_feature (534)..(534): "n" may be a, t, c, g, other or unknown
  misc_feature (538)..(538): "n" may be a, t, c, g, other or unknown
  misc_feature (549)..(549): "n" may be a, t, c, g, other or unknown
atgtttataacacgttttattcataattgcaaaagcctggaagcaatgaagatgtctttcaataggtgaatggatgaataaactgtggtacatgtatacaatggaatattatccggtgttaaaaagaattgagctatgacggcattaacagatatggagggaccttaaatgcgtattactaagtgaaagaagccaatctgaaaaggctacatactatatacttttaactatgacattctggagaaggaaaattaggaagacaatttaaaaaaatgagtggttgccaggggttaggggaagaaagaaagaaatagctggagcacagaagacctttagggcagtgaacctattctgtgtgatactatagtactagctagacacaggtctttacctatttgcaagaacccaaagagcgtatagtaccaagaatgaattctaatgtaaactatagactttggatgataatgatggctcaatgnaagttcatcgattggnacatatgnaccattctggtatgcctggtcccagtggggnaagntccttcctttnggggccaaaggccttgatgaaaac

SEQ ID NO: 16197 - DNA, 585 bp, Homo sapiens
  misc_feature (442)..(442): "n" may be a, t, c, g, other or unknown
  misc_feature (454)..(454): "n" may be a, t, c, g, other or unknown
  misc_feature (464)..(464): "n" may be a, t, c, g, other or unknown
  misc_feature (474)..(474): "n" may be a, t, c, g, other or unknown
  misc_feature (479)..(479): "n" may be a, t, c, g, other or unknown
  misc_feature (505)..(505): "n" may be a, t, c, g, other or unknown
  misc_feature (553)..(553): "n" may be a, t, c, g, other or unknown
  misc_feature (560)..(560): "n" may be a, t, c, g, other or unknown
  misc_feature (585)..(585): "n" may be a, t, c, g, other or unknown
atttaaacttgacatttatttataataaaaagggcagcttgatgggtagaagtacaggttaacatacagaaatgctaacaatgtgagaagagtaacattcatatgctttgttcaatgatctaagggagttgctattctaacttctgtcattttctctacatttcaatgttcagagggaaaactggtcatgaagcctactcgggattatggatataaacttgtggaatcagttcccaagaggtgggtagtgaagtgacttccaattcccatttgcaactctcagagctgagattaaaaactccttgttatcaactcacagaacaagaaaatacagcatccctctatattctagacatctacctgctttcaggtgtgacttctgaacttgccagaaggaaagaagtgtggagctgcccccttagacctaatgcctcgccctggnttgggttgggtncagttcctgnataagtccanactgncaacggtgaagattgcagggaagtangtgatggttgctataaaaagctttgggtctttaggatgcatgaaggcntcatggnttggggccatgatgcctaaagggcn

SEQ ID NO: 16198 - DNA, 554 bp, Homo sapiens
  misc_feature (6)..(6): "n" may be a, t, c, g, other or unknown
  misc_feature (452)..(452): "n" may be a, t, c, g, other or unknown
  misc_feature (505)..(505): "n" may be a, t, c, g, other or unknown
  misc_feature (534)..(534): "n" may be a, t, c, g, other or unknown
  misc_feature (545)..(545): "n" may be a, t, c, g, other or unknown
  misc_feature (549)..(549): "n" may be a, t, c, g, other or unknown
ctctgncattctttcatttatttcccttgattttctttcttttacttcctaactcctttcattttccaaggactgttctctgacctatacatttctctttctaccatcacttcttaaatggctaatacctgttcaagaattttatgagcctttaaatactagctatttttatgtatagtattttaagagtatttttgagagtctattgctctttataataatcatagcttatgaaatctcatgggatgcagtctttgtttgcttccaaatgtacacacttttatctaatgactcctctatagttagcaacatatgactagggcctcagaagagagattgtatattctgattttgcttttttttcccttaaattgatttccacttctttctcccatccatacagacttcttacattttaaatcaagtttccatgcctgagctaaaaagatgcncttacttattcacatattcattaatgctctgggggtgaatgggttctggacanaacctggcccttagggggttctatggggngggccttttgngccnaggga

SEQ ID NO: 16199 - DNA, 568 bp, Homo sapiens
  misc_feature (550)..(551): "n" may be a, t, c, g, other or unknown
ctttatttcacaaattttatttcatctgtgtagttcacgaaccatttgcgaaaggatttgggtacagggtaattattcctacatataaactggttttatgtgaacatcagaatatgccctgaattttattattttccatgtctgaattgtactacaatgaatctataggtattaaaaataagcaacacactaaaatcacataaggtcaattccttgaaaaactcaattcctaaagtgaaaatatcattggttccaaaacattcatctacttaagataaatgttttgactcatgtgagatcattttcattatactttcattgtgtgtgtgtgtgtgtgtatatatatatatatacatgggaagtttttttttacttatattcttaagagacagagaacacacaaaatatttaaaggggttttgtcatggaatcatagaactatagatgagaagttatcttaaaggacattttacaaacctcttcattttacagagggagaactgtggattccggtaaatgacctggccaaggcacactcagtggcataganncctttctgcttgggtaa

SEQ ID NO: 16200 - DNA, 585 bp, Homo sapiens
  misc_feature (484)..(484): "n" may be a, t, c, g, other or unknown
  misc_feature (489)..(489): "n" may be a, t, c, g, other or unknown
  misc_feature (554)..(554): "n" may be a, t, c, g, other or unknown
  misc_feature (558)..(558): "n" may be a, t, c, g, other or unknown
  misc_feature (561)..(561): "n" may be a, t, c, g, other or unknown
  misc_feature (572)..(572): "n" may be a, t, c, g, other or unknown
ctgatacaagatcttgctgtgttacccaggctagagagtgcaggggcacaatcatggctcactgcagccttgacctcctgaacttaagcaatcctcccatctcaggctcccaagtagctgggactacaggcacatgacaccacatccaactagtttttgtattttttgtagagacaggttttgccatgttgctcatgctctgcctttctatataaattttagattctgtcaatatccacaaaataacttgttaagaacaaaatcaactgagattgtgttgaatctacagattaagtagggaaaaaaatgacatcttgccaatagtgagtttttctatccatgtacatgaactagacctctcaacttatttattctttgatttctttcatcaaagtttcatagttttcctcatatagatcttgtaaatattttgctagatttatacctaattgttttggagatttttgatgctaatgtaaatggnactgngctttcagttcacattccagttggtcatgctggtatggaaggaccactggactttaaatattaancggnatnctataacctgntataatgggtaat

SEQ ID NO: 16201 - DNA, 572 bp, Homo sapiens
  misc_feature (480)..(480): "n" may be a, t, c, g, other or unknown
  misc_feature (513)..(513): "n" may be a, t, c, g, other or unknown
  misc_feature (517)..(517): "n" may be a, t, c, g, other or unknown
  misc_feature (520)..(520): "n" may be a, t, c, g, other or unknown
  misc_feature (541)..(541): "n" may be a, t, c, g, other or unknown
  misc_feature (555)..(555): "n" may be a, t, c, g, other or unknown
  misc_feature (562)..(562): "n" may be a, t, c, g, other or unknown
aaaactcaatgttgacttgtaatttatcagtttaaacaaaaatgacaaaatggaaggtgtatttgacataatcagaaataaaatttcaaatagcctataattcacacaaagcctaggctggaaaatacaagtgctttgactcatttattaaaaaaggcttcatgtaaaccttgcatgagaagatgtccattagttactcaggatagagggcaaagagattatatacaaaaagtattttcaaggactatcttgttcttcctttataagaagttgaatttaatttttgaagtaattacttaggaagaaatgcagaggagttccacagaaaaagatggcaaccagaatgatattccgtcagccagatttttaaaattccttcactctgaaatttcttctttgtcagctaaaactggtttctgggtcagtttccttaagtgagcctttgttcacattcagtatcaaaaccagctgacctttaantaattttggggttcattttcccttttggcggcnttanggntctttcgacaatccattcccnaggttgggttggtntggcctnccaaaaattc

SEQ ID NO: 16202 - DNA, 589 bp, Homo sapiens
  misc_feature (5)..(5): "n" may be a, t, c, g, other or unknown
  misc_feature (384)..(384): "n" may be a, t, c, g, other or unknown
  misc_feature (464)..(464): "n" may be a, t, c, g, other or unknown
  misc_feature (507)..(507): "n" may be a, t, c, g, other or unknown
  misc_feature (524)..(524): "n" may be a, t, c, g, other or unknown
  misc_feature (540)..(540): "n" may be a, t, c, g, other or unknown
  misc_feature (565)..(565): "n" may be a, t, c, g, other or unknown
  misc_feature (581)..(581): "n" may be a, t, c, g, other or unknown
  misc_feature (589)..(589): "n" may be a, t, c, g, other or unknown
aatgntattctacaatacagatttcacatccaacataaagtttcaaaaacaatggtttagggaatactgagtttgagctgaggttcttgtataacatccagaaatacacagtcagaagtcagaaagatattctgatcttgagttcaggagatctagaatgaacatacagaactgaaagtcttcagcacatgggtgatctatgaggtagggatgtgatcaaagagatacatgggaaaagggctgaggttgggggtatctataatacttgtgaagtccttctttacatacagttccaaggatgttaattatttttcaattcattcaaatatcaaagcagtattccacttttagttttgcatcaaatgttggagtgctacattttgntttccatgattcaaattcatgcagaaatgcttagattctaaaaactagtttaatctgagctctttggtccttacttcttncccatgctggatgattaccctaatctttttattcatcactaanaggttactgccaaaggnttggaaaaaatggatnccagatacctaacttttaatccccngaagacctccaataantcaaagan

SEQ ID NO: 16203 - DNA, 547 bp, Homo sapiens
  misc_feature (491)..(491): "n" may be a, t, c, g, other or unknown
  misc_feature (493)..(493): "n" may be a, t, c, g, other or unknown
  misc_feature (508)..(508): "n" may be a, t, c, g, other or unknown
  misc_feature (522)..(522): "n" may be a, t, c, g, other or unknown
  misc_feature (532)..(532): "n" may be a, t, c, g, other or unknown
  misc_feature (537)..(538): "n" may be a, t, c, g, other or unknown
gctgctatataaaaagggaataatagaacaaacatttttttccttgttgttctttacttctaagactcttttcatgttttccatggtacaaggtaaacattagaatttacattttggagacctaaggggcaatgaacaggagtgggacctggaggatacggctctctggcaattcaagaatttcaactcaatggtaaagggcttgcaagagaaaatggactgctatttctccacttgctagatggcatcccgtgagtcctataatacacgaggtgtcttccccacactactcaatgtaccattttgggtttttcctactggacctactaaatgctgagtgaaatctaaagaaggtggtagatactagcattcctggctgtgtaatctatacattttcattttaaatatagtaattcaagcataatccatatttaaaaaattagactaaggagagacaataaagggtttaaaccgttctctttgaaaagaangnatcttacagtacatnccaaaatactctgnaaatccttcnacttnntttccaaac

SEQ ID NO: 16204 - DNA, 589 bp, Homo sapiens
  misc_feature (471)..(471): "n" may be a, t, c, g, other or unknown
  misc_feature (475)..(475): "n" may be a, t, c, g, other or unknown
  misc_feature (543)..(543): "n" may be a, t, c, g, other or unknown
  misc_feature (545)..(545): "n" may be a, t, c, g, other or unknown
  misc_feature (556)..(556): "n" may be a, t, c, g, other or unknown
  misc_feature (572)..(572): "n" may be a, t, c, g, other or unknown
  misc_feature (589)..(589): "n" may be a, t, c, g, other or unknown
caaagaatgtgtaaatactttatttcaaaattgtatcaagggttattcagttcctcttgctatctaaattaaaatgttcaaccaaatgcggatccaaaaaaattagaaaattaaacgaccaattaagtgaccttttaaacttcagttctttggtacactaaatctaagtaaattcaacaacaaagtacaatgatgagccctccatacctatggaaggctctgtgcttcgtcattcaactatagatcaaaacaatattcatttaaaaaaaatagctgcatctgcattgaacatgtacaaatttttctcttgttattattccctaaacaatatagtataacagttatttaaatgatgtttatattatactaaatatatgtaaagacgatgtaaagtatatgggaggatatacataggttatatgcaaatactatgccttgagcatcctcagatttgggtattctaggggacanaaanggtagggcctggcacaattcccacagcacccagggccaatgggttacttttctgaaaagggaatttcngncccaacccctnaaggctaaacctaaanggggaatttcatttttn

SEQ ID NO: 16205 - DNA, 572 bp, Homo sapiens
  misc_feature (533)..(533): "n" may be a, t, c, g, other or unknown
  misc_feature (535)..(535): "n" may be a, t, c, g, other or unknown
  misc_feature (539)..(539): "n" may be a, t, c, g, other or unknown
  misc_feature (553)..(553): "n" may be a, t, c, g, other or unknown
  misc_feature (556)..(556): "n" may be a, t, c, g, other or unknown
  misc_feature (569)..(569): "n" may be a, t, c, g, other or unknown
agtatgttattcagtattgtttattggaaatcaattgtaaaggcatatactttttaaaggctcaggtatatacttaaaaaaatgaatcaggacatatttttacagatagtaggcttaacttctaatttgtcaggatttaaaattagttattattacatagctctgtattttgtatgtactctttagtataattgttaaaggttccacatgtctaagaactctacaggttaatgacttcttatgaatacattgtaaatagttgcatcaaagtagtcacatgctttctgaaggtgttatttctcataatttgttaaaaacgcctcaaaatgccaagtcagtaaattacaaaagcaattgtgctgaaggttgtaaacatttctgtgctaaaatgtacaaactagaatgctgattttttatttgaaattgaaacagtaagtatttaaaaggaaagaagaatagaatattgcctatatgtataccataaaagtcagaaagtctatattgaaacccttctagaaattttaaaaagaaangngggntacatatttgaagnggnttcatttcaatanggg

SEQ ID NO: 16206 - DNA, 552 bp, Homo sapiens
  misc_feature (470)..(470): "n" may be a, t, c, g, other or unknown
  misc_feature (512)..(512): "n" may be a, t, c, g, other or unknown
  misc_feature (519)..(519): "n" may be a, t, c, g, other or unknown
  misc_feature (530)..(530): "n" may be a, t, c, g, other or unknown
  misc_feature (551)..(551): "n" may be a, t, c, g, other or unknown
ccattgcatacggtttatttcactagattgcaattttatacacagtatgaaggggtttcctgatagcacatatatagtttactttctgtactgctgaagaaccaattgttttttacattgtatcataataccctatcattaaaacattattcagtgaattttttccaactacatataaacggagatttaccacacacattctttaccatggtgcaagaatgcctttataacatatttgaatcacaaaatgtgagtctaaaatacatcactgtaattaaaacactactttaaagttacaatgccccatgttatagtagccagatttgattaatccctgtataaatcacaaagcaatttggtggataatgtcttggctaactggcagcagcttttaaccgtgatattaaaaaaaaaattctttaattaagaaccagactttcacaatttagaaaacttcttcccttatatgncaatattctcagtcaaaatgggatatttaaaaattgcagctntaaacanggaaataaatncaaccttccttactgaagganc

SEQ ID NO: 16207 - DNA, 532 bp, Homo sapiens
  misc_feature (414)..(414): "n" may be a, t, c, g, other or unknown
  misc_feature (482)..(482): "n" may be a, t, c, g, other or unknown
  misc_feature (502)..(502): "n" may be a, t, c, g, other or unknown
  misc_feature (522)..(522): "n" may be a, t, c, g, other or unknown
  misc_feature (524)..(524): "n" may be a, t, c, g, other or unknown
  misc_feature (530)..(530): "n" may be a, t, c, g, other or unknown
acttggaatttccatggatttatttctaatatactataaatgattttagaaaaagaatgttactggagcaggacagctcatctagggtagtggctctcaaacctagctaaacagtcgaatcaccagaagggctcttaaaatccagatacagaccatttaaaatcccgatctctggaggtggagccaggtaaaggtatcttttgaatctcctctggtgactccaagataaagccaagtttaagaaccacactgatccagtggtaaaacaattttcaaaacagaatcacatgtttaaaaaattttgtcccaacatactttagaaatggatataattcagttatcattttataataatctttaatacacattctaactgtatacatcaatcagaacatttcttcttgctatttttgnaattctgctaaatggaaaacagtttcatggccaggaaacctttgcagaagaaaattaaaaaggaaacntttgcttgaccgagctaatnccaaaagcttccacttaatngngctggncc

SEQ ID NO: 16208 - DNA, 556 bp, Homo sapiens
  misc_feature (437)..(437): "n" may be a, t, c, g, other or unknown
  misc_feature (442)..(442): "n" may be a, t, c, g, other or unknown
  misc_feature (451)..(451): "n" may be a, t, c, g, other or unknown
  misc_feature (456)..(456): "n" may be a, t, c, g, other or unknown
  misc_feature (519)..(519): "n" may be a, t, c, g, other or unknown
  misc_feature (529)..(529): "n" may be a, t, c, g, other or unknown
  misc_feature (535)..(535): "n" may be a, t, c, g, other or unknown
  misc_feature (546)..(546): "n" may be a, t, c, g, other or unknown
atatttgtcgttttttttttttgagacggagtctcgctctgtcacccaggctggagtgcagtagcatgatcttggctgactgcaacctctgcctcctgggttcaagtgattctcctgcctcagcctcctgagtagctgggattacaggcacgcaccaccaggctcggctaatgcttctatttttagtagagacggggtttcaccacgttggtcaggctggtctcgaactcttgaccttgtgatccacccgccttggcctcccaaagtgctgggattacaggtgtgagccacctcgcctggccagtggtcatgaatattaagatcatttctgcatttgtaaaacggatcatcatactagctgggggagagctgtagcaggtgacatgaaacggcatgttctagggacctcctgcgggatgccgaggccacaagcctgnacttntgcgtcctnaccgnttttcccctttcccacattcttccacctttgggggatcaacattggaactgaatatttctggntttccggganccaaancttacattggnccttgatctt

SEQ ID NO: 16209 - DNA, 570 bp, Homo sapiens
  misc_feature (303)..(303): "n" may be a, t, c, g, other or unknown
  misc_feature (363)..(363): "n" may be a, t, c, g, other or unknown
  misc_feature (430)..(430): "n" may be a, t, c, g, other or unknown
  misc_feature (439)..(439): "n" may be a, t, c, g, other or unknown
  misc_feature (442)..(442): "n" may be a, t, c, g, other or unknown
  misc_feature (546)..(546): "n" may be a, t, c, g, other or unknown
  misc_feature (558)..(558): "n" may be a, t, c, g, other or unknown
  misc_feature (567)..(567): "n" may be a, t, c, g, other or unknown
gcgtggaggaacatgcaattttattcaatataaacatttgctattttctgcttagaaaccacaccctgaagacgtgctgtctatgcagttatggcacattatatggaaactctcatgacatgaaaaataaatacagctagttaagtataaaatgccaaataaaagtgacacgtacaatgcggtttataaaaataagcttaacatctgagaaaatgtaccaagtggttgtgtgtcctcagatgtgtggggaggatccatcccccacccactgcagcctcacaccgagtccaccttggacatggnggccacattactcagctgggagaagccacccttatcctggttcctgcctcctgggggctntggagacggatgcctatggcgcctcatctttaaactgtccttagtagcccaggggagccacaccctnactccctgnctncccccggtccgcatggtggcacccgtgaggcaatctcagcaagtcctcatgctggtctttggctttcacaagaaaagtgaactttcagcttaataaccagaaanggcttaaaaagnaaaacaggnctt

SEQ ID NO: 16210 - DNA, 143 bp, Homo sapiens
  misc_feature (102)..(102): "n" may be a, t, c, g, other or unknown
  misc_feature (115)..(115): "n" may be a, t, c, g, other or unknown
  misc_feature (118)..(118): "n" may be a, t, c, g, other or unknown
  misc_feature (128)..(128): "n" may be a, t, c, g, other or unknown
  misc_feature (132)..(132): "n" may be a, t, c, g, other or unknown
  misc_feature (142)..(143): "n" may be a, t, c, g, other or unknown
ggtctcctccaaaatatattttatttaattaggggcctttatggggggtggcaggaaaaaggttagggagctagaggtagatgggtgtgggggtgggggggnaaacaaactgacnaanggaacaaacnagangagagatccnn

SEQ ID NO: 16211 - DNA, 597 bp, Homo sapiens
  misc_feature (186)..(186): "n" may be a, t, c, g, other or unknown
  misc_feature (340)..(340): "n" may be a, t, c, g, other or unknown
  misc_feature (545)..(545): "n" may be a, t, c, g, other or unknown
  misc_feature (587)..(587): "n" may be a, t, c, g, other or unknown
  misc_feature (592)..(592): "n" may be a, t, c, g, other or unknown
  misc_feature (594)..(594): "n" may be a, t, c, g, other or unknown
cacctccacccacctccccccgtccttccacatacacacaggaagttttgtcttggaggtggcattgttgggagcgctgttttcgtgatcttcagaccccaggttctttggtacgctcgtgtttagtgtgtatttattaattggggagggtatttgaggcaaaccgaaagtctcggggcggggaantgagtggagcctgggcataattgaggagtcgccggagttgagggatccacgttgaaggtgacaatgacttttctccgccgcagtgttctctcgcggaaaggagcccggcggccgaaaggcccgagaggaaagcgactcgttggccaccgcgcancggccggggtcggtgcgtccgcgtgggcgcgaggcgcgggcagggtcgggcgccgttgtgaaacctcgtggtttagttgactgcagccctcggactaaggtggacaataaacgccattcgctcggaaactaattgccatccgcttccgaactggcggccgaaggtctttaaatcggcctttgggggtcagtgctgggctctgccngaacgcacccgcgttggcttgtttgctccactcccgaaggantccgntncca

SEQ ID NO: 16212 - DNA, 102 bp, Homo sapiens
  misc_feature (93)..(93): "n" may be a, t, c, g, other or unknown
  misc_feature (97)..(102): "n" may be a, t, c, g, other or unknown
ccagaataaatgaatttaatcaagaataacacataattgcaatgcagagtatgcaagcctcagtgggtcacaggcatatggtgggggggtggngtgnnnnnn

SEQ ID NO: 16213 - DNA, 582 bp, Homo sapiens
  misc_feature (90)..(90): "n" may be a, t, c, g, other or unknown
  misc_feature (161)..(161): "n" may be a, t, c, g, other or unknown
  misc_feature (461)..(461): "n" may be a, t, c, g, other or unknown
  misc_feature (497)..(497): "n" may be a, t, c, g, other or unknown
  misc_feature (504)..(504): "n" may be a, t, c, g, other or unknown
  misc_feature (506)..(506): "n" may be a, t, c, g, other or unknown
  misc_feature (531)..(531): "n" may be a, t, c, g, other or unknown
  misc_feature (568)..(568): "n" may be a, t, c, g, other or unknown
  misc_feature (572)..(573): "n" may be a, t, c, g, other or unknown
cgtgtttttgacattccttgaatctgttttttattccccttccacagaacaggcctgggactttccaacaccctgctaaggaagttctgngtccaagaggcatcccagctttcttcccctctgtcctcccaatcccctgggccattttcatgacagcttgnttccatgtattaaaggaatgacatatacagaaatgtcgtctcctgagcccagtcggtcattagatatccgccatcctctgtccttcagcacaccccgggcacgcatcgccaggtcctgagctgccagtgtgtacctgtgaggatcatctggatcacagttaggaagaaactgagtgattgcttctgctacttcttcatttgataaaacgtcccagagtccatcagtggccaagatcagcacatcatctgatccatgatcatattttgaaagatcgtagattcttacctttggagctgaanacaggaatggtttaatgtaaatgttggagtcatgcncctttangncatgggccccaagtcccctgggacntcaaaaggtgccattaccccgggcctttttgcctttnccannaataagggg

SEQ ID NO: 16214 - DNA, 469 bp, Homo sapiens
  misc_feature (429)..(429): "n" may be a, t, c, g, other or unknown
  misc_feature (440)..(440): "n" may be a, t, c, g, other or unknown
  misc_feature (444)..(444): "n" may be a, t, c, g, other or unknown
  misc_feature (447)..(447): "n" may be a, t, c, g, other or unknown
  misc_feature (449)..(449): "n" may be a, t, c, g, other or unknown
  misc_feature (456)..(456): "n" may be a, t, c, g, other or unknown
  misc_feature (459)..(459): "n" may be a, t, c, g, other or unknown
aagagacggagtctcactatgttgcccagtgcctaggctggcctcaaattcctgggctcaagtgatcctcctgcctcagccttcagagtagctgggattacaggcatgcaccacactgtgcctggctcatctcattttctagaatggatatattgacaaagaaaagagaagaaataagaaatgcaaaaaatgcaccttcaccatatggccctttagctaaaagctacaaagctaacaagggtgtgccatcagaactatccatgtacatgtacagagatgattttaacagctgccatgtgacatgtggcttaaagtcaccctgagtctactaaatggttgtgttgtcaatatatctaaatatggctacgtgctctccagagtgttcccatgatcaccacgtcctttgatcagtgccatctggaagaacanatgagtgcaancctnctntnatctctntgngctggcttcc

SEQ ID NO: 16215 - DNA, 515 bp, Homo sapiens
  misc_feature (61)..(61): "n" may be a, t, c, g, other or unknown
  misc_feature (225)..(225): "n" may be a, t, c, g, other or unknown
  misc_feature (303)..(303): "n" may be a, t, c, g, other or unknown
  misc_feature (333)..(333): "n" may be a, t, c, g, other or unknown
  misc_feature (373)..(373): "n" may be a, t, c, g, other or unknown
  misc_feature (375)..(375): "n" may be a, t, c, g, other or unknown
  misc_feature (395)..(395): "n" may be a, t, c, g, other or unknown
  misc_feature (424)..(424): "n" may be a, t, c, g, other or unknown
  misc_feature (447)..(447): "n" may be a, t, c, g, other or unknown
  misc_feature (495)..(495): "n" may be a, t, c, g, other or unknown
  misc_feature (498)..(498): "n" may be a, t, c, g, other or unknown
  misc_feature (506)..(506): "n" may be a, t, c, g, other or unknown
ctctcaggaatgtcaataatttgtaggttttgttgctttacataatcccacatttctcaanacgtttttcatttttcctaattctttctttttatttttgtctgacttggttagttcaaaagaccagtctttaaggagtgaaattttttcttctgcttgctctagtctattgataaagctattaattttgctttaaaatttcttatgcaagtttttcaattccanaagctctggttggtttctttttaaggtgtttattgcttccttaatttcctggattcatttagaagtttctttgtgtanattttcaatcaggtctcgggtctcattgancttctttgcaaccatgttttgaatttttaatttgtcattncnaatttcctattttgggttanggaccatggcttggaaaaccaatgttaancctttggtctggtaactaatatncataatattccatagtggccaaaattttaatgctgaattcctcctcanccngaaaaacngggcattcc

SEQ ID NO: 16216 - DNA, 318 bp, Homo sapiens
  misc_feature (14)..(14): "n" may be a, t, c, g, other or unknown
  misc_feature (41)..(41): "n" may be a, t, c, g, other or unknown
  misc_feature (87)..(87): "n" may be a, t, c, g, other or unknown
  misc_feature (244)..(244): "n" may be a, t, c, g, other or unknown
  misc_feature (267)..(267): "n" may be a, t, c, g, other or unknown
  misc_feature (271)..(271): "n" may be a, t, c, g, other or unknown
  misc_feature (279)..(279): "n" may be a, t, c, g, other or unknown
  misc_feature (309)..(309): "n" may be a, t, c, g, other or unknown
caaattaaaaacanaaatttattcctcccaattttcaagtnttgcacttgggggaaaaaccatgctccatgccacacaatcaatccnggcaaggccccctctgttcactgcggaactggtcatcagcggccaacaaatacctggcctctggctgcctctcttgcaagctgggggtgggctgtctctcctcagcagggccacgggcttctgaaaaagtgcttgtcctggaacacaggaacaccangtggggggtgcccttgaccccanccanaccccaancagggctgggacagacaaacaggaaccaanaccacccca

SEQ ID NO: 16217 - DNA, 516 bp, Homo sapiens
  misc_feature (48)..(48): "n" may be a, t, c, g, other or unknown
  misc_feature (177)..(177): "n" may be a, t, c, g, other or unknown
  misc_feature (241)..(241): "n" may be a, t, c, g, other or unknown
  misc_feature (298)..(298): "n" may be a, t, c, g, other or unknown
  misc_feature (312)..(312): "n" may be a, t, c, g, other or unknown
  misc_feature (315)..(315): "n" may be a, t, c, g, other or unknown
  misc_feature (356)..(356): "n" may be a, t, c, g, other or unknown
  misc_feature (375)..(375): "n" may be a, t, c, g, other or unknown
  misc_feature (405)..(405): "n" may be a, t, c, g, other or unknown
  misc_feature (420)..(420): "n" may be a, t, c, g, other or unknown
  misc_feature (445)..(445): "n" may be a, t, c, g, other or unknown
  misc_feature (451)..(451): "n" may be a, t, c, g, other or unknown
  misc_feature (476)..(476): "n" may be a, t, c, g, other or unknown
  misc_feature (481)..(481): "n" may be a, t, c, g, other or unknown
  misc_feature (509)..(510): "n" may be a, t, c, g, other or unknown
gacttaataatgtaatttatttgaaatacttccagaaaagtttaaggncattatacaaaaacattcatttcatcaaaacattcattgaccaccttcccataggccaacacttgacaaacctcttttcccaacacactggctgatggcttctaaaagtggctgatggcgcctacaaanaatcattcattcttttcttcaccaataaaggctgttcttggctttcctctgcttctgtctgcancaggttcacttgctgtatcaataacgacttgagaaagcagttttaaataaacttgtnataaaaaaaattcntcntgtttaagacctataaatacagaaatatgttttacagggtnaaattgatcacaatatccntgttttccaaaaataataaagtatataccntgtttttatattganatatcttgtccacagcttgaatgcncatganatatgttcataataaaatgacatcnatgcntttactgctttcttttccgttaacttgnnagaaca

SEQ ID NO: 16218 - DNA, 508 bp, Homo sapiens
  misc_feature (25)..(25): "n" may be a, t, c, g, other or unknown
  misc_feature (30)..(30): "n" may be a, t, c, g, other or unknown
  misc_feature (60)..(60): "n" may be a, t, c, g, other or unknown
  misc_feature (71)..(71): "n" may be a, t, c, g, other or unknown
  misc_feature (114)..(114): "n" may be a, t, c, g, other or unknown
  misc_feature (126)..(126): "n" may be a, t, c, g, other or unknown
  misc_feature (151)..(151): "n" may be a, t, c, g, other or unknown
  misc_feature (158)..(158): "n" may be a, t, c, g, other or unknown
  misc_feature (163)..(163): "n" may be a, t, c, g, other or unknown
  misc_feature (176)..(176): "n" may be a, t, c, g, other or unknown
  misc_feature (270)..(270): "n" may be a, t, c, g, other or unknown
  misc_feature (281)..(281): "n" may be a, t, c, g, other or unknown
  misc_feature (390)..(390): "n" may be a, t, c, g, other or unknown
  misc_feature (429)..(429): "n" may be a, t, c, g, other or unknown
  misc_feature (455)..(455): "n" may be a, t, c, g, other or unknown
  misc_feature (458)..(458): "n" may be a, t, c, g, other or unknown
  misc_feature (479)..(479): "n" may be a, t, c, g, other or unknown
  misc_feature (484)..(484): "n" may be a, t, c, g, other or unknown
  misc_feature (488)..(488): "n" may be a, t, c, g, other or unknown
  misc_feature (499)..(499): "n" may be a, t, c, g, other or unknown
aattctaataaatatgtatttcgangtgtntgaaaaaaaaataaccattgttttaagganataactgggangaaggtttttaaaaaaatgattgaattacataaaaacatatangaataatgccanaacggacatataagacaaactccangaaaggntatangcaaataaatganggttggggaaacactgctttaaatcaagactattcactcatggaccatcccaacccttataaaaataactagcaggtgaaaactggtagtgtangtctgtctccnaagtatgcactgggaacagtggacggtttatagataatccactaaaagaagagctccacatacaaatacatacattattatatttacagttaaacaggttttttcccangtgccttctcagggtcttccatatgttaatacttacgtnactcttgaaaaaaaggacatggtgtncancatctcccaaatgttggcaancccgncaanaaccgtggccntcccgtttt

SEQ ID NO: 16219 - DNA, 2311 bp, Homo sapiens
ctatagtcaagctaatgacccatgtagatgtagtgttgtacctggtgtccgtgtccctgtgaatgtgtcatgttgtgctggcctgattccccaacatcagccccagggagccagcagctggagcagctgtcatcttgtgaaagcagagtgtccttgttgctattgattgggttgttcagtcaattgcaaaaaaagtggatctaactgtcaatggtagttatatgataatcctggagataaataagtgtcaagtgaagtattacttgaatttaggacctgaagagagagaaaggggtatgagtagttggaggggaagatttgctatgacaagctattattcagtgtggttattttgtatgacaggtaagtctacaggtatcttttgttagataaaccagaaattaagcattccctttgtaaactccaaacaagattttgaaacaccatggtccccccttatccacctccaagatctccagtggatgtctgaaaccactgatagtactgaagtctctatatattatgtttttcccctgtatgtaatacatacctgtgataaagtttaatttataaattaggcacaggaagaaattaacaaaaataagtaagaatagaacagttataactatatgttctattaaaagttatgtgaatttgttttctgtctctctcaaaatatcctgttgtgctgtgtgttcacccatttttgagctgccgttgactgtggataacaaaccacagaaagtgaaacttcacataaagggggactactgtattctcataatgttaattgcttctagaattcacaaggattgaattcaacttgaatcttgctaaagaagtactttattattcgatgttagtccagcaacaacttatagtgtagaaatttgcccttttgagggtgaatacacaaaggtgaaagaaaacttgtgtgcccacggtccactaacagataagcttctggaggccaggagtaaaccgccctgcaggggagccatctcccagggtttccccagcagagagctgtgcccagtgccggggtctcatgcttacctatttctctgtgccagtatagtagacctgttttcaagcctggcatgagccttaagtattactggctgggagtggtggctcatgcctgtaatcctagcactttgggagggtgaggcaggcggattgcctgagctcaggagtttgagaccagcctgggcaacatggtgaaaccctgtctctactaaaatacaaaaaattagccgggcgtggtggcgggcacctgtagtcccagctacttgggaggctgaggtaggagaattgcttgaacccaggaggcagacattgcagtgggctgagatcacgccagtgcactccagcctgggtgacagagcgagactctgtctcccacaaaaaaaagaaaaaaaaaaaaagtattacttatttagtaagtccatagcattttgttcacacagtgtatcattgtgcttttctgtttcaaagtgtaattatttaatctagaaattttaagtcctgtgacagaaaacaaatgctgttctcacaaaatatgagaaatcaaattccatcttattatttaaattaattcttttttaactgaagaattgttatgtgggtagctttcaacataattttttcaatattagatgcttataactaatgtggatttagttaattcgatgtttatcacatttaattcttatttactacaaaggttaaagcaattttatttcttctggaaacttttaggatcttgtgagtgagggacgtcagccaaaattggcaactttttcaagcaactggctcaagaaattaggaatttctctaataatgagccatcgttttttgaattcaacaatttaaaagggctgtatagttaggatatgattccagtttcccctcagtgcaaattgatatttttttctgttgacacattctactttgttttcgaagactagtttatagtgttcttttaaaagcaaagaaaatatctttaaaaatcccagctttttggctgggtgcggtggcttcatgcctgtaatcctagcactttgggagggtgaggcaggcggattgcctgagctcaggagtttgagaccagcctgggcaacatggtgaaaccctgtctctactaaaatacaaaaaattagccgggcgtggtggcgggcacctgtagtcccagctacttgggaggctgaggtaggagaattgcttgaacccaggaggcagacattgcagtgggctgagatcacgccagtgcactccagcctgggtgacagagcgagactctgtctcccac

SEQ ID NO: 16220 - DNA, 2043 bp, Homo sapiens
  CDS (60)..(1163)
tacgaagcattccagaagactcagagttaaatacagttacattgccaagaaaagcaagaatgaaagaccagtttggcaattctattatcaacacacctctgaaacgtcgtaaagtgttttctcaagaacctccagatgctttagctttaagctgccaaagttcctttgacagtgtcattttaaactgtcgaagtatacgagtaggaacactcttccggctgttaatagagcctgtaattttttgtttagattttatcaagatacagctagacgaaccagaccatgatcctgtagagattatattaaatacctctgatctaactaaatgtgaatggtgtaatgtccgaaaattacctgtagtgtttcttcaagcaattccagcagtttatcaaaagctgagcatccaactgcaaatgaataaggaggataaagtttggaatgattgtaaaggagtaaataaattaacaaatttagaagaacaatatataattttaatttttcaaaatggccttgatcctccggcaaatatggtatttgaaagtatcattaatgaaattggtataaagaataacatctccaatttttttgcgaaaattccctttgaagaagctaatggcagacttgttgcctgtacaagaacctatgaagagagcatcaaaggaagttgtgggcaaaaggaaaacaaaattaaaactgtatcatttgaatctaaaatacaacttagaagcaaacaagaatttcagttttttgatgaagaagaagaaactggagaaaaccacaccatcttcattggcccagtagaaaagttgatagtatatccaccacctccagctaagggaggcatctctgttaccaatgaggacctgcactgtctaaatgaaggagaatttttaaatgatgttattatagacttttatttgaaatacttggtgcttgaaaaactgaagaaggaagacgctgaccgaattcatatattcagttcttttttctataaacgccttaatcagagagagaggagaaatcatgaaacaactaatctgtcaatacagcaaaaacggcatgggagagtaaaaacatggacccggcacgtagatatttttgagaaggattttatttttgtaccccttaatgaagcatggcttaagcaaaatcagactaaactatagcgatgaatcacctgaagctggtaaaatgcttgaagatgaactcgtcgacttctcagaagatcaggataaccaggatgatagcagtgacgatggattcctcgctgatgacaactgcagttcagaaataggacagtggcatttaaagcctactatctgtaaacaaccttgtatcctacttatggactcactccgaggcccttctcggtcaaatgttgtcaaaattttaagagagtatttagaagtggaatgggaagttaaaaaaggaagcaaaagaagtttttccaaagatgttatgaagggctctaatccaaaagtaccacagcaaaacaacttcagtgactgtggtgtatatgtattgcagtatgtagagagcttttttgagaatccaattctcagttttgaactacctatgaatttggcaaactggtttcctccaccaagaatgagaacaaaaagagaagaaatccgaaacataattctgaagctacaggaagatcagagcaaagagaaaagaaagcataaggacacttactcaacagaagcacctttaggcgaaggaacagaacaatatgtcaatagtatctcagattgaccatttctgttacttgtcatttctactttcagaaactaaatgactttcaaatttgggtatagacaataaagaactgaagtgctcactactcagtgatttggaaattttgatgcttgtataaatgtcagataattaatttccaaaggcgtatgtattaagtaaaagtctgtaaatatgttaatgaggccaatttttccagcatttataattatttttttcacttgttaggaagcttttgttatgtattttctgttaatagtacctaaaattgcaacttctaaaccc

SEQ ID NO: 16221 - protein, 368 aa, Homo sapiens
MKDQFGNSIINTPLKRRKVFSQEPPDALALSCQSSFDSVILNCRSIRVGTLFRLLIEPVIFCLDFIKIQLDEPDHDPVEIILNTSDLTKCEWCNVRKLPVVFLQAIPAVYQKLSIQLQMNKEDKVWNDCKGVNKLTNLEEQYIILIFQNGLDPPANMVFESIINEIGIKNNISNFFAKIPFEEANGRLVACTRTYEESIKGSCGQKENKIKTVSFESKIQLRSKQEFQFFDEEEETGENHTIFIGPVEKLIVYPPPPAKGGISVTNEDLHCLNEGEFLNDVIIDFYLKYLVLEKLKKEDADRIHIFSSFFYKRLNQRERRNHETTNLSIQQKRHGRVKTWTRHVDIFEKDFIFVPLNEAWLKQNQTKL

SEQ ID NO: 16222 - DNA, 3409 bp, Homo sapiens
  CDS (898)..(1419)
ggaaggctgaggcaggagaatcgcttgaacccgggaggcggaggttgcagtgagccaagttcgcaccactgcactccagcctgggcaacaagagcgagacttcatctcaaaagaaaaaaaaaaaagaaaaagctgccccatcgcatcgcatagaggctgctatgggattagaacgtagcttgagatctgcaggtcaacaggtctgtttggcatctcaggttttcctcacataagtgaaagatgcctggtatggcctagtgttgttctgcctccctcctctgcccgccaggtatacatggactggtacgagaagttccaggacaggctcaacaagaaggtggtactcctgacaggcgagaccagcacagacctgaagctgctgggcaaagggaacattatcatcagcacccctgagaagtgggacatactttcccggcgatggaagcagcgcaagaacgtgcagaacatcaacctcttcgtggtggatgaggtccaccttatcgggggcgagaatggggtatggcgtgaccttgcagcacagatgagggactgggactgaccaagtggccttggcattggacctaatgtttgggtctgaggacggaggctcggggcttctccccagaggattctacctgctgccctattccaaagggacaatgttaacttttttggtagtactttaggaaaacagtattgtttagtggaggttggctgccgtggaggaggtagaaccaaacacatgagagctcctagttagaaggaagaatgaggtcattttgaggctgttgggctgttcacaaaggggacctccaggcagaggatgggagccttggcctgcagtgaccctccctccctccctctttccagcctgtcttagaagtgatctgctcccgaatgcgctacatctcctcccagattgagcggcccattcgcattgtggcactcagctcttcgctctccaatgccaaggatgtggcccactggctgggctgcagtgccacctccaccttcaacttccatcccaatgtgcgtcccgtccccttggagctgcacatccagggcttcaacatcagccatacacaaacccgcctgctctccatggccaagcctgtgtaccatgctatcaccaagcactcgcccaagaagcctgtcattgtctttgtgccgtctcgcaagcagacccgcctcactgccattgacatcctcaccacctgtgcagcagacatccaacggcagaggttcttgcactgcaccgagaaggatctgattccgtacctggagaagctaagtgacagcacgctcaaggaaacgctgctaaatggggtgggctacctgcatgaggggctcagccccatggagcgacgcctggtggagcagctcttcagctcaggtaagtcaggccacggaaggggagcatagcaagggtatcaccaagtggtggtgttaaacttgaggggtgcgggtggcagtgttttctctacagcataccagagattttcaaaatgctgtttaggactcttggctgttaactcatttgatcctcccaagaacctcgtgaggcaggtgagacaaacactatccctacttgccaggtgagaaaacaggcagacacatcaggttgtgctatttcagaacctggttttctagagtccaggacctttggccaccagaccgctgattctccgtggataccagactccccaagtgtattagtccgttcttgtattgctataaagaaatacctgatactgggtcatttataaagaaaggaggtttaattgactcagttctgcaggctgtacatgaaacatggtgttatctgcttctgggaaggcctcagggaaggcaaaggggaagcaggcatcttatatggcaggagtcaggaccgagagagtgagtggggaggtgctacacacttttgaacaaccagatctcgtgagaactcattcactagacagtaccaagggtgggtggtgctaaaccattcatgagaactctgcctccattagccagtcatctcccaccaggcccttcctccaacactggagactacaggtcgacgagatttggtggagacacagatccaaaccgtctcaccaagatagttagactttagagattagcacagaggagagctctgattctcccttgagctcactcttgctggccactgtctcttgttgccctgtggcattttgtgcaaagatttacgttttaatactgtttattggagcctcattggagattcttctgccagaatcacttcctgtcactctttggcccttgaatctgcctgtttggggcatgcttagagtgatctctgttttgctggcatggctgagccagcccgtggctgcatgagtgttagcactttctggtcagaggagcagtccatcagctgtagttttgccttggtgttcctgggctttgggttctgttctatgatgacttgttttctcctggatagtcccagagcaaggcaccagcagcgtggagctacctcatagcaatgtgttagctctcattcatgttagaccttgttcctagccagccttgctgtgagttctgaaacatagcacagggtaagccacggcctgcccatgaggcagtgagcctacttcacccggagacccctgccctcagccttcctctcccctctactgctcaggggctatccaggtggtggtggcttctcggagtctctgctggggcatgaacgtggctgcccacctggtaatcatcatggatacccagtactacaatggcaagatccacgcgtgagtacaactggtgctctgtgttagcacagacctccttcctaaaatgaatgtgaatctgcagatacacagaaagtaagctaggatgaagaaaaggtgttagggaagttaacagctgagatgccaccagagccaagtgtttgagagttttgtgtctcaatacctaggctcacatttgctttttagtcattgtgcttccttattcagcagctgggagaggtaggaaattagagccaggaggaatgtttgacgttacgtcattaatctcagacatcttgtagattaggaaaagtgacttggtcgaggtcatacacctatatagtgacaagtaagaagctagaggagtgccgagcgcagtggctcatgcctgtaatcccagcactttgggaggctgaggcgggcggatcacttgaggtcaggagttcaagaccagtgtggctaacatagtgaaacccccgtctctactaaaaataacaaaaattagctgagtgtggtggcaggcgcctgtaatcccagctacttgggaagctgaggcaggagaatcagttaaacctgggaggcagaggctacagtgagctgagatcccaccattgcactctagcctgggcaacagagtgagactccaactc

SEQ ID NO: 16223 - protein, 174 aa, Homo sapiens
MRYISSQIERPIRIVALSSSLSNAKDVAHWLGCSATSTFNFHPNVRPVPLELHIQGFNISHTQTRLLSMAKPVYHAITKHSPKKPVIVFVPSRKQTRLTAIDILTTCAADIQRQRFLHCTEKDLIPYLEKLSDSTLKETLLNGVGYLHEGLSPMERRLVEQLFSSGKSGHGRGA

SEQ ID NO: 16224 - DNA, 1880 bp, Homo sapiens
acacttttatattaacaagcattttgaaaaggctgagggcagatatgttagaagccatcttcttattcctaaattcatgcttaaatgtaattgtccttcagttttcccactcctgagtttggagtctgctggatgatgggtggtttggggaaggaaaagggttctgtacattggcctggcctgcaatacggctcgctatatttatatttcctacctggagaatgcctggactgttctccccatggaagttcttcaaggagtgaagagcagcaggctcagctggccgcgggaggacactgagggcatcctgctcatctcacacaggagctacagtacatattggcaggaaaaggtaaactttcgtaatctcattggaattacaacagggaaatggagttcaatgaggactttcagttctttgcttggttaggttaaggatgatagaatttctctgccagtgcagtaagagttgaaaccggcagttacactaagtaagtggagggaatgaaagtgtttcgaggtgaatgtggatataatttccctcttctgattatttattcttatttggttcctaacacaaactgggaagagatagaattcatctatactttcttttttcttggagagaaccgtttaaaaaattacaagatatatttaaaaagtaaccagataaaagtagcacatgtgcttttgttaaaaataaagttaaaagttaaagttaaaaaatgaagttaaaagtttcatcagaaactttacatatctttagcaaatatatttttatatgtgtatggcatataatggaaataattctttgagcaacagaagctattattaactactgcaagctaagccgagcttaaaaatgccttttgttttaaatgggctttgagaaaaaaaaaaaaaaaaaaacagaaacaagcgattatttcaaatcaaccaaccaactcagtatcctgtgttttgatagacaagagtttactaaatatattgatactgtaaatagcctctctcgctatttactatcttatagtaattcaggctctaattagccgagggaatgaaacacacaaaaatcactgaattcctaagagttccttaaataagcagtactagttacaaatcacagtataagatttaagtgcctgggggaaggatacaatttttagaaattacatattgggtcagttttgttttgtttttggtgaggaaaaggtggtaaataggaaaccatgaatgggaaggatggcaataagtagcaactatactttccaatgactaaagaaagaaaatctcagtatattcgttctcatgaagacacagtcagacactggacaatgtaatgtatgcaactgcaaacgttacaactgcagccagaacaatggctgggtggatcgcacgtaaagcttgccactaaaaatcaaagcagaggttaacaggaaacctggggggagtgtggaaaggggaaaactgtttagctgaataaaggtgaattatataatttataatagctgtggatgagcacaggagagagaggaaagaaaagaacagtcgaaatgagcaactcaccttaccctctgaccctgattagacaggatcaattgtaaagtgagggcttctccatgacaccatagttctgcccaatactgcatttgggataagaaattctacacttggatgtctcgcttcacaataaaacacagcttaaaaataaaataactgaaagaaatagaattcagcaaatagttattttttgcacttgaactgaaacgtactgtactgtaaattatgactcattttaagtgacctttaaaatcagatgtatttattatgcttgtgtaattatagaaataaagaaatgggtgacaggcttaacctcacct

SEQ ID NO: 16225 - DNA, 1454 bp, Homo sapiens
cggctgaagacggcctatgtggcctttttttttttttttttatattttgagaaacctccatactgttttggcatagatagtggctgcacaattttgcattcccacccagcatacaagggttccaattcctccatatcctcaccaacactcttttgtttttttgatagtagtcatcataacaggtgaggtgatattaaggagtacttctgcactgaggcacttgtctcaactatatttttgttgtactttcaggagactaatagatctgtggaaatttatcaaatctttgctcatttttttaacttctgagagctcttctttaatctgagtgttcctttttatgaaattgttgatgaaaaaagccgaacaagtgtaaaatattttaagagatttattctgagccaaatatgagtgaccacagcccatgacacagccctcaggaggtcctcagaacatgtgcccaaggtggctaaggtacagcttagttttatatattttagggaggcataagatatcaaatacatttaagaaacacattggtctggtttagaaaggtgggacaactcaaagcaggggcttccagactataggtaaatttaaacattttctggttgacaataggatgagtttatctgaagacctgggatcaacagaaaagaaatgttcaggttaagataaaggattgtggagaccaagtttcactgtgcagaggaagctctcagagagcagacttcagagagcaggtggtaaaatatttcttatcagacttaaaagggtacctgactgttagttgattatctcttggatctggaaaggaaggaaggaaaacaaaggggaaaggggactcattatagaatgtggatttttcccacaagagactttgcagggcaatttcaaggtatggcaaggaaatatatttttgggtaaaacatttttattttcttccttgttatgccagagtcagattggaaagtcaagatatacagggttaaataaaacccacctgatgagaatttatgatttgtagggcatgactctctaggccccttagacaggaatttgggcaagatttaacaaatcagagctgagtcctcaaaatcctattattgtttcatgaatatggtttaagaatattaattacggagggcacggtggctcatgcctgtaatcccagcactttgagaggctgaggcacaagaatcgcttgaacctgggaggcagaggttacagtgagccaagatcatgctactgcactccagcctgggtgacagactgagactctgtctcaaaaaagaaaatgaaagaaaaggacaaagtaacaggaagaaaagaaaaccgtcatgtcaaagagctaatgcccttcatatatgaaaagttcttccaaattcgtaagaaaaatgttcaaaaatgatcacttcaatagaaaaataggcaaaggacatgagccaatttac

SEQ ID NO: 16226 - DNA, 2498 bp, Homo sapiens
  CDS (448)..(1005)
accaccccagtgaaacccacagaaccatgtacaccctctaagtcccgaagtgccagctcagaggaggcctcagagtcacctacagcccggcagatccccccagaggcacgtcggctcatagtgaacaaaaatgctggtgagaccctcctgcagagggcggcgcgtcttggctataaggatgttgttctctactgcctccagaaagacagtgaagatgtgaatcaccgtgacaatgctggctacacagccctgcatgaggcttgttcccggggctggaccgacatcctgaacatcctgctggagcacggggccaacgtgaactgcagtgcgcaggacggcacgaggccagttcatgatgcggtggtcaatgacaacctggagaccatctggctcctgctgtcctatggggccgatcccacactggctacctactcgggtcagacagccatgaagctggccagcagcgacaccatgaagcgctttctcagtgatcacctctcggatcttcagggccgggcagagggtgatcccggtgtatcctgggatttttacagcagttctgtgttggaggaaaaagacgggtttgcctgtgacctcctacataatcctcctgggagctcagatcaagaaggagacgatccgatggaggaggatgatttcatgtttgaactctcagacaagcctcttctcccttgctacaacctccaagtgtcagtgtcccgcgggccctgcaactggttcctcttttccgatgtcttgaagaggctgaagctttcctcgaggatctttcaggcccggttcccgcactttgaaatcaccaccatgcccaaggccgagttctacaggcaggtggcctccagtcagctgctgacccctgccgagaggcctggaggcttggacgacagatcccccccaggctcctctgagactgtggagctggtgcggtacgagccagacctacttcggctcctagggtccgaggtggaattccagtcttgcaacagttgaccgggaaaacagcccctcctcttctttctccttccgagttcgcccttcccccacctccttgtctttccccgaccgagcaccagactgcagaatgaggcaataatacggaccaacaagaagccgccttatcaatgccagcattagcgactggactgtttttgtttttttggttacaattagttctcatctccctgtcgtcgtcattgttatcgtggttgctgatgggggtggaaagttgaactccatgtctgaggacaagaggtcccgggggtggtgggaggtggcgccggggtcccttggactggcctccttgttcatgaccaagaccaaacctgggccctggatggccttggcctgtcccgaggagaaatgagaaaatcccagatctctgagcgccccccaactccattcccctgtgttcttctgtcttctgtagtatttattttattagtatttaatttgtattgtttcattggtttctgataagtctgtatcactgtgacgatttgagacaacttgttgtattgagggactttctgtacctccttttctttttctttgttgatgagctctgacaaagctattccctggtgtttttttcccccactggggagggggtgaggtggaatggggtgggggaacatggacttgtgactaacgaagctggttgctgctggcccagggctgggggcttgggggtaaatcctgaggctttggtgctcccccacccacccattcccgccctttgcagcagccccgctatcttgagattagtgttgacagggaggggaggattgtgaggtgaggggttaataagttactctaataaaggagcgtggagaagggatctgaggggtgagggtggcccccctcctcacgccttcttcactgcccccctcagagtgcacaatacgagtttgttcctgcctccactctcccaccccgttctggcctccctgtctcaagatactgagcctctcacctcccagccctcagccacccccatccctgccccttctgagactcacagcacccctttccttcctctcctcccacctcctccctcagcccctcattctccttgggaatctgcagagggctctgggactcactgccggatgtgaaatccaggcgtcagctgtttgctaggcaagggcaggaaagtggtctccagcccttgctccactcatgcctgggggcctggggctgagtggtatccctacctggcctccccctggcctctgggcctccagcgctgggtttgtcgagtgagagagagagaggagcttgggttgcttccctgtccccgccccctctgtggcattgtccctcccactcttatttttctaccaattgctatttttccgaacaatccttgtagagtatgtaccatccaaaggcaggagggcctcgccgtggccggctctggttggagatggtacagttttattgtacaggtgctaaaacaacaacaacaaaaaagaaaatgg

SEQ ID NO: 16227 - protein, 186 aa, Homo sapiens
MKLASSDTMKRFLSDHLSDLQGRAEGDPGVSWDFYSSSVLEEKDGFACDLLHNPPGSSDQEGDDPMEEDDFMFELSDKPLLPCYNLQVSVSRGPCNWFLFSDVLKRLKLSSRIFQARFPHFEITTMPKAEFYRQVASSQLLTPAERPGGLDDRSPPGSSETVELVRYEPDLLRLLGSEVEFQSCNS

SEQ ID NO: 16228 - DNA, 1832 bp, Homo sapiens
gaatcttagctgattgcattatgaactgtcaaactgtgaagatgacccatatgtaaacagttataacagctacagattattgctagtagcattctatacaattccatattaatgttcttaggagctaatatttgataaaggggaaagctagttaaaaactaattaatttgtcaaatgtagcattcttattatgagtgtaatatctcatggagatttaaatatgaacgaaaggacttatccttctgctttttaaaagccccagcattactagatagtgtttttcttgaaggccaaagctgtaaaatgacaaagttggtgattttcagcagcactcacctgagctgtgagcgcctgcacctgttcggtagaacccactagaatcacttctctgtaggataagtgatgcctttgaatccagcagcataaaaatctgttctttttagtcatcaagtttttgtttccaggatatttctagcattgcaaaaaaaaatttcttcaccaaacactaattcctaaacacccatccaaaccacaaaaattctcttgttagtaggcgagagtgctaggacttcctgtgttcacctcccatgcacccagcattgtcttttatgcatgagatattccattagattttcctagagtggccaggacacccttcatagtaagttatatctcttaactggattctatagttttatctcgagcaacttggaaaagctaagacatcctccacccacactggtatctacgcgcctggaagctgcaccttctctcattgctgtgctctgctttaaggaaaacctgatatgacagaatcaagactattaaaagataaatgaggggaaatcttcatttaagaaagttgccttgctccccaagagtgcctttaattgctattcccctaggcatctgggtgcatatcattaatgaaatcattaacctttgtctctggtccttcctttctaaaaacagcagattatagaaggtggtctggcaaagggattttcaaagggcaaaagtctcatcatcatctttccactcaaaatcctattattctacatttcactttgcaggggtcctagggacaggattgcagggacaggggacatgggaggaagacagaaaaattcaaaaccagcagatgccactacctggcaatgaattgaaaattaggggaaagcatctttggcgtgaccttttattaagacaacagaaatttagaacattttacatgcttctttgttaaacggtgaagcaagggaatgaaagtatttatttttagagctcatagttaactccatcaagacatagctacccacccctccagttatgaacttgtattacagctccacttggtgacttcctttctgtgtatcaggagcagagcagaggacaacttgtagaagacatgaccattaagagacatcaacttcgcaacaaatataagacaaggatacaaggattcctatgtgatgcagctaggtttttatatccttctaacaaatggtgagcaggagacttttttggaaataattagttgtgaaattccatttttctgacagccccttaaatttgaagttatttcatttgtagttaaggttatcacatccctgccaattttactagattttttcagagacaagcattcagcatggcattagtaatgatggtttaaactaggtgcagaactgtcccatgaagagaagaatgatatcagtatttaaataataaaagaagagacaatgtatggtttatagtgattcattttaagattgctgtattttgattttgtggtttaaaataaatgcattaaggatcttttaagttactac

SEQ ID NO: 16229 - DNA, 1542 bp, Homo sapiens
tctattattgatttcttatttaattttggtatagccagagaacaccatttatgtggatgatctcggctcaccacaacctctgcctcctgggttcaagcagttctcctgcctcagcctcccgagtagctgggattacaggcatgtgccaccatgcacggctagttttgtatttttagtggagatggggtttcaccatgttggtcaggctggtcttgaactcccgacctgaggtgatccactgcctcagcctcctaaagtgctgggattacaagtgtgagccaccacgcccggccttgtgtggttttaatttattaaaaattgttaaagtttactttatgacccagaatatgatctatctgggtatatgttctgtgggcacttggaaagaatatgtattctgttgctcttgagtagagtgttttataaatgtccgttatattaaaccagttgataatgttatccaggttttatatatcctttttgatttccatctatttgtttatcagttattgagaacagagttattgaagtctcccagttatgactgtggatttttccatgtctcttttagttctatcaatttttgcttcatttattttggatctttgttagttgcatactatatttcagtgtttatcttcttggtgaattgacccttttatcattatgtaacttccctatatttatatctttatatttaaaatagatttccttaaaccataagacatttgagaagtaaaaataaaataaaatagctttcttgctgatagcatatagtcgggtcttgtttttttctttttccaatccgataatctttgtcttttttttttttttggaaatggaatcttgctctaccacctggactggaatgcaatgacgtgatctcagctcactgcagcctccacctcccaggttcaagcaattctcctgcctcagcctcccgagtagctgggattataggcacccgccacgatgcccagctaatttttgtattgttagtagagacggggtttcaccatgttggttaggctgggggagttttctattatttatttcttgtttaattttggtatagccagagaacatgctttatgtggttttattaaaaattgttagtttattttatgacccagaatatgatctatctgggtatatgttctgtgggcacttggaaagaatatgtattctgttgttcttgggtagagtgttttttgtaaatgtccattatattaaaccagttgataacgttatccaggtttgatatatcctttttgatttccatctatttgtttatcagtcattgagaatggacttattgagtctcccagttatgactgtggatttttccatatctcttttagttctatcaatttttgcttcatttattttggatctttgttagttgcatattatatttcagtgtttatcttcttggtgaattgacccttttatcattatgtaatttccctatatttatatctttatatttaaaataggtttccttaacatttgagaagtaaaaataaaataaaatgtaatagc

SEQ ID NO: 16230 - DNA, 1533 bp, Homo sapiens
  CDS (866)..(1339)
tacaactgctatataaaatatttacctgaaacaaaagtttcagaaaacgtctttaataggtgtagtgtactctttttattctattaattaaaaagttggttacaattgctaaaggatttcatgacttagtttgaataaaactaagtaggccaggcgcagtggctcacgcctgttatcccagcactttgggaggccgaggcaggcagatcacaaggtcaagagatcgagaccatcctggccaacatggggaaactccgtctctactaaaaatacaaaagttagccgagcgtgatggtatgcacctgtaatcccagctactcgggaggctgaggcaggagaatcgcttgaacctgggcggcagaggttgcagtgagtcaagatcacgccactgcactacagcctggacgacagagcaagactctgtctcaaaaaaaaaaaaaaataaagtaattcagccctatctctcccagcagaggtagaaacagagggcctgaggcttgcatggcttaacccgaaaaaatcagcgcctggaatagaagctagattttttcctaatctgctctctaccaccttgcatctgttactgtatgaattcttctggaagtgcttctgttaagacagacatgtagcaagtaggtgttcagtacttattgggtatcataaatatgtttacattgagaaaaaatggctatgaggggagagttgagatgacagaaatgtacatagtcaaaatcagcctctggctgctggtttgaaatatgagtgaggagagttggggcatctgggttagcagtgtttatagtacccagacatatagcgtaattaaagcttttagacttggggagaagggagtgcagtagttagaatggcgatcattaaaaagtcaggaaacaacaggtgctggagaggatgtggagaaataggaacacttatacactgttggtgggaccgtaaactagttcaaccattgtggaagacagtgtggcaattcctgaaggatctagaactagaaataccatttgacccactcatcccattactgggtatatacccaaaggattataaatcatgctgctataaagacacatgcacacatagacttattgcagcactattcacaatagcaaagacttggaaccaacccaaatgtccatcaatgatagattggattaagaaaatgtggcacatatacaccatggactactatgcagccataacaaaggatgagttcatgtcctttgtagggacatggatgaagctggaaaccatcattctcagcaaactatcacaagaacaaaaaaccaaacactgcatgttctcactcataggaattgaacaatgagaacacttgggcacaggagggggaatatcacacaccggggcctgttgtgggggcgggggagggaaagcattaggagatatacctaatgtaaatgacgagttaatgggtgcagcatgccaatatggcacatgtatacatatgtaacaaacctgcacgttgtgcacacgtaccctagaacttaaagtataatt

SEQ ID NO: 16231 - protein, 158 aa, Homo sapiens [sequence omitted]

SEQ ID NO: 16232 - DNA, 1179 bp, Homo sapiens
ccttatttttttaatgcagtaatagatatttgaataatagctttactgagatataattcacataccatgcaattcacccatttcagtggtttgtaggatactcagacttgtacgaccatcactacaccagttttagaggctttaatcaccccaaaataaaccctgaaccccttagtcattgtctctaaattcccccacccctcaccccctggaaatcactaatgtccattgtgtctctatggatttgcctatcctgaatatttcatatacggtaaacggaatcaggtaatatgtgatcttttatcactggcatctttcactgagaataatgttttcaaggctcacacacgatgttgaatgcatcagaactttgtttctttttatgggtgaataatattccattgtatgcatagaccacactctgtttctccattcattaatggatgcatgctaggattaccttcacttgctagctcttaggaatagtgctgctgtgaacatttgtgcatgggtttttgtgtggacttacgtttcatttatcttgggcacatacctagagcggaattgctgagtaactcagtgtttaacattttgaggaacagccagactgttttccaaagcagctgtatcatttcacattcccaccagcagcatatgagggttctgatttctccacgttagttagtgtgaagtgatacctcactgtggctttggcttccatttttctgatggctaatgaggttgagcatctttttatgtgcttatttgtaaatagaaatagtttttgtaaatataagtatttgtatttgtaaatatttataatatttgtaaatataaatatttttaagttaaaaatccttgaatttacaataaggtaaatatcaataaaggtaacctttggccgggcacagtggctcacacctgtaatcccagcactttgggaggccgaggtgggcggatcacctgaggtcaggaattcgagaccagcctgaccaacatggcgaaaccccatctctactaaaaatacaaaaattaggcaggcatggtggtgggtgcctgtaatcccagctactcaggaggctgaggttggagaatggcatgaacccgggaggcagaggctgcagtgacctacaattgtgccactgcactccagcctgagtgacagagcaagactgtctc

SEQ ID NO: 16233 - DNA, 1923 bp, Homo sapiens
  CDS (1061)..(1660)
tcaccaatttggctggtctcgactcctggctggtctcgactcctgacctcaggtgatccacctacctcggcctctcaaagtgttggagttacaagcatgggccaccgcacccggcctatttataattttttgaggaaactttgtactttttcccatagctgtaccattttgcatttccacctacagtgttcaagagttccagtttctccacatccttaccaatacttgtctttttttttttttaatggccatcctggcagatgtaaggtgatatttcatcacagttttgatttgcatttccctgataactaatgacattggacttttttttatatatctgctggccacctgtatgtcttctttggagaaacatctattcaagtttctagttcatttttaaattggattatttgctttttgctattgagttgtttgagttccttatctattttgaagcttaaccctatatcaaatgggattcttatatttttgtttcatattttgtagtatatcaggtccatgaaattagctatcttaagtaagttgcttttgtgttgtttcttatgacaattctgattagaatattaatacaaacgtgaaatgcagcttttaccaacaaatgggctagtttttattgaatcaataaaacccatattttgagagttttactcaaaagaacctaaaattcagttgaatataaagaaatggggttgtttgtttttttcttgtaaatttgtttgagttcattgtagattctggatattagccctttgtcagatgagtaggttgcggaaattttctcccattttgtaggttgcctgttcactctgatggtagtttcttttgctgtgcagaagctctttagtttaattagatcccatttgtcaattttggcttttgtttccattgcttttggtgttttagacatgaagtccttgcccatgcctatgtcctgaatggtaatgcctaggttttcttctagggtttttatggttttaggtctaacgtttaagtctttaatccattttgaattaatttttgtataaggtgggcgaaggacatgaacagacacttctcaaaagaagacatttatgcagccaaaaaatacatgaaaaaatgcttaccatcactggccatcagagaaatgcaaatcaaaaccacaatgagataccatcccacaccagttagaatggcaatcattaaaaagtcaggaaacaacaggtgctggagaggatgtggagaactaggaacacttttacactgttggtgggactgtaaactagttcaaccattgtggaagtcagtgtggcgattcctcagggatctagaactagaaataccatttgacccagccatcccattactgggtatatacccaaaggactataaatcatgctgctataaagacacatgcacatgtatgtttattgtggcactattcacaatagcaaagacttggaaccaacccacatgtccaacaatgatagactggattaagaaaatgtggcacatatacaccatggaatactatgcagccataacaaaggatgagttcatgtcctttgtagggacatggatgaaattggaaatcatcattctcagtaaactatcgcaaggacaaaaaaccaaacaccgcatgttctcactcgtaagtgggaattgaacaatgagaacacatggacacaggaaggggaacatcacactctggggactgttgtgggggggggagatgggggagggatagcattaggagatatacctaatgctaaatgacgagttaatgggtgcagcacaccagcatggcacaggtatacatatgtcactaacctgcacattctgcacatgtaccctaaaacttaaagtataataataataaaataaataattttaaaaaaaaggccaacttgtgaagctaaaaccagc

SEQ ID NO: 16234 - protein, 200 aa, Homo sapiens
MNRHFSKEDIYAAKKYMKKCLPSLAIREMQIKTTMRYHPTPVRMAIIKKSGNNRCWRGCGELGTLLHCWWDCKLVQPLWKSVWRFLRDLELEIPFDPAIPLLGIYPKDYKSCCYKDTCTCMFIVALFTIAKTWNQPTCPTMIDWIKKMWHIYTMEYYAAITKDEFMSFVGTWMKLEIIILSKLSQGQKTKHRMFSLVSGN

SEQ ID NO: 16235 - DNA, 1672 bp, Homo sapiens
ataacataatcaaagaggaaaaaccagcattggtgaattcatcccttcctttcaacttggcctctctcacccactttacttttagtgcagagttcagtgatggctagcagctgtcccctgatatttgttattccaagtatccattcataggtctggggagaggttgtggcaagctttccctaaataaatcacacccttatcttctaagcttgagcagtggagggagacttttcattcgaggtgggtggctgaacatcatcattcctgttctggacttcttgtaatcatgttggattcagagggcaccactctctcttgtacagatctgacctaacatagacatagactatagcagagatgaatccaggctataacatttaacaagaccttattaaaagcttcaagatgttagcctttatctgttccatatctagcttacttggttgtttttgggggatcacatgtctgtcctccaaactggaaacgtctaactctccaggagatgcagtagcattatttgttggacagtggcacctactggtagtttgtaatgtttatagcctagtgtgaaaggcattgtaaatgtatacctagcaaaaaggggagtagagcaaaatttccagagttttacaaatgaaatgaaggatgatatgggggagagtcctttggggccaaggagagagagcacagactagaaagtaatacaagcagaaagaaggatgtcagcccatgtctgtgtggtagaggtcatctttccatctcactgggattgtccctgaaagtgtctcactgcttaggtctccttgcctgtctaaggcttggagaccttccagtatctcatgccttattctagatctgcttttttccccgaggtgaaaaaacctgttcaaatggtcactcacaacttttgtggccttactttttgtctccgaaaggacaaacatatcagaactaacatccacccagaagaagggctgatcagttcctttcaacacagcatggatgaaaacccaggttagcgttagtgcttcttgaattggaagtattctaacctctatgtacctaccaatgtaagaactgagggcccttttaagggaacttacattcctaaagttcaagtcaagttgtcatgaagagtacttaatgaggcatacttttaatctttgaatcgtagtgttgtagggctaaaagaaacctcaggccaggctgcatggtggctcacgcctgtaatcccagtactttgggagaccaaggcaggctgatcacctaaggccagtaatttgagaccagcccaaccaacctggtgaaaccctgtctccactaaaaatacaaaattagcctggtgtggtgatgcatgcgtgtaatcctaactactcgggaggctaaggcagaagaattgtttgaacccgggaggcggaggtttcagtgagccgagatcatgccattgcactccagcctgggtgacaggagccaaactccgtctcaaaaaaaaaaaaaaaaaaaaaaaaaaattagccaggcgtggtggtagccgcctgttgtcccagctgctggggaggctgaggcaggataattgcttgaacctgggaggcagaggttgcagtgagccgcgattgtgccactgcactccagcttgggtgacagagccagactgtctcaaaagaaaaaaagc

SEQ ID NO: 16236 - DNA, 2460 bp, Homo sapiens
  CDS (1668)..(2174)
gagaattaagtaaaccctatttaaaccctattcaagatggctcccctggtgtcaccaccggacatggtgcttggggctttgtgaatgatcagtggaggacttgcccacgtgaggcaaaatacggaactaattgtcacgggggtctcacatatcagggcggttgcaaattgtggcaaggcaggtgcgaggggacaccttggagtcccttgggcttcccagggcctctgggggcaccgcagcctctacacagacttgcatgtacctgctgagagtccctcccactcccactcactgaccctgtcccacatcttaaagctgtgcctcctgtttcctggccatgctgacaggtgggacaccttctgcttgctgggtggtgactggatcggcacacatgtgtgacccagcggggggtgtggggtgcaggtgccagagccccaggggctgcagagcctgctccctccctgccctggtttcaacttcctcagtctcagcaccacctaacgcaccaccttgccctgcatttccccggctttaacatgtgaagccactctgcagggaaacaacgggtcggagtggggtggagtggggtggggggtgggggtcaagcatgtgcctcttccccacccagcggcagccggaagcagctgggcccacacacctctccatggactccagcgtgccatccaggctgcccaggtgctccggaataggcagcaaggttttgcctttgatcttgccactcatcacaaacatttcattcttcagcctgtggacctgcttcacgatgtcttccgagaccacctggggccatccagccatgttctcactttggtttaacagagaagagaggacctaaaaggaaacacttctgtggttccgccccctgtgccttcaccagctcggcaaccgcacagagccaggtccccggggggttccaaagacccggtgtctggagccctgggaaaactgggtcccgcacagagccaggtccccagggggattccaaagacctggtgtctggagccctgggaaaactggatccttcttccagaaggaggtgtggccggtcatggagtttataccagctgccctgtcctggtggtaccaaagccatccccaagctcttgcacccatagcacacactccttgctaaaagcctaggaggactgtgatgggtcaaactgtgtcccccaaatccatctgctgaagccctaactcccagcaccttagaatgtgactatttggagatagggtctttaaagaggtgagtaagggctgggggcggtagctcatacctgtaaatcctaggacttagggaggccgaggcaggtacatcacctgaggtcaagagtttgagaccagcctggccaacatggtgaaacctcgtctctactgaaaatataaaaattagccaggcatggtggcacctgcctataatcccagctatttgggaggctgaggcaagagaatcatttgaacctgggaggtggaggttgcagtgagctgagatcacaccattgccctccagactggacaacagagcaaaaatactgtcaaaaaaaaaaaaaaagaggtgagtaattaaaatcagattactagggtgggccctagtctgacaggtgtccttacgaggaggggagattagacatgcacagaaggccgaccacatgaggacccagggagaagacgtccatctgcaagtcaaggagagaggccttggggaaaaccaaccccgccgacaccttcaacttcaacctctagcctccaggactgtgagaaaatgtctggtgtacaagcgaagcacacaggcccctgtgctgcagatgagaagagtgatgaccaggaaggataaggcacccccattctggaggtccgaatccccaaagtgtgtcccccccacctacacagcacctgccaagggggacagcagagggacacataaaatgacactccattttttcccctttcttaagtcaaagtctcaaaattggagaaacctatctgccagtactcagtccccaccttcccaggccatgggcagcaaccgtacccggcacagcatggcagtctcaatgctgtccagagagaacaaggggatgctcggggcttctcagacttcaagggcacgagcaccacctggaggtcttgttagacagcaggtctgtggccgggcatgatggctcacgcctataatcccaacagtttgggaggttgaggcaggaggatcgcttgagcccaggagtcttgagaccagcctgggcaacaggctattttttggtgagacctcatctcttaccaaaaaatacgaaaattagccaggtgtggtggtgcatgcctgtggtcccagctactcaggaggctgaggctggaggattggttgagcttaggaggttgaggctgcagtgagctgtgctcccaccactgcactccagcctgggaagcagagtgagaccctgtctc

SEQ ID NO: 16237 - protein, 169 aa, Homo sapiens
MRTQGEDVHLQVKERGLGENQPRRHLQLQPLASRTVRKCLVYKRSTQAPVLQMRRVMTRKDKAPPFWRSESPKCVPPTYTAPAKGDSRGTHKMTLHFFPFLKSKSQNWRNLSASTQSPPSQAMGSNRTRHSMAVSMLSRENKGMLGASQTSRARAPPGGLVRQQVCGRA

SEQ ID NO: 16238 - DNA, 2523 bp, Homo sapiens
  CDS (166)..(2244)
tattgtacaaattcgccaatattcaacagcgttcttaaactgaacaagcatatcaaagagaatcataaaaacattcccttggccctgaattatatccacaatgggcagaaatccagggccttaagccccctatctcctgtggccatagagcagacatctcttaagatgatgcaggcagtaggaggtgcgcctgcacgtcccactggagaatatatctgtaatcaatgtggtgctaagtacacatccctagacagctttcagactcacctaaaaactcatctcgacactgtgcttccaaaattgacctgtcctcagtgcaacaaggaattccccaaccaagaatccttgctgaagcatgttaccattcactttatgatcacttcaacgtattacatctgtgagagttgtgacaagcaattcacatcagtggatgaccttcagaaacacctgctggacatgcacacctttgtcttctttcgctgcaccctctgccaggaagtttttgactcaaaagtctccattcagctccacttggctgtgaagcacagtaacgaaaagaaagtctataggtgcacatcttgcaactgggacttccgcaacgaaactgacttgcagctccatgtgaaacacaaccacctggaaaaccaagggaaagtgcataagtgcattttctgcggtgagtcctttggcaccgaggtggagctgcaatgccacatcaccactcacagtaagaagtacaactgcaagttctgtagcaaagccttccatgcgatcattttgttagaaaaacacttgcgagaaaaacactgtgtattcgaaaccaagacacccaactgtggaacaaatggagcttccgagcaagtgcagaaagaggaagtggagctgcagactttgctgaccaacagccaggagtcccacaacagtcacgatgggagcgaagaagacgttgacacctctgagcctatgtacggctgcgacatttgtggggcagcctacactatggaaactttgctgcagaatcaccagctccgagaccacaacatcagacctggagaaagtgccatcgtgaaaaagaaagctgagctcattaaagggaattacaagtgcaacgtgtgctctcgaaccttcttctccgaaaatggcctccgggaacatatgcagacccacctaggccctgtcaaacactacatgtgccctatttgcggagagcggtttccctcccttttaactcttactgaacacaaagtcacgcatagtaagagtcttgatactggaaactgccggatttgcaagatgcctctccagagtgaagaggagtttttagagcattgccaaatgcaccctgacttgaggaattccctgacaggctttcgctgcgtggtgtgcatgcagacagtgacctccaccttggaactcaaaatccatgggacgttccacatgcaaaagacagggaatgggtctgcagttcagaccacagggcggggccagcacgtccaaaaactgtataagtgcgcatcttgcctcaaagaattccgttccaagcaagatctggtgaaacttgatatcaatggcctgccatatggtctgtgtgccggctgcgtgaatctcagtaagagcgccagcccaggcattaacgtccctcccggcacgaatagaccaggcttgggccagaatgagaatctgagtgccattgaggggaaaggcaaggtggggggactgaagacacgctgctctagctgcaacgttaagtttgagtctgaaagtgaactccagaaccacatccaaaccatccaccgagagctcgtgccagacagcaacagcacacagttgaaaacgccccaagtatcaccaatgcccagaatcagtccctcccagtcggatgagaagaagacctatcaatgcatcaagtgtcagatggttttctacaatgaatgggatattcaggttcatgttgcaaatcacatgattgatgaaggactgaaccatgaatgcaaactctgcagccagacctttgactctcctgccaaactccagtgccacctgatagagcacagcttcgaagggatgggaggcaccttcaagtgtccagtctgctttacagtatttgttcaagcaaacaagttgcagcagcatattttctctgcccatggacaagaagacaagatctatgactgtacacaatgtccacagaagtttttcttccaaacagagctgcagaatcatacaatgacccaacacagcagttagtgcaagtacagtctctcaaggagaattgattttgtggcacaaaaagggaacatgttttactctttgcacgaaactttcattgttaatgtatattattcagaaacattgtattgtaccataaaacttgtattatcaaactgttggatgttcatgtgtttgaacttttgcgcaccggatagaccccttgtatataaagtgttgcacatgtattatgtcgtctgatactaaaatggtcttataaagacaagtggacttgggccctattcaggcaagatt

SEQ ID NO: 16239 - protein, 693 aa, Homo sapiens
MMQAVGGAPARPTGEYICNQCGAKYTSLDSFQTHLKTHLDTVLPKLTCPQCNKEFPNQESLLKHVTIHFMITSTYYICESCDKQFTSVDDLQKHLLDMHTFVFFRCTLCQEVFDSKVSIQLHLAVKHSNEKKVYRCTSCNWDFRNETDLQLHVKHNHLENQGKVHKCIFCGESFGTEVELQCHITTHSKKYNCKFCSKAFHAIILLEKHLREKHCVFETKTPNCGTNGASEQVQKEEVELQTLLTNSQESHNSHDGSEEDVDTSEPMYGCDICGAAYTMETLLQNHQLRDHNIRPGESAIVKKKAELIKGNYKCNVCSRTFFSENGLREHMQTHLGPVKHYMCPICGERFPSLLTLTEHKVTHSKSLDTGNCRICKMPLQSEEEFLEHCQMHPDLRNSLTGFRCVVCMQTVTSTLELKIHGTFHMQKTGNGSAVQTTGRGQHVQKLYKCASCLKEFRSKQDLVKLDINGLPYGLCAGCVNLSKSASPGINVPPGTNRPGLGQNENLSAIEGKGKVGGLKTRCSSCNVKFESESELQNHIQTIHRELVPDSNSTQLKTPQVSPMPRISPSQSDEKKTYQCIKCQMVFYNEWDIQVHVANHMIDEGLNHECKLCSQTFDSPAKLQCHLIEHSFEGMGGTFKCPVCFTVFVQANKLQQHIFSAHGQEDKIYDCTQCPQKFFFQTELQNHTMTQHSS

SEQ ID NO: 16240 - DNA, 1845 bp, Homo sapiens
  CDS (518)..(1843)
agaaacatcgagaaaaagaagctcaaactggaggattataaggatcgcctgaaaagtggagagcatcttaatccagaccagttggaagctgtagagaaatatgaagaagtgctacataatttggaatttgccaaggagcttcaaaaaaccttttctgggttgagcctagatctactaaaagcgcaaaagaaggcccagagaagggagcacatgctaaaacttgaggctgagaagaaaaagcttcgaactatacttcaagttcagtatgtattgcagaacttgacacaggagcacgtacaaaaagacttcagagggggtttgaatggtgcagtgtatttgccttcaaaagaacttgactacctcattaagttttcaaaactgacctgccctgaaagaaatgaaagtctgagacaaacacttgaaggatctactgtctaaattgctgaactcaggctattttgaaagtatcccagttcccaaaaatgccaaggaaaaggaagtaccactggaggaagaaatgctaatacaatcagagaaaaaaacacaattatcgaagactgaatctgtcaaagagtcagagtctctaatggaatttgcccagccagagatacaaccacaagagtttcttaacagacgctatatgacagaagtagattattcaaacaaacaaggcgaagagcaaccttgggaagcagattatgctagaaaaccaaatctcccaaaacgttgggatatgcttactgaaccagatggtcaagagaagaaacaggagtcctttaagtcctgggaggcttctggtaagcaccaggaggtatccaagcctgcagtttccttagaacagaggaaacaagacacctcaaaactcaggtctactctgccggaagagcagaagaagcaggagatctccaaatccaagccatctcctagccagtggaagcaagatacacctaaatccaaagcagggtatgttcaagaggaacaaaagaaacaggagacaccaaagctgtggccagttcagctgcagaaagaacaagatccaaagaagcaaactccaaagtcttggacaccttccgtgcagagcgaacagaacaccaccaagtcatggaccactcccatgtgtgaagaacaggattcaaaacagccagagactccaaaatcctgggaaaacaatgttgagagtcaaaaacactctttaacatcacagtcacagatttctccaaagtcctggggagtagctacagcaagcctcataccaaatgaccagctgctgcccaggaagttgaacacagaacccaaagatgcgcctaagcctgtgcatcagcctgtaggttcttcctctacccttccgaaggatccagtattgaggaaagaaaaactgcaggatctgatgactcagattcaaggaacttgtaactttatgcaagagtctgttcttgactttgacaaaccttcaagtgcaattccaacgtcacaaccgccttcagctactccaggtagccccgtagcatctaaagaacaaaatctgtccagtcaaagtgattttcttcaagagccgttacaggctacttcttctccagttacttgtagctcaaatgcttgcttggttactaccgatcaggcttcttctggatctgaaacagagtttatgacctcagagactcctgaggcagcaattcccccaggcaagcaaccgtcttcactagcttctccaaatcctcccatggcaaagggctctgaacagggcttccagtcacctccagcaagtagtagttcagtaaccattaacacagcaccctttcaagccatgcagacagtatttaacgttaatgcacctctgcctccacg

SEQ ID NO: 16241 - protein, 442 aa, Homo sapiens
MLIQSEKKTQLSKTESVKESESLMEFAQPEIQPQEFLNRRYMTEVDYSNKQGEEQPWEADYARKPNLPKRWDMLTEPDGQEKKQESFKSWEASGKHQEVSKPAVSLEQRKQDTSKLRSTLPEEQKKQEISKSKPSPSQWKQDTPKSKAGYVQEEQKKQETPKLWPVQLQKEQDPKKQTPKSWTPSVQSEQNTTKSWTTPMCEEQDSKQPETPKSWENNVESQKHSLTSQSQISPKSWGVATASLIPNDQLLPRKLNTEPKDAPKPVHQPVGSSSTLPKDPVLRKEKLQDLMTQIQGTCNFMQESVLDFDKPSSAIPTSQPPSATPGSPVASKEQNLSSQSDFLQEPLQATSSPVTCSSNACLVTTDQASSGSETEFMTSETPEAAIPPGKQPSSLASPNPPMAKGSEQGFQSPPASSSSVTINTAPFQAMQTVFNVNAPLPP

SEQ ID NO: 16242 - DNA, 1574 bp, Homo sapiens
tagaggggaagtcctatactgtgtgcttcatagtggtatttctaatgataacttttgtgggaaagcagcctcgttatagctggatcctagattagtccagtgaattttaataagaaattacactgttgtaaactcacctcttatgcattggtcagtgatgagatatatatataaatagatagatagataaaatttgctcttatatagccatttattcatcattggccctgtttggcccatcctcagtgtggctgtgagattattgataactggtcactgtcagataaatcacattctattaggaaacacctatataggttatgcagaaacatgcagaaatgccacctgtccatacttacgtggctttacataaacaaaagactgtcttgtctttgtggtgactgaatttacaacgtcctcccctggaaatggaaaagtacctatcaggagatgtatgacaaaagaaattatcaagcctgacttcatatatattatgaacagtctagaggaagcatctttcttagaactaaggaggtctgctgaacattggccacattctggactttcatgaaaatcatggacccagagttggggttaagccacttagaaaaagctgttgaaaacatctcaaaggccactgaacaatttttaaattacacttaacatgccaggtatctaggtatctagtgcttttagcaatattatcaatattatcaaggtcccagcttctttgtgtccttcccccttgcgatcctctttttttttttttttttgctttttaaaaaatagtgacagagtctcactctgtcgcccaggctggagtgcagtggcagtcttggttcactgcaacctctgccttccgggttcaagcaattctcctgcctcagcctcccgagtagctgggactacaggtgtgcgccaccacacttggctaatttttgtatttttagtagagatggggtttcaccattgttggccaggatggtcttgatctcttgatctcatgatccacccgccttggcctcccaaagtgctgggattacaggcatgagccactgtgcccagcccttttttttttttttttttgacggagtctcgctctcttgcccaggatggagtgtagtggcacgatctcggcttactgtaacctccacctcctaggttcaagcaattctcctgcctcggcctcctgagtagtggggattacaggtgcccgccaccatgtctggctaatttttgtgtttttagtagagacggggtttcaccatgttggccaggctggtcttgaactcctgacctcagatgatccacctgccctgacctccgacagtgctgggattacaggcatagccaccgtgcctgaccagggctcttttagcaaggaaaacgtgaggaatgaatggctgttggtgtgcaacaaatcatacttgctacatgttgtgaaacctgaagttatttgttagtctgtatgaagaatgtaccccagagatgcaccctgtatctgccttatgtctcttacaatggaggttctctcctgttatattgctgaataaactatgtgaactgctaaattg

SEQ ID NO: 16243 - DNA, 1659 bp, Homo sapiens
  CDS (14)..(1183)
atttttagtagagatggggttttgccatgttggccaggctggtcttgaactcctgacctcaggtgatccacccgcctcggcctcccaaagtgctgggattacaggcgtgagccaccgcgcccgcccttctgtctttgtctttcttattcactattccagttttcttcaccttctcccttctggaaggccactcttctgggtggaggggaccagacttcagaaggtactgacctcttcttcttgttctctttggggcacttccttcctcctagccaacttcacgttgccagatgttggggacttcctggatgaggttctgttcattgagctgcagcgggaggaagcggacaagctagtgaggcagtacaacgaggaaggccgcaaggctgggccaccccctgaaaagcgctttgacaaccgaggtggtggtggcttccggggccgcgggggtggtggtggcttccagcgctatgaaaaccgaggaccccctggaggcaaccgtggcggcttccagaaccgagggggaggcagcggtggaggaggcaactaccgaggaggtttcaaccgcagcggaggtggtggctatagccagaaccgctggggtaacaacaaccgggataacaacaactccaacaacagaggcagctacaaccgggctccccagcaacagccgccaccacagcagcctccgccaccacagccaccaccccagcagccaccgccaccacccagttacagccctgctcggaaccccccaggggccagcacctacaataagaacagcaacatccctggctcaagcgccaataccagcacccccaccgtcagcagctacagccctccacagagctttggcttttttccctccactttccagccgagttacagccagccaccctacaaccagggaggttacagccagggctacacagccccaccgcctccacctccaccaccacctgcctacaactatgggagctacggcggttacaacccggccccctataccccaccgccaccccccaccgcacagacctaccctcagcccagctataaccagtatcagcagtatgcccagcagtggaaccagtactatcagaaccagggccagtggccgccatactacgggaactacgactacgggagctactccgggaacacacagggtggcacaagtacacagtagccagtgtgacccagaggctcccggaggcccctgccggcttcctccaccagcgcctgcctcggcccctcctctgcccccgccagatcccgtggtgctggggatggggtcatcccagggctgcctccctccagcccactgcctcccctctgaggggcttccttcccctccatagggccaggcatttttttctggattcaaacaggcaacaatgaccttttattttctgtttgtccccacctccccagccttccacctcctgttcttcctaccttcttcctttttgactaaataatccccacctcccttgatcatacagtgaggctacagtgactgaggggagaatcccctcctgttcactctcccaaccctgctccagcccctcagcttcccagaccctcatgcagttggttgtaaattctcccaggagctgttttactgtctacttttcagggttaaaaaaaaaatcaaaactt

SEQ ID NO: 16244 - protein, 390 aa, Homo sapiens
MGFCHVGQAGLELLTSGDPPASASQSAGITGVSHRARPSVFVFLIHYSSFLHLLPSGRPLFWVEGTRLQKVLTSSSCSLWGTSFLLANFTLPDVGDFLDEVLFIELQREEADKLVRQYNEEGRKAGPPPEKRFDNRGGGGFRGRGGGGGFQRYENRGPPGGNRGGFQNRGGGSGGGGNYRGGFNRSGGGGYSQNRWGNNNRDNNNSNNRGSYNRAPQQQPPPQQPPPPQPPPQQPPPPPSYSPARNPPGASTYNKNSNIPGSSANTSTPTVSSYSPPQSFGFFPSTFQPSYSQPPYNQGGYSQGYTAPPPPPPPPPAYNYGSYGGYNPAPYTPPPPPTAQTYPQPSYNQYQQYAQQWNQYYQNQGQWPPYYGNYDYGSYSGNTQGGTSTQ

SEQ ID NO: 16245 - DNA, 1503 bp, Homo sapiens
atgcaattacaaatccaataccattgagcccttttgggacctatccctggaattccctgaacgctatcactgcatagaaaaggggtttgtccctttgaatcaaacagagtgcttgctcactgagatgctggccaaattcacagagacagaggccctggaagggagaatctacgcttgtgaccagtgtaacagtgagtgctgtgtggaggagggggcgtagtggggaagaataattggaatatcagtttaaggtgctgctttgtcctctttagtcaaaagtaacactaatgatattgaatggttctaaagcatcttttaaagatctttttctcccatttttctaaaaacaaaaaaacatggacttgttttaattatgtattaaaaaacaaaacaaggctgggcgttgtggctcacgcctgtaatcccagcattttgggaggccaaggcggacagatcacttgaggtcaggagtttgagaccagcctgaccaacatggtgaaaccctgtctctactaaaaatacaaaaattagctgggcatagtggcagatgcctgtaatcccagctactcgggaggctgaggcaggagaatcggttgaacccaggaagcggagggtgcagtgagccaagatcgcgccattgcactccagcctgggcaacagagcaagactccgtttcaaacaacaacaacaacaacaaatgaaacaaagacctaggagttgattgacctcctgattgacattagttgtcatcttggaagggattttaaagttgtggctcctgaaatggggactctgagaatgttagtacttagcttcttagtgctgtggggctgctgcttaaattcatgaatgtagagtctgacagttcttacttaatctaaacccagatggtatagcctttctgaagggtgcgatatcagaaaagcaagcttttgtactgaactggtagacttaatgtctgtcaaaagtgatgctaaagattggtacagtggaaccaagaaagcaagtcttaaggtgcattgctcagtggcagcttcatgaaatattttctgcattttgtttttattgttcacatgcctgaaaagttcacatttcagagagggtcatacggaagtatttctgtgttgtctgtaattttaaaatggaactcttacatatggttacagaggcatgttatcagggtccttccatcttgccacactaacacttaatgcttctgctaatccagtatggacagaggaaatgcagaacaaatatgtggatgcttatgtttggggtttgtggcatatatagatttggaaactaaaagtataaagttaatggactgtgcagagacctagaaatcaattttcagtcacataatagtttagattaccagttttgaagaaaaaaaaaatcttaggccaggtgcagtggctcatgcctgtaatcccaggactttgggagaccccaaggtgggcgccactgcactccagcctgggtgacagagcgagatgctgtctc

SEQ ID NO: 16246 - DNA, 1895 bp, Homo sapiens
ctttatcaaggaaattagcacaccagtctgacagaagagtagattgtgtttgtgcttacccttcttctcctaaaattaagtgttagctttcaaacttgcttttgaagtgctaagaaccctgatgataaatgatgaacaaagcctcctgtttacattggaagcatcaaaacagcaggactgggccaattcacccattcctgttgatcattagacattaactggttgtccaacttcaaccacatcaactacaaaatcctgaagtgaaacaaagtctaagttagttgacttttctttgattagtctctagtgcatttatcactttctatgaaagaagcatctaatttagatggcagttgatttgtgtcatgggatttcttctgacaggaggcagagttatgtatgtgtttatggcttctttgcctttaaaagattaatgttgggcaaatataaatcacaagacctggatagggggctgggaagatggagcaggagcttgccagggtgatggattgagacgtattttagaggattttcattgctagaaaaaacactgggaagatgtggcagaggggtggtggggcagggacagtgaagagagatggctttttctccctaagcacagagaaaggacaggatgggcacttgagccagggcaggtggctttctggctctgtttcagaagcaaaatgaaattgaattggtaacttcctgaagcttctttcctgccctgatacccagaagacaggattggaggacaaaggagggttcacagcacagctggaagtgctcaaggtacccagctgctccaggagataaagtactccctgcctgccccagtcacaggaactggcccctgaagccaggctgccacaccctatcttcccatagaccaagtctaggcttctgtcccctgaggctgtgtgtgtgtgtcagtgtgtgtgcatgtttgtgtgtgcacctgtctgtgcatatgtggaaaagtgtgagaggaatgtgcatgagagtgtgtgtgtgcatgtgtgcctgtgtgtgcatatgtgggagagtgtgtgtaagagtatatgtgtataagtgtgtgagtgcatgtgagagtgtgtgagtgtgttagagtgtgtgagtgtgtgtgagaatgtgtgtgatagtgtgtaagaatgtgtgtgtgagtctgtgtgtatgtgagtgtgtgtatgtgagtgtatgtgtgtgagtgtgtgagtgtgtatgttcatccttaaatatatgaggacaataagaatagctcccatgtgccgggcaacaccccgagagccacactcagtgctgctttgtatgtgttgcctgccgtaatccttcgctagggacgagcacacgagggctcgggaggggtgcttggagttgggacccagagcaccaggacttactgtcaaatctctctggcaccaaaacgcatgctccctatgccacctatcaggatgcacccttaaagcacttttaagatgctttttggaaagagccatttgttggtgtgcatttgtcttcaccactgccccaaacatagctgtccaatattcaggtgaaaatgtcccccatcggccgggtgcagcggctcacgcctgtaatcccagcactttgggaggccaaggtgggcggatcacgaggtcaggagatcaagaccatcctggctaacacggtgaaaccccttctctactaaaaatacaaaaaattagccggccctggtggcacgcacctgtaatcccagctactcaggaggctgaggcaggagaatcacttgaacccaggaggcggagcttgcagtgagccgagatggcaccactgcactccagcctgggccacagaccaagactccatctcaaaaaaaggaaaggaaaggaaagaggaaagaaagaaaagaaaag

SEQ ID NO: 16247 - DNA, 1542 bp, Homo sapiens
tttaaaattatgaaaagtaaggaaattcttatttaagcaaggttattaattggacattactgtatttttggtacctattgtatctgagagtctagagagagtaatagaatcataacattactattctaaaatagtatcttcattgtttaaaccctattcacctccttttcctattgcatttgactttttcatagataaatctgaagttattatttttttaaataatcctttctacatgggagcagtgtatattaggaaattttcaattactttggacctgcacctttgcattgtaggtcagaacctacaaaaattccatcttggaaaacattttagatttaccttgtattcacacacccctgcaaagtgggtctttgcaaacaggaaaggtaaaagatttatttttactgcaaaatcatgcctttatataggattagtctgtggattatttcaggcaacaatgagtagatttttgaaggaaacttcataacacagttttggagccctatcttctgtaacacatttccaacctttggaaatagccttgattttccaacttttaacctgataccaacaaaaatggacaaagataatatcacatggaattattctgaagagccagctgctgagaagttccaggagctgtaaattagacaaaagcatccatttatttgggagtaagttacaatatggctatagcttaaaaatatataatgattcagggaggtattttaatgaacttatgtggcatttattgtgaactattgtatgtttagtattacactgtttttcttctcatgatgtaaaggttcaagcttctgctatcctttgatgtgtgtttgtttttatgaagacagtgcaataattttgtttccactgcattttaagattttttaaaaaataacatttgtaaatgaatattgaaattaaaaatagtaacatcagttttttcttcaatatacagacttcctttaataagtgttgcgctggttcaaggttgggcattgggtggaggagcagaatttactacagcatgtgatttcaggttaatgactccagagagtaagatcagattcgtccacaaagagatgggcataataccaagctggggtggcaccacccggctagttgaaataatcggaagtagacaagctctcaaagtgttgagtggggcccttaaactggattcaaaaatgctctaaacataggaatggttgaagaggtcttgcagtcttcagatgaaactaaatctctagaagaggcacaagaatggctaaagcaattcatccaagggccaccggaagtaattagagctttgaaaaaatctgtttgttcaggcagagagctatatttggaggaagcattacagaacgaaagagatcttttaggaacagtttggggtgggcctgcaaatttagaggctattgctaagaaaggaaaatttaataaataattggtttttcgtgtggatgtactccaagtaaagctccagtgactaatatgtataaatgttaaatgatattaaatatgaacatcagaatt

SEQ ID NO: 16248 - DNA, 1543 bp, Homo sapiens
agttaagtaaatgtagtattggctagttactgtaagtcctcatcttctggtaggtcctgtaactctaattaggcatttgtacatttttagcagcaaaattgcctcagcagagctcccagttttattcccagttgtggctgaaaagcaaagccatggcatcagtatccttgtgcaatcggaggttgctgggctttcaccacctgtgttgttaaccttatttcctggaggaagaaacagatgaaacaagtgcctaactccctttatcaaacacagccaaggacagcctcttttaacatgtgacttcatacttgaggaaaaggagagttgacagctgtatttaaaaacccatggagccgggtgcggtggctcacgcctatgatcccagcactttgggaggccgaggcaggcggatcacaaggtcaggagattgagaccctcctggctaacaccgtgaaaccccgtctctactaaaaatacaaaaaattagccgggcgtggtggcgggtgcctgtacaggaggctgaggcaggagaatggcgtgaacccgcgaggcggagcttgcagtaagctgagatcgcgccactgccctccagcctgggcaacagagcaagactccatctcaaaaaataaatagataaaaataaaaacccatggaaatggtttaagaaaatggttctgggtacaccagaaatttgtttgcctgaagctaaagtgtgtctacaatggtacagctcttccagggacatgggaagtttatcgtgggagatatccagaacctgttttacactgggctcctactgtgtttggtgatcagaaactatagaggggtccaacccaggatttcatgtttgtatcttcataaggccatgctcctgacaggtctaggcaacctgggggatgaattaggttagtgtgctaggattgacacacctcatccagccttcttactttgtggatgggaacacttaaggaatagagagattaaatcttacacttaccccacagctggttactgacaacacaagctctagaattcatgtttgtttgtttgttttatttcaccaggctgcatgagactgaccttctggcattcttactaatagtctttctattatactattggatctttattcatccacctatacaagtaggaaataaggatgaatattcatttagaagaattaatattcatattaacacattgctctcagattattgggaattaacatcttgtaaaaactgggagcaggccaggtatggtggctaacgcctgtaatcctgacactttgggagtctgaggcgggtggttcgtctgaggtcagtcaggagttcaagaccagactagccaacatggtgaaaccccgtctctactaaaaaaaaaaaatagacaaaaattagcgggggggtggtggcagggcctgtaattccagctactcaggaggctgaagcaggagaatcgtttaaacacaggaggtggaggttgcagtgagccgagattgtgccactgcactccaacctgggtgacaagagcgagactccgtctc

SEQ ID NO: 16249 - DNA, 1659 bp, Homo sapiens
ggccgagggaaacacaaccccaagcagcctggagtaagtggtcccgaggcagctcaagacagtttggttttattcatttcagagagacaggaattgcagggaaaatcatgaatcagtgcctggaaggtgtaagttccattggcagaaagggtgggacctgtggaaggggggttagaaggcacaggtagttgagggattctgtaggtggcagctggttgagagtgttgaatctttgtctaaagtttggaggaggtaggaaggaatgctgaaggaagggggtctgttatctgccacttcattccatcccagccaaaaaacagacctgtttctcgagattttatgaattctaaggcgtaactttacctttgccttgcgtggccttaggtcttgtttgtaatttggtatcttgttgccacaaggagtctgtttttccagtcagataatgtctgtttttacatgaatgtgcgtcagttgctgcatgtaaactcctaaagggagagggtataaggagacctgtctcacctcccatcctgtcatacagaggcactcaattttcagggttttttgggggttcccttggccaagagccagtcacttcacttagctgggaaggtactttgtttttgtttttgtttgagacagagtctcctgtagcccagggtggtgtgcagtggctctatcttggctcactgcggcctccaccttccgggttcaggcgattctcctgcctcagcttcccgagtggctgggattacaggcatgtgccaccacacccggctaatttttgtatttttggtagagatggggtttcgccgtgttggccgggctgttcctgaactcctgacctcaagtgatccactggcctcggcctcccaaagtgctgggattacatgtgtgagccacctcaccaggccagaaggtatgtttttatttttagtttacaggttgaaggctggacttttataaggtacatgaggagacaaaccagataaatgcttgattggttgcagagatgcagtcaccttatttggacttgtcaacccgaaataatcgaaagtttcagatttcaactggaagagtttattcaagcaaaaagatagcaatggcccatttgggaaaaacacagactccagagaaatggactcagtactccaaaattggaagttaagttcttgcttatattactgggaaaagaggtcctgatcagatcccaagagagttcttggatctcatacaggaaggaattcaagacgagtcggaaagtacagtgcaaagagagtttattgaaagctactctgggccagcatgatggcttgggcctgtggtctaagcactttgggaggccgaggtgggaggatcacttgaggtcaggagtttgagaccagcctgggcaatatggcgaaaccccatctcttccaaaaataacaaaaattagccgggtgtggtggcctgcacctgtagtcccaggtactcgggaggctggatgggacagtcgcttgaacccgggaggcagaggttgcagcccagctgaggacacgccactgcactgcagcttgggtaacagagtgagaccccatctcaaaaaacaaaaacaaaacaaacaaacaagacagagttcaagaccaacgtggccaacacagtgagaccctgtctctattt

SEQ ID NO: 16250 - DNA, 2339 bp, Homo sapiens
gaaaaatcacaaagaattgcatggcagagtgcctgtctttcacagcttgaactgttgcaggaactttcttttttttttttcttttgtgatgcactccagcctgggagacagagcgagactgtctccaaaacaaacaaacaaacaaacaaacaaaaaaaccctgtagcttgggatcagccttctcttctgttgtttttctttaaaaaataaaaattaaaaataggcttcaagtgatcctcccgccatgacctccaaaactgctgggattgtaggtgtgagcactgcacccagccgtatgtttttttctacataaaaaacagcacaggattatcttccaaagctaacaaatatgttcaaataaccacaaccccacccctgctccttggaggacaacgtgatcactgtattcagctctgtcaagaatggtccaggttcttcataaattccccagtttccagtagttctttatagcagtgtgaaaacagactaatggacccttctggttgaaggaatgtagccattctgcttgtttaagtatttcctttctattcatctctatttcccgggaggtgtttatccaagtgcaataggagatattggtgactgcagagtcccctcagtgttctgctagtaaatagttgaaggttgatcagtgatctccagcattttcagtctggcatggaaaagcccccatgtaactggtaaaggtatcagtaagcaccaggaggtatctaaatccaccaggagccataggcatcatgttgatgtccatttaccagtcttccctggcaagattctctgaattgtactgccttggccaaaagaggtatgggaggggctgggcacagtggctcacgcctgtaatcccagcattttgggagaccaattcgggtagatcattagaggtcaggggttcaagaccatcctggccaacatggtgacattccatctctactaaaaatacaaaaagtcagcggggtttggtgttgggtgcctgtaatcccagctactcgggaggctgaggcaggataatcacttgaacctgggaggaggaggaggtggcagtgagctgagatcgcgccactgcactctagcctgggcgacagagcaagactccgtctcgaaagaaagaaagagaaaggaaattccccagggaagtacctcggcttatttcatgaagaggtactgaaggaagcagaggcatgtggaggacttccccacctcgtgcagctatttgggccgtggcgtctgaaatttcttatttcagagtcacccctttgatgaccttggcagtggactgcagtcatctgtttaggcctctccatggcccgtgtcaatgccgatatttctgtctgttgcacatttgatttccttgttgttggcatttagaaggccccctgtttcccagatcacaccacgggcatggaccgcagagattgcatcttgtgagtctgtagaaacagtcaaggccttgtcctctcttaggtccagagctcaggtgaatgcagattttcccggccatctgtgctgaagtccctgtggggaggctcctggctggtttcctgtaggtagacagctacacatcctgcccttcattggcttcttttcatgaagctcctgctgtctacaaaacatgtctcccttttcttcttgaaccacgtctctgttattgaaactctagaagtcagccaggcacagtggctatgcctgtaatcccagcactttgggaggccaaggtgggtggatcacctgaggtcaggagttcaagaccagcctggccaacatggcgaaaccctgtctctaatacaaatactaaaattagccaagcatggtggccactgcactccagcctgggtgacagagcaagactctgtctcaaataaagaaagagaaagtatcatgcttttcagagttctgtgggttgttatggtgaattatcaaacctgaggacgtggtgggaacctccaaatttgcagccagttggtgagaagtacatgcggtctgtggacacccaagcttgcagctgcatctgaagcgagggcagcctagcgggggctggtggccttaacctgtggcatttgatgtaacatcagggagttgacatcagaattacgtcacacaggccaggtgcagtggctcatgcttataatcccagcaattagaaaggcaagataagaagattgcttgagcttgagtctgagcccacagtgagctatgaccgcaccactgcactccagcctgggagacagagcgagactgtctccaaaacaaacaaacaaacaaacaaacaaaaaaaccctgtagcttgggatcagccttctcttctgttgtttttcttt

SEQ ID NO: 16251 - DNA, 1593 bp, Homo sapiens
agagcacagaagagggagaagtggctgctctgcgcctcacggccagatcccaggtgagtgagtgctgattattggaattacaccttgtttcttagagtacagatgcactcccttctttgtgatgtggagtttctttatccactaaagcccatctgcagagctgagttctaaatctaagagactagtcaggagactaatggactcagaagaaaatgttttctacttataacactggatggatttcttccctatttagtgtttattgtccctcaacagataggtaagcagcatttccctttcttagcctcctatgctcatttctgtgcttggtaatgtgagaaactattttaaatataatgtggtacatacctcttaaaacttgtttctctagaggaaacagcatgtatgtgaccttaagtggcaatctaagaaagcacttaaatgctgaagtgattgtaaaaataataaatactcacatagttcaaagaaatactggaaaaggaaagcctatgaaggcgtaatttaaagagttacagttagaatccagccctctgagatgatgaaagctaaggtatgatcatgtctgcaacttacttttatattgttggcccctctctcccaaaaggtaaatatgacaaatattacgaatgtttggctgggattacaggcatgagccaccatgcctggcatcattattgatttatgtcattgttatccctctaccgcagagaccttctttcactttccatttccctgggagttcacgtgaagtagtgaatgggtcaaaatcttaacagtggttgttgatcaagcccctcctttcttatccttggcactgaataaatctttggttttccataatcaaagggtgagggagacttcttttgtctacattattcagctttctgaaagctatgctgtgtccatttgagaaaaagccccagggatattgaaggtctgagaagttgggtggttcagtgtgttattatatttagggtcccagtaaagaagaactgaagcaactgtgagacaccagggcatacttccctgtatgagtggaaaacaaggcacggaaaatagctcacaggatagtcctcaactgacttgcttgaggataagcagcttcccttcgtgaagaagttgccatttctctggccttcatatttatctactttttgttattgttgtctgtatcggttcaatctcacactgctataaagaaatgcctgagactgggtaacttataaagaaaaaaggtttaattggctcatggttccatgggctgtacaggaagtatgactggggaggtctcagggagcttttactcatggcaaaaggcaaagccagagcaggtatcttcacagggctagagcaagaggaaaagagagaggggaggtgctacacactttttatgcaaccaaatctcatgagaactctatcacgagacagcagtagggggacagtgctaaatcattcatgagaaactacctgcgtggtccagtcaccttgcaccaggccccacctcccacattggggattacaattaaacatgagatttgggtggggatacagatctaaaccatatcattactc

SEQ ID NO: 16252 - DNA, 2483 bp, Homo sapiens
gctcagcttctctcaccgcctctgggtgtctttgctttcctgaccacagcctctctgcccaagcctgtgtcctctccttccgttctggtctccttcatctcacgtttccccagcctccaagctcttgaagagccgtgtcacactgagagcttccctgacctggtctcatttccctctgacagtgacctccagtgtgctgggttgaccaatgccaagcctctttttaaaccaaagtagttcaccatgggttgggatgatgtcaacaagcagtattcatgttaaaaagcaatgagggactccttccctggtgcacaattttcttcacttgtgatctctaaactgttttcaaattggaagactgggaagcattgctacagccccagccagtctcagccactgctcagcccagtggtggaaagctgagcacacagcgggtgcttactgcccccacttgccgtctgctctccagtagatcaagggacctcagacagggatctgagaagtggcaggttccaataaactgatcaacagaatgaagtcactctgggaagccatgaggtgactttacagcccaagcatgtaaatatacacacagaggataatatatattcttttttttttttttttttgagacagagtctcgctctgtcagccaagctggactgcagtggcgcaatcacagcccattgcaacctccacctcctgggttcaagcaatcctcccacctcagcctcccgagtagcctgaaccacaggcacatgccatcatacccgactaagtctgtttgttttttgtagagacggggtctcactatgttgcccaggtcggtctcgaattcctgggcccaagtgattctctcaccttggcctcaaactgttgggattacaggcgtgagccaccatgcccagctgagactaccttctggatctgatgaagtattagaaaggagcgggtggcttctcctttgtctctggtttggcaatcggagctttcagggcacagtgtttgtctccagatgttgatggaagtgggcactccttggtggcctccaacaggaaaagcgtgttctttcattgtttcctatacacacagacaaccgtttttccaggaaggcagccccatctttagtcattgactgcgggcctatcatcagtcatgacgaagaccgagtgaggtgtgtgcaggcccagaactagcacatcacagccccagagtgggctccaaaccggtagaccagagagcctgcaggataatttcccccttaagatgggtagatttactgttccacagccaacaggtggatacgcgtaactagaacaatctgtcatgggactaagtggaagaatccatcagcactacacagcatcttttcttcaaatacaactgtaaaatctccactgaagagacagtcataccttgggggtgctcagggaatctaggtatttgcactccaagctggcaagcctgggggcactgaagggaaacaataattggaaatgtcagaaggaaatgtatatggagaaattaatagagaaatgattattttaacatgacacgtaagtgtaaataggacagccaattgaagcagtcctgcagtaggggcaggcattgtcaacggagaggtgagactgaagaccccgagcagcatctgcatatgcggcagcaggacttcagggcatgattccttaagaacaggacatagaagaggggaagcatagtgtcaggaattaagtcagaaaacaccttcagctgtgagtggaagaaagaaaaaattccaggaaagacaacaggatggaatggggcggtgagggctatgagacaagttagacacaaaaatacaataaatgcaggcagcacaaatcaatggagagagatggcagataaaaatggattacttgggccgggcgcggtggctcacgcctgtaatcccagcactttgggaggccgaggcgggcggatcacgaggtcaggagatcgagaccatcccggctaaaacggtgaaaccccgtctctactaaaaatacaaaaattagccgggcgtagtggcgggcgcctgtagtcccagctacttgggaggctgaggcaggagaatggcgtgaacccgggaggcggagcttgcagtgagccgagatgccgccactgcgctccagcctgggtgacagagcgagactccatctcaaaaaaaaaaaaaaaaaaaaaatggattacttggccaggcatggtggttcacgcttataatcccagcactttgggaggccgaggtgagtgggtcacttgagctcaggagttcaagaccagcctgggcaacatggtgaaaccccatctctacaaaaattagccaggtgtagtggcatgtgcctgtggtctcagctacttgggaggctgaggcaggagcattgcttgaacctgggaagcagaggttgcagtgggccgagatcatgccactgcactccagtctaggcaataaagtgagaccctgtctc

SEQ ID NO: 16253 - DNA, 2451 bp, Homo sapiens
ccaactgttgatgcatcttgaaaatcattcctcaagtttattatcacttccattccccatgtcagtggcatagctaattatttagaaggcaggtgtctctaggtaattatagttagttctgtatgcaattatcctttctgaaatgtgtgttgtatgccgtaaaaatacctgttacgttatagaatataacaaatagctaacacaatagttaatacttagttgatgctgactatatataattctctagtttattatcataataatacacctcacatcattgaagtcttttacagtttaccaagttctttcattcacggtgtttcatttgggtatcccaacaacattttcaaggcaaacgtgttaccatccttagtttgaagaggaggaacctgaaacttaggaagactaaataacttgtaaaagatcacagaagtgatatctaatagagacgagcttcaaattcaggtttattgaactcagaatcaatgctcctgccccctacctctcaggagtgataatggtaaagattgggggactgtaggccaaataggtcctctgacctcttttataattgtcagcttatctaacgtgaatgacttagataggccttgcagattgagtccttgggagatttcctgcctctgtctagtattatacccagcccaatttgtacctgctgaccttccaagttcctgtgggcatttgagtttctgacctttgcctttgaataagcctgccatttcctatagcatatgtgcattttttgcttcctggaactttctactactttatatttgttctgattacttatcagcaaacaaatcttttagactgccttgtagttctattatggaaaaagtgagaaattattatcctaagaataggcacaaaacatataatacagtgccttgcacttaatgtgtgcttacaaaatgttaattgatgatgaagaagatttaaatcttcctctaaataataagattttatagttatccatcaaaatctaattatgctgaagtcacttcacatcatcataaaaaagtgtttaacactgtttatcaacagataaactgttgttggcttgtaaaatcaaacttgttctgcacttggaattttatcaagttatttgttgggaaaagtttggattatgtggatacttttggtagaagcgttgtgtaaaatgtgtggagtaaaaagtttttgcagataatgtgtttgacataccatattattatattggatgagactttcttccacctgcagatgtttctctttgtcttcccctggtagggttccccttatataataatattcctaggagcaataattgttcccccagatttggatgtcttccagtagttcagagtttcacttagcaccaaaaattaataagctttaattaaaagaagtgattattgctgaaaatgatgacctgttaactccagaaaggcagggtgcttttatccattctcctccttcaaggttggcttttgaattctgaaccatggatttcaatgcagtccatcctcaatttgtaggaagcgttgttttatttggaatttaaaaaggaagctctgttaggtaacattgcagcacaagttctttttaatgtaagtccatgtattaatcaaaacagctgtgagggttactaggtagactgtgacaccgggtggcaataaaatgtcttcctcattacaattaataccgatgacttgcagagacctcctgtatgtgatggcctttctcgatgggcatcctcacttggtggtagggaaaatgagtatgggctgtatgaaacaatttcagcaccaccctgagcttaatagagccgtctttcattgcctgttaacaagctgtgctgctgccataaaatgttcaagctgacaaatgctgtcaaagctccttcaatgcaaagattttctgccgtatttaacatgttaacttttattttaatgatgccaaaacacacatcagttgtttgtgcaacatccagtgtggtctctggagccatcccattagctgaaaagtatagtcagtgtcctgttccagtggccattaatggtaaaattcttcaattaaaaactgtggagttatgctgattcaaccattcactctatcccagaagtaaaatagatatacctacttgctgtgaaattattgagtttgtttagcttgattttctgtgcattacattagccatgagtgtattatagaggctaagaatgataactctatgaaggtttattatgagattcccatatttggctcaaggttttatacaacttgatatgctacctactactagtcttccagttccactattgcaactagttaacacatacattgtacttattgtgtgccaggctctgttctgactgctttatatgtatctactcatttaattttcacaacagtcctatttattaagtgccattgtcctcacttaaaggt

SEQ ID NO: 16254 - DNA, 1605 bp, Homo sapiens
agcattagtttttgttttttatctgacaggtagctatggatattctgagggagaagccaggattaatacacattttttttttaagttgctgaattgtagtggctctcctttctagcatttttgtcactattgagccctcttagtttatgctagacgtgtttttcttattggttgatattttaaattattaaagccatcttctgaataagctttattcgcactttgtacctagtttctccatcagaaggatctattgctataccattgtatacattttctcattggtcttcgggttactttcagagtgtaaagactccttatgccacaaaattaagcttagatttcccccaaatcaaatactataaatcagattccttagtctagccacaattgacatatcttggagtggataaatctttgttgctggcattgttctgtgcatcataacttgtttagtggcatgtcatcactgtcttctactctctagatgccattagtatactcttcacagttaggacaaccaaaagtgtctccagatattgccaaatgtctcctgatgggcaaagtctatcccagttgcgaaccattattgtaaattaaacttggtttcaaatttgagctttattccttagctctgggaacttgggcaagttacttcccttcgagcctcaatgtcctcatttgtaaaatgacattaatacctacttttagctgtgggaattgagtaccatgatttatacaaagcagtttgtatggtgctggttacatgagagttcagatggtaactagttagtaaaaaatctctagtgtgcttgttgattttattttattttagtatttcttaaagatcaaatttaacatcaatcctaaactttatttagctttttctggcgtgtaaactaacatactaagttgtgtgactataattcatttagtgactcatttttagctatttttataacacattgtgctatggggggttttggaacttgctggaagctacatcagaaactgccatagttaattgccatttcaagaatgttgtaaataactcaggtggccgtttaattctcaatgtaaatataattaactagacatctttcctatatttgtgtctcagttttaaagctatttctggatgcttgagtcttaccgtaattgataacaaaaagaggttattgagaatatctatgatttacagagtaagttattctagacctcaagagtgaaatgtaggggaggagacatttgtgtgttaaactaatggaaatgctcatttaatagatattcactgaaagtattagttttggtttattgtagaaaagttgaggttttatggagatttttgtaaaaaatggtttatttcctaaataaatatctctttttcttttttctcccagaaaatgttaatctatgatccagccaaacgaatttctggcaaaatggcactgaatcatccatattttaatgatttggacaatcagattaagaagatgtagctttctgacaaaaagtttccatatgttatgtcaacagatagttgtgtttttattgttaactcttgtctatttttgtcttatatatatttctttgttatcaaacttc

SEQ ID NO: 16255 - DNA, 3231 bp, Homo sapiens
  CDS (2744)..(3052)
atattctattctttttttccctcccgcaagagggggtctcactctgttgcctagtctggagtgcagtggtgcgatcatggcttactgtagccatcatagctgacttgagacatcgacctccctggctcaagtaatcttcccacttcagtctcctgaatagccgggaccacatgagccaccaagcctgtctaactttttaattttttgcagagatggggtctccctatgttgctcaggcttgtctgaaactcctggcctcaagcaatcctcctgcctcggtctcccaaagtgttgagattacagatgtgagccaacatgcccaaccatgttctgttcttatatgaatccaggtcaaaaagattaagaacctaggattatcatagacatcccttctactttgaatattcttctaagtttgtgattatatgctatgtactgagagatcccctcataatttccccaaagcgtaaccatgtgtgaataaattttgagctagtagggttgcagccacgagtaagtcttcccttgttattgtgtagccagaatgccgcaaaacttccatgcctaagcgaactgttgagagtacgtttcgatttctgactgtgttagcctggaagtgcttgtcccaaccttgtttctgagcatgaacgcccgcaagccaacatgttagttgaagcatcagggcgattagcagcatgatatcaaaacgctctgagctgctcgttcggctatggcgtaggcctagtccgtaggcaggacttttcaagtctcggaaggtttcttcaatctgcattcgcttcgaatagatattaacaagttgtttgggtgttcgaatttcaacaggtaagttagttgctagaacccatggctcctttgccgacgctgagtagattttaggtgacgggtggtgacaatgagtccgtgtcgagcgctgattttttcggcctttagagcgagatttatacaatagaatttggcatgagattggattgcttttagtcagcctcttatagcctaaagtctttgagtgactagatgacatatcatgtaagttgctgataggtttccagttttccgctcctaggtctgcatattgtacttttcctcttactcgacttaaccagtaccaacccagcttctcaacggatttataccatggcactttaaagccagcatcactgacaatgagcggtgtggtgttactcggtagaatgctcgcaaggtcggctagaaattggtcatgagctttctttgaacattgctctgaaagcgggaacgctttctcataaagagtaacagaacgaccgtgtagtgcgactgaagctcgcaataccataagtcgtttttgctcacgaatatcagaccagtcaacaagtacaatgggcatcgtattgcccgaacagataaagctagcatgccaacggtatacagcgagtcgctctttgtggaggtgacgattacctaacaatcggtcgattcgtttgatgttatgttttgttctcgctttggttggcaggttacggccaagttcggtaagagtgagagttttacagtcaagtaatgcgtggcaagccaacgttaagctgttgagtcgttttaagtgtaattcggggcagaattggtaaagagagtcgtgtaaaatatcgagttcgcacatcttgttgtctgattattgatttttcgcgaaaccatttgatcatatgacaagatgtgtatccaccttaacttaatgatttttaccaaaatcattaggggattcatcagtgctatgtataatcttagacaatcttctaaacaatgattgaaaagaattataatgataggcacatgaaaaagcaatgccttggcccggcacagtggcccacacctgtaatcccagcactttgggagaccgaggtaggcagatcgcttgagcccaggaatgtgaggccagtgtgaaacctgggcatggcaagacaccatctctacaaaaagtacaaaaattggccaggcgtggtggcgcatgcttgtggtcctattaatagctgctcggggcactgaggcagagaggactgtttgaggccaggaggttgacgctgctataaggcatgatcatgccactgcactctagcctgggtgacagagtgagaccttgtcccccacccccatccccccaaaaaagcagtgttccctctcaaatgcagattttttttaaaagaatatattccttgtcttccatactagtgggaaatttttatggattttttttcttcatttattcttttttcttgcttaatttagggtagtgttgggatagaagatacactttataaaaagcagaaagaccaatcattgagttattttagagacaatatgccagatccatacctttagatttaatcttacctttttttttagtttctcttcattcaagccgaggtagaaagccagtggtggaaagctgtggtattgcataggctacaaacattgtattgtcaacttgaaagtatagctacttctaaggatgttgatgttcattgtagttttttatttatagtagctaaaattagaagcaacttaaagcttccaaaaagagaacaatacttttgaaaaattaaggcacatcctactttggattgttgcacaactattaaagtttggttttcaaagagtgtttaaaagacaccaggagacttcctcttttcttcttctggccaagatgaagtaaaagggactcgatttatttaccccctcacatgacacaatgaaaaaaaaaatgaacaaaatatatttaaagaaaaactgtttggaaggcattggacaccaggcaacacaggacagtgattcccaaaagatagaaacaaataagaggagtagtgtggttgcctggagacaatttccagataccagccccaggaggagcagcccaggcatattctggaggtcctctgaactggggagccagacctggaatctgaagaggccacagtggtttgggtttgcagggcagattaccagaaagaagaaagctgcacagagagaacactctggctatctccaggaggtcctaccctagtgtttaactaagtactggttagtgcatatgtgtgagaaaactatctgaggccagagaaggaaagggaatattccttaaagttcacacaggggccgcaatagagttagagctaataaaccaacaaggagataaaatggaatcataaaaaggtatacagtaattccaagagaagtgag

SEQ ID NO: 16256 - protein, 103 aa, Homo sapiens [sequence omitted]

SEQ ID NO: 16257 - DNA, 1595 bp, Homo sapiens
ccccgtcataggacttgtgacttactaccatcatacatatttgattcaattattatttattgcttaaattgttatgatcatttattataaatcatgtattacggctaattaacatacatatgctcagtcatttacttgattagttattagcctcaattatattattttttaatatatatttttatttgacaaatagaaagtatatagattggtacaatatgatgtttggaaataagcatatattgtggaatgactaaatcaagctaagtaacttatgcagtaccttacatgcttatcttttgttgtgataagaacacttgaaatctattctactgtcttagaaatttaaaaatgggcaaaggacttgaatagacatttcttcaaaaaaaaatgcaaatgaccaacaggtatatgaaaaggtgctcaacatcactaattatcagagaaatgcaaatcaaaaccacaatgatatatcacctaacacctgttaagatgtctattagaaaaacaaaatgtaacaagtgttgataaggatatggagaaatagaaatctttgtgtgccttgtacactgttgcaagagcattagtagaactactttggaaaactctttgtaattatctactaaagatgaatatatgcctactatatgacccagtgtttctactttgaagtgatacagccaacagaagtacatgcatacatgcaccaaaagacatatacagaaatgttattaggacttctggtttccagttccacatgtagggagcttagaagttgccactccaaccctaacaagtaaaaagctaagcaaactgagaaatcaattcttatcggacccaggataggggaggacacagggaaaaccactgtccccaaaagactagagagacagactggcaaataccgagagccacaagttactagagcatgcagtcacaaacagaaacccccacaggaagcagtgccatggtacaaaaacctgagctgtaattgatgattataggaggttcagtatgaacaactctgaaagttttaaactccaggaggacccactcatggggaaacaccacaattttgttagacttacctacatgagctcaattagattctccaagtaaatattgcagaaaaatccctatgtgcttctggcagggggaaggtgaaatgaaccattttgaaatatgccagagcactgtgctcttcttaacaaggtctgcccccaggagaaattagttagctaaatcctaacctgctggggtattattagagcctgacccaagggaagggaaatacctaactcttgtcagctctaaccttctgcatcagagaagggaaatactaaactccagacaactctagccatcctgtcctaccaaagaggggagaagaatactgaggaaacacttagaagtttgtacaccagaggcatatgcttactaaaagactgagacttaatcataggatgatagaatgtctcccctcccctttcccccacctaactgctacattgctaaaagctgatttataaaagttccttttacctggtacatcatgtccagctaccaagaaaaaattaccaggcataccaaaaggc

SEQ ID NO: 16258 - DNA, 1713 bp, Homo sapiens
aataataaaattatgtctaatgaaattccaaattaaggcaaaataaacaacagaagaatgacagcaaaccaaactagtgtactggttatcactatcaataattaacagaggtctggaagtttgaaatgctacaagttttaactgtatacagttgataatattgctttctttaggaatcaactgaaaacatactaaaattaattggtatgactaagagagcagaaataagactaaaaataaaaacacaatggatttcttctatgtaaagagcactcagagactatgatgaaaatattacataccaatgacagtagaagtagaaaaaaacaccaaaataatagtgtgaaaagtttaattggaattcttaacaagaacatgtaagattttcatgactaaattttatataaataaaaacttgtataaataagttgtgacacaattttctgaatgagaaaagagagatgaaatattgtctttctatttgcatatagatttactatcaatctgaaagtcttaactgaatctttcttggatcgtcacaaaaatatacaaaaaaaactcatcttaaaataaaaatcagctaagaactagtggaacagcaagtttagtaattttcctaccaaattttaatgtacattttaaagccctactaaatattttaatattttatatattgctataatagaacaaattgtatatagcatgcttcctgaattggatagattttaatatcatgagagtagatagatatactaacagaaataaattcattttactaataagtgcttggcatataaaaacaatactttggggggatagaataggaggcatgaaaatttgggctaatacaatttccttctaaatttactgaaaaatgagaaggatcttcaactttcttgcagagtcattcactcaagatacctttgcgataaaataaacttcccaacatctgacatggcccatacttaaaaggatgcttttcataccttttaaggaatcttttctgtgatttactagagggaatgtagattttttttattatcaggtgctttctatgacatctaatcagagtattaacactgtggccatgacaagtgtttaaaatttaaaagtacttttgtaatacttaatcctcttaagttgatttttatttttaccgaagttatacttgcacatggcctaaatcatgctataaagttttgttaagaaaaacagaagttcactttattttccaagtccacagattcctttgcagttcagtggttctactgcctattcctctctccagaaatgttctagtaatattccctggggtggaagccagctttccacacttcttccagaggtactaccacctgcctccatgggagaactggctctggacaaccgctctagtcttgctttgtctactgctcctgcctatctcccttaaaagcattagcttctctcccttctcctgtgacatacatagcgtattcctcactccatgacattgtcataggactgaaagaagccaggaagggaagttgtgtacaagtaagctctgttttctgttttaaagcgcaatcatccactgaaagaaaaaatagcacagagacctgtctagctgcttagaatggggagaagaaaattaagagaaaaaaaatgataaatagcttttcttttccttattctattaaagtaaaaaaaaaaaaaagcaaaacaaaacaaaac

SEQ ID NO: 16259 - DNA, 1438 bp, Homo sapiens
ggaaaaaaagttaaggatacagttgaccgttcgataatgtagcccactgttgaccagaagccctacccacaacataaacaggcaataacacatattttgtatgtgtattatatagtatattcttaacaataaagtaaactagagaaaagaacatgtaccaagaaaatcataaggaagagaaaacacatttacagtactgtactgtatttattggtaccatacatttatgttgctgtttacaagatgaagcatctgtctgaaatggccagcagctacagctgtacctatctactgtacatatcaagcaagtcgctttattcttataatgtctatgacttctttctttgaaagcgcttccatcatcactgttggcacttcatatgggtctcatggtgttaaggtttacggcattgcactagacacaatgaaaactacacaagagggccgggcacggtggctcacgcctgtaatcccagcactttgggaggccgaggcgggcggatcatgaggtcaggagattgagaccatcctggctaacacagtgaaaccctgtctctattaaaaataaaaaaattagccaggcatggtggcacgtgcctgtaatcccagctaatcgggaggctgaggcaggagaatcgctttttcccagaaggcgtaggttgcagtgagccgagatcgtgccactgcactccagcctggatgatagagggagactctgtcgcaaaaaaaaaaaaaagaaaaaagaaaattatatagaaataaaattccagctattccaaaactgcaccttgaatacaggtacagaattgctaaaaccgtgtaccattttgtagttttagcatgcttttgtgtaactgcatctggtgtttgatcctcatgagagccctgttaaggaagggtacatattattgtcctcattttccttcgaaaacacatcagagtttgtattttgactgtcagcattcaaatacaagtcttttatttataaaattttggtctttatactgtggctaaaaatcttaaatcacttgtcatgatttgaaatggtttataccgattttttttgacatttatacacacatacacatatttttaaattgtctataataaaatcatgctcatctttgaaaaaatattaggagtactacagtggatacctacatacttgctattcagcatacctggttttttgtttgttttttgagacagtcttctctgtgatccaggttggagtgcagtggcacgatctcagctcattgcaacctccgtctctactaaaaatacaaaaattagccgggcatggtggtgcgcgcctgtagtcccagctacacgggaggctgaggcaggagaatggcgtgaacccgggaggcagagcttgcagtgagccgagatcgcaccactgcactccagcctgggcgacagagcgaaactccgtctc

SEQ ID NO: 16260 - DNA, 2064 bp, Homo sapiens
tctacatttttgaaagacaagaattaagtttgattgagaaagatgtttttaaaactttgaaactcataattgctctgtttttgctgttgttagtggcataagaagggactggctgtgttattctgcatattgcagttcttgtcaatgacctggtaagtctttccttaccctagtgaagtgttaaaattgcctgagatgtgacgagcattttgtttgggacctgtgaagccctagcatttcgtctggtgttttggagccagacaggccctgcagggtcagaggaggggaggtctgcgatgagtcctgttgcacttgacagcgtggctcagtggtactgttcgggagaagtatggggtgctgtgctcgtagagttacatagtgatatgttctgcttttttctaatgtgagaaagagaaataataagaaaagtaggtgatgccatgtgagtacataaaagtgagaccaaatcacagggtgagtccaagggaagatgagtttacctgcattctccactctattgctggataaatacaacgtggaatttatcctgatgttgactctgtggccctgtgatatctggagatgtcttctgaattggcagtgattaaatacttcttaagttactggttgagcatcccaaatccaaaatgcttcaggatccaaaactttttttttttttttttgaggcagagtctcactctgtcacccaggctggagtgcagtggcattatcttggctcactgcaacctctgcctcccgggttcaagtgattctcgtgcctcagccttccaagtagctgggattacaaatgtgaggcaccatgcccagccccaaatccaaaacttcttgaacgctgacatgatgctcagatttggttgatactcaaccagtaaatgtaatgcagatattccaaaaatccagaaaaatccagtatccaacacatttctagttcctatcatttcagatcagaggtgcttcacctgcactgcctttcccagtccacttttgtgaagattcagtcatgtcctggtttctgctcagactctcctccttgtagcctttttgtgtctcgcacagtaagagttcatctgcataaaggccataaatatctgggtggttgattaaacgtgccctgcagctcctgcgctcttctgtgttagtgaagagtacttttccttttcctttagagcagctcttgcttcctaatttttgcttcctggttttgccattttacattcctcttactcgacattacccagtttgggatcacctttctttcggccttctttctactgacagatgaaacatcagtgaatgttaaatgtaattctctgtatatctcaaattcaccataaaatgttctttactttttttcactgatatgtgaagaaacttaatctcttggttattttctctagtattttgccttttattgcctaatttgtaactaataattgatttatccctaaaggagactataattatcagttgtggtacagtttctattttattataagaagctcaaactttagcatgcaccagaatcacctagagagtttgtttaaagtgcaggttgcttgttaaagcaagcttgtgatttaggaggtttaaggtaggacctaataatttacatttttaacaagttcccagatgatgctctcactgctggtcggggtcacactttgagaaccactgtacagtctcatgctgctgtatttattataaggttagacatggccttttggcataaaggaaaaccatcattcagatgaagattcaacatgcttgaatatttcttgcaggtatagcctgtcatacatcccatatgcaagggatgcagttattaaatgctgttcttctctcctaagttgaaaatcagaaacttgtggaaaagagcacttgaatgttggtactctatgtttggtgaagtttgcttttccccataaaacactccaggaacaactgacgtgacagttgaagaccgttttgtactaagtctcattttgtatactggtaaaaactacatgcttgattaaaccattaaatgcttgtaactttaaattc

SEQ ID NO: 16261 - DNA, 2182 bp, Homo sapiens
tttcagaatactgtataaaattaaatagaatattgtaatagtttaaggttttgcatatattgggttaaatatttctgaaaagcaaaattatttcaagttttcaaatatcttgacatggaacactgcctttgctaggagtcatttctagaaattacttaaaataggagacaagcatcaatcatagggatttcagctttagaactattggaacaaatctaggttagacaaccagcttatattattaagcaagattacatataataatcatctttttttaaaggagagacttttgcaaatattatacagcaatcaaaaggtcttagcttagtgtatcatccttattagaaaccaagatgttgcattttatttcagtgctttctgtagtcatagctaactcttttacctcagcaatttcaatcaaaaagcttctctatcattctatacataaaatgcagacacattagcagtcaacattatgaatgcctttacaggtaaacaaacaaaatcactttattactggattttataaccaattcccattcttttttgtgactattcaggagaatactgggttgaccctaaccaaggatgcaaattggatgctatcaaggtattctgtaatatggaaactggggaaacatgcataagtgccaatcctttgaatgttccacggaaacactggtggacagattctagtgctgagaagaaacacgtttggtttggagagtccatggatggtggttttcaggtaggaaaggatatacctttttttaaataagtcacctctatatcctttgtattcttcctatatgttcatcacaaagcaaagttactaggttggtacaaacataattgcagtttttgctactgaaagtgatggcatgcaataaaaatattttcacacataaaatactcgtacataaaatatataaacagcccatattacaatatgcatacacatactacatgaatccctcgcgtgcagttacaactgaaatgtttgatctgttttatttgttccctattacagtttagctacggcaatcctgaacttcctgaagatgtccttgatgtgcagctggcattccttcgacttctctccagccgagcttcccagaacatcacatatcactgcaaaaatagcattgcatacatggatcaggccagtggaaatgtaaagaaggccctgaagctgatggggtcaaatgaaggtgaattcaaggctgaaggaaatagcaaattcacctacacagttctggaggatggttgcacggtaggaaacatttttctcaatataggtcataaagcagtcagcattttagtttaatcatgcaaattattttgaatagaataaataaaattaataggatgaaataaagatagcatttggtatgaattacatacattgcatctactgattcattgcagggaatgttaaatgcaacaaaatggatcttagcctccagatgaaaaccagttgaaataaaagcatttaaaatttaaatccataatgcaaactttatcagataattgggatagttactatatgttttgaataatacctgtcacattaactcagtttgaaatatctgttttttaaaattttaaaggttaacttcaaatctctcatttgttattgttatttgtgaacaaagggaaaactcacttctaatattagcgaatttcattgtgagagacctatcctctttttaataaaccatttataaacctgttagcaatggccggaaccaggcctcctgaggatgcactggtctatagcaattgccctgctgcatttactaagaatccttacaaggcatttgtttaagaatattgtttatcaactaagaagattacagctttgaagtagagcaggtctcatatacatgaataataacatggcacgatgaatgcttctttagagtaaaaaggttttctttaacttgttaagtcagagttgtctaagtaattgtaatgtcatgatcatgtacattttgtccttttttacagaaacacactggggaatggagcaaaacagtctttgaatatcgaacacgcaaggctgtgagactacctattgtagatattgcaccctatgacattggtggtcctgatcaagaatttggtgtggacgttggccctgtttgctttttataaaccaaactctatctgaaatcccaac

SEQ ID NO: 16262 - DNA, 1460 bp, Homo sapiens
  CDS (25)..(384)
gaggatggcaggaggagtgcttgcatgttgagcagtcctgagagtagcttgacaccacctctctcaaccaacctgcatctagaaagtgaattggatgcattggcaagcctggaaaaccatgtgaaaactgaacctgcagatatgaatgaaagctgcaaacagtcagggctcagcagccttgttaatggaaagtccccaattcgaagcctcatgcacaggtcggcaaggattggaggagatggcaacaataaagatgatgacccaaatgaagactggtgtgctgtctgccaaaacggaggagatctcttgtgctgcgaaaaatgtccaaaggtctttcatctaacttgtcatgttccaacactacttagctttccaaggtaccagtgaaataattgatttttggtgttgattttcataagctaaaaataaataacagaagaatgttcagggcagatggccttctaaccagtgcatagtatttctataaaacagggagcctgttattcttttggtattagcttccagagaaactaacaataaaatatctaagatctaagtagtacattaatgttaaagagtagatttcatctcctggcctttagtttatattcagtataaggaaaatagataaaactctaaattaatagggggctaaggttacaaaacctgcagtctggttctaattctgtagtaagcttgagcaattcactaattatcagggatcagtttttgcatctacaagtggtaggttttggtttagcagagctgtagttcttcccttccatttattattttatgttcatgcaacctcttgtctcttgatttcagagaccataaaatagtagagtcatacttgtttttttcagtcttctccttcctctcttgtcccccaatttctttttggtgaaagtaagtcagtattcttggggtaaacccagcttttttcttgctataaattgaaaaaaaaaaaaaaaaagatatatcttctcaaattcctgagaagcagtaactttaattgaataatagtgccctctttgaaagtgttaaccttttggattagaaaactagtagatatttaaacagtgccagaatatttttctgaagaattgtaatttcttacctaagtctttggagatagagttatttgctagagatgtaataagggccttctttttctttactcttatttagaaaagaaaagcattggcactttgatcttgaaattaagaattttcttttctttgggtagtaatatttactggaatgtcagaattttgccactgaatgccttctttcaatagcaaatgctttgaaagggttgtaaaatgttggcgtaaattagccaggtgtggtagctcacacctgtaatcccagcactttgggaggctgaggcaggcggagcacttgaggtcaggagtttgagaccagcctggccaacatggcaaaaccccatctctact

SEQ ID NO: 16263 - protein, 120 aa, Homo sapiens [sequence omitted]

SEQ ID NO: 16264 - DNA, 1713 bp, Homo sapiens
ttccaggtggcatttgttagctggtagacaaggactttgccgtgaatttgttagtagcaaggaatgatttcttccagcttccttgaaatgaataattagtaaacttctaagcaaagtcaatgactaggagtttcacatgtttgtgaggtcctaactaattctcttacccagatgccacctccatgaatgatggtgctttaggcttctggaatatgtaaaaacagcaaagggaaccaagtctagactgcatactggtaaaccagggaagactcagaactgcatatgcatcctcatgcattcctttgtaaagaccaccagtactaaaataactggacactcattgtacctcccagcgataagtatgtgtaacaggccagtgtgttgtccccatgatcatgaattaggcttgggatgcttccaaatatattcaaggtgttggaacaggataggcagctgtgactccctcaagagtccttagaattctaaataaaatgcagagccatcctaagacacaggggtatggacaaggcctggtgacaccaaaggtgcttgtatccaattgaaaaggtgcctgtctcaatttcataccacctttattgcagttaaaaaaaaatcacactctggggacacttggtggaattacagagccaccatcatcattccaaccactatttcattttctgtagttttacctgtgtgcaattactccccctccattctgttccacttcttactccttagtaccaaatcctctgtttgggattgagcgctgctcctggttaatcattcctactacaaaaaaaaataactcccagggctagttaaattgtaaaccaaggctcagcagtctcacaacacatggaccagaggtgacacacagccatttcctttgccatgtggcccagttgctgctgccatgcctccatttccacactggatgcctacggcagtgagatttcactgccggggtaagagttcagcctggatgattttatagctctgttcctagcacttctcatcatccttccagcccagaatcagcggtcattctgcatattcccaccaaccctctacccccaaacacttcagtgtacctcattttaagagttgctgatccctgattctaggacgtttttacccatagttcttgtctttccaaaatctgaaactcttttttttgctcagaactgggtagccaagggttattttatttttatctttaaaataatcaaggcagtcgctagagtttctccttgtgaatagatcactctagcattttaatgaaaaagaaaaaaatctttctggggtatgttgtatcatagtaatggctcagtaaccacatattttgtcctttccatgtcactgattccttcatatgagactatttggcttgactaccctgtatattgtgtagaaatcaaagttcttatctgtacatttctggtccaatacctgtcttattagttgtccttccccactaaagtttgcaaaacagaaaatgttactatttctggtatttaatgacaatgaaaggtttggtcatatttcatagtgcagtagcgataaggagggtgtctcaagtttgcttttgtgtttcttctaggctttgttcttgattttagacagatgagccagtgttaaggtgctacttcagagaataaattagagaaatcagatttgtaattatgcatgtaataaagcacagccttatcc

SEQ ID NO: 16265 - DNA, 2093 bp, Homo sapiens
ctgttggttgattgaaaattctctttcattgtcaactgaacgctggactgccagacagtcccaaatggcctccctgaaatgcctgactgttggtgccacttgccatctgggagatcagctggagcttttgagcaggacttcatttgtccttcctcttggcttctcctcatcactacttggccttcctcacagactgatggctaccatccaacaaaggacgttccaatgggtgctgaaaagctgtgtaactcttaagacccagacctcaaagttacacagtgttacatttttccaataaaacaattaaataaaaaaattaattttatggatacataatagttgtgccttttatgcgatacatgtgataaattctatttagatattttacccatttttaatcagatctatttgctattgagttgtttgagttccttatatattttgattatgaatcttttgtcaggtgaagagtttgcaaatattttctcccattttatagattgtttcctcactttgttaattgtcactcttacaagattcaatttgttgagtttgtgagatgagattatagtcaaataggtaaatctacctcctgttaactactcaataatataatttatttattcaaaaaatgttaattgctgtgttgaagatatagatgtttccagagaagcagacattttctatgaaagggatttaatacaagaaaatactatacattaaagattagttttttatctattcaaacattcactagtttttgccttgtttcacaagaggttaatgtatttattgtggtttatgataaagcactctaaaacaataccataaaatgaagcaagccatcattctagaaagaaggaagagttatgtagagaaatgaaaacactgtattagtgtctcaagcctcaaactgtaccaatgctgtgagaaattcaggaacaaaaagtaatttagtatgaagttatcaacatgatatttctcagaattgtgtggtatgtagcacatgtattttaaagaatgttatgatattctgtgatcatgccaagtacatgagtgggtcattttcttttctcatgagtactttaccttcaatgttgctgaaaacaagctatattctgaaacctaacctactgatcaaactatacatttgcacattagaaaagggcttgcttcgattacatttttaaaaatgtaagcacagttttgtatgcctttgcctagatatttttccattgtcttgagatttgctgaaataagggaatatggcagtaggaagaaaagaacttttgatttgagttctaattttttatcatctttaatatatacagctactgtatatatttaatagtttcctctgtaaataggtagttaaatctgtctctttaccgacttaccattttgtagtccataaataatctcagcattttatacaactgaaaacctatttggtatgagaatgaaataagtaatgttaaagcagaattacatagtttacaataactaatttgttatcatgcttacccaattaccaaaaccttgttgcatgcttgtcgtgtgcgttgtcaaaaattaaaataaagtcttatttctcttaaaatatgaattttgtgaatgtgcctatgactgatggccacacatccttcgtaggacagctgctcatcaattagaccctttcctatcttagggcctttacactttctgaaacttctactgaaaagcctttctgcagacactttcagaactcagcttcttcattccttactcagttcttttctgaaatgttttcttctttgtgaccgttcctttagtccttcaatgtttcttatcctcttccttcgttttttttcctgcacaatatttatcaccatcagacagatcttgtattaatttatcagtctgctgcctgtctccctgtcccataggatgtaatctctgttaccacaggaaataatttttgtttaatattgttcacagccagccttggtggcttatgcctataatcccagcaatttgggaagctgaggtgggaggattgcttgatcccaggagtttgagaccagcctgggcaacatggtgagaccaccatctct

SEQ ID NO: 16266 - DNA, 1632 bp, Homo sapiens
gagcactggatttggagtcaagaaacctggacacttggctccacacttccttagctgggtaactttgggcaaaccgcttggtctctcaagcctaaggttcttcagctataaaatgggaataatacttcactaactacctcacagagttgtggtaagaatataatcagataactggataaaaacactatataaactggaaagcgccgtacaaatgtgagagatcagttttattatcaaatcactgttttccactgcctcttgaatcggctttattctaaccaaccattacatctttctcatcttttggagtatgggtaattgaggcttgggtgtgtcatcagggactggagttatttcagctcccatgtagaggtgggagaggtggttgatggggcagtggaagttagataccagcgatgtatatggtaggacattttcctgggtcactttgacagtaccttgggaaattgtcaatccttgcagagggcctaggctgggcacaagggagaaagcgaacagttgactaagaattgaggggagggtctggagcgctactgccctcctgtcattgctgtgggtgggagaggctaagactacaggtttgactggaggcctaggagagaagagtgtccttagggtttcaagaattttaatgcctagcagctgagtaacaggcattagttctgatagatagtgaaggggagaaagtgccacctgttgtgagatcacctctccagggcagcagctgccttgttatcaccagcaaccttagccctggtcagtaatatttctgctaagaaaggttttgaagcatggcctccaatgactttcataagcccttggaggcaggactgtgtctcatccatctttgtatcttcagtaccatcttgtaaggtgccttgtacatagtaggtgcttaatgaacaaatgttgcttgaatttagctgtcgtccagccccacagagttatgctccatttgccaccatgtgatatttttgagaaacaatagtgatttggatgccagctctatgtgactttgggcaagactctccatctatcttgtcttcatttcatctgtaaaatgaagtgagtagattcaatgctccctaaggtcccttccagctccaatacttgacaagcttgtgattctaaatcgtttccgttgcctctgaacatgggtgagtaatgcctccactgcagctgtttctctccaggaggctttgttcggaggaggtctgactattgcacagccagttttttcttcctcttcagcagttctttactgtcttcagaatagttctggataagcggccttttctgaaaggatatttaaaaatatatactatttaggctgggcccagtggctcatgcctgtaatcccagcactttgggaggtgaaggtgggtggatcacctgaggtcaggagttcaagaccagcctggccaacatggtgaaaccccgtctctactaaaaatacagaaattagctgggccctgtggcaagagcctgttatcccagctactggggaggctgaggcaggaaaatcgcttgaacccaggaggtggaggttgtagtgagccgagatcacaccactgcactccagcctgggtgacaagaacgaaactccatctc

SEQ ID NO: 16267 - DNA, 1816 bp, Homo sapiens
gtctctgattctctgacaccacctaggtgtcccctaatttggttcagttctgacactagcttttcagggttcgtgccggcctcacaagttttgagggctaagtcccacaagaccatccccatttccgtcaccagttgcatgtcctaagccacctgtacttctgatcaactggctgtaaattggggttcccatgacctcacttcaggttccataatttgccaggacaactcacagaactcagaaaggcactttgcttattgttagtggttcctataaagctaggttgtccaacccgcggtccaggatggctttgaatacggcccaacacaaatacttaaactttcttaaaacatgatgagttttttttgaaattttctttttctcatcagctgcagttaatgttagtgtattttatgtatggcccaagatgattcttacagtgtgtgtggcccagggaagccaaaagattggacacccctgttttaaaggatgcaacttaggaacagcccaaaggaagtgacacacgggacgaggggtgggagtccccatgccccctgggggagacacctcctagtgcaccatcccaatgagttcatgacgtggaggctccccacatcccatttttcaagagtttttgcagcccagtctcctggccccccacccctcccagaggttggggtgtagggggtgcagaaagttcccactctctaatcacacgttttgtccttctggcaatgaccagctcccctccaggctatctaggggcaccccccaaccccactggtcacctcattagcataagctcaggtgtggtgcactggggctctctatgaatcactaagggcactcttgttgctcagtaaataccaagggctttaggagctctatgccagaaaccagggaccaagaccagagatcttttttattatccacctgggcagccctgtcagcctgctgccccgccccacccctcccctccccatccccagctggctgcgccctatttaaagccctcctctcagtaaaacagctgatgcgtgcctattttacattcttttctaccctgggtctgacgaatcatgactctcactgtgctggtaactcccccgttcttgcttctcaggaagcaaatgtaggaaaaatatagtaacatttctaaggaagcttagagatacaaaatgtttaaatgtagcacaaaaattgtgactctacttataataacgtacagaagaataactccacagtagaagttaggcatccatggctgcaggttttctaagaaatgggacgtgtgggtgacctactgcactgcccactgccctctggagggaaccatggggtaattagagtcattggccaagaagggccaggggtccacgcagcttccgccctgaggagttgcactgtgcagtacagccaggcggccacaggagccactgtggcagggaatgcatgtgtcagtgtgtcaggcgtggtcagtaaaaggagttgtagaaggtaaaccggaggaaaactcagattttaatccctcggagtaatctttggcctctcctccttccgtgtgtgatgtttctttgtttttaattttttgaccttctgctttttgattcgggattttggagccagaatgccttggccccgccatgaggtctgacttgtgctggctactttacccttggtgcctccatttccttcactggaaaatgggtgattgtgcagagtacagtgagtcaaaccattgagagtggtgcctggcacacagcattatttaagtatttttgcacttaatttcatgtaacataaagcactaataagt

SEQ ID NO: 16268 - DNA, 1476 bp, Homo sapiens
tagaagatggagagtgttaaattatatttgtgataggaagcttagacatatcttttggttattagcttccattgccaattgtatttcagatgcatagggttttcttcccaaaaatatattgttaacttttatagctaactagcacctggaaaaaatgtatttgtacaactttactattgtatatagttttataataatgaaaaataaacccaatggccatattagaatgcaatttcgacatacagcttatctagatagttttccagaggattttgaaatttggcttaactgggaggataactgctcagcacaccactgaaacataaccactgacaccattcatttattttaactgagattcttgacatttttctctcctatgccttgttactttagcatacttgaactcacataaatgcttctttggattacatgggctatctgattccattttggatctgattgtccatcttgaattcaatatggtattcatctggactattcaaaaattatgccatttctagtctgtgaaataagatgtaaaaaatctttatttttgccctttggtaaaaacctatgtgacaacttttaaaatgtgaagcaacatctaatatagttgactggtatactaataggaaagtgaaagtatttcatgggtactttgtcacagaatgtgaaaagaaacttggcatagtggcctttataatgaggcatccacttactcctctgaagtgaagtctgtagcttagcttgtgtatagtttttgaaagaaatctcatgatcttcgttcattctcttgccttctcttttatctcatatggcacaagtagagggggaagccaggaggaaattcatcaccttgctatgcttttatttgatttttaattcctgagtgcctaaatgtggtgaccggcacctcacataactttttgagattcttgatgtcatttttatccttcctgtcaaccagcaatgtatttttatgttactaaaaccagtaacgtcataattgttgagggcaagcttcattgttgatagtgcaaagtgtcgctgttgtgatgtgtgtttattttattcaagtttgaatattgacaagtgtaacttaagctggtgactgacacctattgatctgctgtgtgcaaatgatagtgctattttttagaaaactcttaagtaaattttaaaaatatttgaatacaaaatatctgagcaattttgaactcaaaagtttttcattgttttaaggattgccacaggactctttaatggtttttaatggacatacatgcctaatatttattggtgtgtttaaaatattttttgatagagtgttatgtcttaagcgcattagaaaacaattgtttgtaatggaatcaaagtgtttccctggacagtttgatgtgcttatggttgagatttataatctgcttgtactttgctttttaacttattaactgtaaataaattttagagaat

SEQ ID NO: 16269 - DNA, 1866 bp, Homo sapiens
aaagtcctaaaaaactctttgcagtctaaacctcccaagttttttttttttggaaccaaggcaactttacccactagagataacctagaaaatttctatctttagttcaactgaactctcagtgttatttcatagaaaccaccccagtctatttatattattcaacacataattttggttagagaatttttttttttttttaaattagggatgggggtcttgctgtgctgctcaggctggtctcaaactcctgggctaagtgattccctgactgtacctggccaagagaagtttttgtgctgtggcttaccttagcatatttctctgcttcttctcttatatcttttggaacaatttcatgtcttccattagttactgtaaattaagccacatgtgtaaatgaattttaaattgagtaccatattgtaacttgcagtataccataggatctacccaatccacatatctgactcacctaaggttgcaaagttgtactatgagtaatactcgaatatttttgtgtgctgcttctacatgagattatatgtgcctacatattaagttcttatggaaatgaaagtaaattatgctatttataaatcctgagcattaatttatagcatagtatcttaaaaccatgaaatggatgtttcaaaaaataacgtgttcacaacttaagtcaattattaagcagaactttcccttcattagacaacctagtaaatttgctttagctttcattatattagaaaggacactcagttgtaaattagctgtggtacagatcattcctaaggcaaataaatgtacaaaaataacttacattcaccaacccagctgagttctagttcaaaagctttatccttaacttcgtcatgtactatgtaaattctagaatagaaaagggaaaggtaagattttggtaacctccaaacattgaagtagttcacagacccaaagtcagtacaaattagaatgtccatccataataaaagtatctataaaattacacagacacattctacatagtatttaacattagagaagacaaattacacagggactgaaataaaatgaaacatctactctcccgacaaatgttgaatatacctaatcaacccaagttcagtttatttttgcacattgctttagagatataacttggctgggcacagtggctcacacctgtaatcccaacactttgggagaccaaggcggatggatcacttgaggtcagttcgagactagcctggccaacatggtgaaaccctgtctctactaagaaacaaaaatcagccaggtgtggtggtgggcgcctgtaatctcagctactcaggaggctaaggcaggagaattccttgaacccgggaggcaggggttgcagtgagccaagatcacactactgcactccatcctgggctacagtagagcgagactccatctcagaaaaaaaaaaagatacaactataaaagatacctcataaagaacacggattcactaggaagaggcgtcattaactgtgcccttttagaatattttgtccattaacttaaatatatttaaaaccaactaattggctggacatggtggctcgtgcctgtaatcctagcactttggggaggcagaggcgggtggatcatgaggtcaggagttcgagaccatcctggccaacatggtgaacccacgtctctactaaaaatacaaaaattagccaggtgaggtggccataggcctgtagtcccaactactcgggaaactgaggcaggagacttgcttgaacccaggaggtaggggctgcagtgagctgagatcacgacactgcactccagcctgggcaacagagtgagactctgtttcaaaaaaat

SEQ ID NO: 16270 - DNA, 1824 bp, Homo sapiens
  CDS (334)..(1482)
agtggtagcggttattcggcggcccgcggcggaccatggccctggcccggcgtcgctgggctttcctcacggcgtccccgagcagcgtcgcagagcgggccgacttccgggaaggaactgaccagcgactgagcggcggccggcgcgcttagcgccctgaacatgcggcagtccctgcgggcgaccccgggctccggacaggcggcggcggaggcggcggctcgggagggaaggaggcggcggcgccggcggaggtggcggcggagacggccggcgcccggcgcggagccctagggaggcagttcagcgcggcctcgggcctcgtcgagaaggatgctgtcccgaaagaaaaccaaaaacgaagtgtccaagccggccgaggtgcaggggaagtacgtgaagaaggagacgtcgcctctgcttcggaatcttatgccttcattcatccggcatggtccaacaattccaagacgaactgatatctgtcttccagattcaagccctaatgccttttcaacttctggagatgtagtttcaagaaaccagagtttccttagaactccaattcaaagaacacctcatgaaataatgagaagagaaagcaacagattatctgcaccttcttatcttgccagaagtctagcagatgtccctagagagtatggttcttctcagtcatttgtaacggaagttagttttgctgttgaaaatggagactctggttcccgatattattattcagacaatttttttgatggtcagagaaagcggccacttggagatcgtgcacatgaagactacagatattatgaatacaaccatgatctcttccaaagaatgccacagaatcaggggaggcatgcttcaggtattgggagagttgctgctacatctttaggaaatttgactaaccatggttctgaagatttaccccttcctcctggctggtctgtggactggacaatgagagggagaaaatattatatagatcataacacaaatacaactcactggagccatcctcttgagcgagaaggacttcctcctggatgggaacgagttgagtcatccgaatttggaacctattatgtagatcacacaaataagaaggcccaatacaggcatccctgtgctcctagtgtacctcggtatgatcaaccacctcctgtcacataccagccacagcaaactgaaagaaatcagtcttttctggtacctgcaaatccatatcatactgcagaaattcctgactggcttcaggtttacgcacgagcccctgtgaaatatgaccacattctgaagtgggaactcttccagctggctgacctggatacataccagggaatgctaaagttgctcttcatgaaagaattggagcagattgttaaaatgtatgaagcatacagacaagcccttcttacagagttggaaaaccgaaagcagagacagcagtggtatgcccaacaacatggaaaaaatttttgagctgattttttaaaaatttaagttttgtaagagctttaaaatattttcacagataaaaaattgcaaacaagtactctggttaataaatgctgcttcctttgtggaaattataaaattctaactttacatgtattttgttattagaaattttcttttattgaatgagaaaaattagtctatcattttaagagccaatatggcaaacactttcaaatactgtatattaggaaactgttttggtattcttgatggaaaaaaatgcagcggaaatgtcattatgaacagatgttaaataggaaattattacttgttaacttcttacagcagtagtaccttctt

SEQ ID NO: 16271 - protein, 383 aa, Homo sapiens [sequence omitted]

SEQ ID NO: 16272 - DNA, 1500 bp, Homo sapiens
accgttacccggggcaacagctgagccgtctgggaagggatgcatcttttcttctgtatgcttgagtcaagaactctaagtcatcttggtaataccgggttggatgcttaaagctgcagcaaaaagaccagaactttcagggcttctcaaatttaataactatggaatcttatcagaaagtccattaacatctcaaagaacaacgtggttattgtatcaatcaccatcctttataccaggatttgcatatccttcaagatgcctgaagacaatcggaggggtatacaagcaagcgaggttaagaacaatcacttttcagatcctaaacttttatatgtagtgtctgctgataatgcattccctgagaaaatggacctgtggataaaccatcatgcttcatctcatttcctgtctcctctttcaccatttttctttcttttcttttcttttttttttttttttcttgagacaagctcttgctctgtcacctaggctggagtgcagtggcgtgatcatatctcactgcaacctaaaactcaggctcaagcagtaccctcacctcagcctcccgagtggctgggactaacaggcgcactccatcatgcccgaataatttttgttaattttttgtagagatggggtcttgctttgttgtctaggctggtcttgaactgggctcaagcgatcctcccactttggccttccagagtgctgggattccagatgcgagccaccgcaccagtcccccaattatttttctaaggatgtatgaaggaaaggcatctctctagcctggtagaatcttactatgacaaaaatgctccagaaaataaacatctcttaggagctacacacagagacaaggaaacactggtaactcaagaaagactaagggcttcgctaattattaagtaagtagtgcttctgcaagtcaagagactgttctcagctttcaacaatactgaaggaatacctaattgagtagtctgctggtcatttaaaattatttcttgatgataggtcactacgtgattgttagcatataacgtaagttcaaagattgaaaaaaattttcccattttcatctcagtgtttacatctacaaaaatgaagaatagggctgggcacagtggctcacgcctgtaatcccagcactttgggaggccaacgggggcggatcacttgaggtcagaagttcgagaccagcctggccaacatggtgaaaccctgtctctactgaaaatacaaagattggccgggcatggtggcatgcgcctgtggtcccggctactcgggagtctcaggcaggagaattgcttgaatccaggtggcggaggttgcagtgagccgagatcgtgccactgcaccccagcctgggcaacagagcaagactccatctcaaaaaaaaaggaagaagaatagaattgtagcaataagtaaatttcagccatgtatatacgtgaactaattgagaaaataaagctgtcttcttattaacag

SEQ ID NO: 16273 - DNA, 1773 bp, Homo sapiens
taattatatggcagggttttggttagccaaaaaaaacttctttttaaataatccagtgaaggattttttaagcttttaaaatgttaaattctgatagtcttaaattgaagtcaaagcatttctttttttctttttcccttagacttctttatgatctaagacacttatgaaggtaccaggtgccctaattgaccttaaaaggttagaaatgaatctttgccttgatgcaaagcatcagacttgatgcaaatcaacatataaataactgcaagcaaatatagagtcaactctggactatttaattttggtttatctgtggctaatcttgttttcaaatgcatggacagaacctattcaactacaatgagtatgggctcaatcctaccttgttggtatctcaaatccccctgtttacttttaggcagtaactgcctttgaaaacagaacatttcccttttccagagcagaccttacctcagtctctgaaatgggttgactttcagggaagactcaacaggcttccaggtgtgaaaacaggaaggtcatcttaaattagattttaatattatggcctcattgcttcatcattttgctagaaggaaattccctgaatatcagatacacccctattcaaataaaatcacaaaaccatctactaaagctaaacagtttttcaaaaccattctgaattatgcagtaatatttccttctgtaagaatatgctctgttctgtaaaccgagtattgagagaatagagaataaaaccacttcgcagatagcatgaagaggaaatgaggtaatgaaagtattttggaagttagagaagtcattaatgcaaaatatttttacctcaaatttcagttttgaagcacaaataattttacatgttgtatcagtgagaacagaaaatagaaaacaaaagatgtgggttgagtgaagtttccctgaataaaaggaatgcgttgttcattttaattattgtatagattagaataaggagcgagaaaaaaaaagctattcattattgtgattctagagtagctaataggtctactaactatccaatgaactcagtaaatataaagacaaaattgcaacatagtatggcatttttagctattcctgcccctgacccctccccgatatggaattttgtatattctccatggaggtaaaagtataaaatcatgctttttttggtgtacaaggatgttcattatagcatttttttttgttacagaaaaattttctacagcttaaatgtctgacagtccctagagttgaaaagatttccatgatataatattaaagcaattttccaaaagcatgtcttaaaaaataatacatatacatttatattcacaaaaatgcctagaaagaaacatcaaattgttaatggttctgcttcagtggcgtgggattgaaaaactgtcttgtatttgatcattttataatttatgtgtataatttttgtaataaaacaaaaaaaattaagatctggttttaaaactcaaatccattaagacgtttgagcactttaaaaagaagcttcatatggtttttagggatctgaatagtatgttttttgccttgctaataattcaaatcatagtattggcagaataattcttcatttctctctgttattatttattttcaattctgtaaattctcattcatctttatacctaatttacacatttgtccaaaaagtatacacatttattttaaaacttttttggtaggatcactaatgactgagttttagaagtt

SEQ ID NO: 16274 - DNA, 1878 bp, Homo sapiens
ttaaaagaaactatttaatgtaaaatattctacatgtcattcagatattatgtatatcttctagcctttattctgtacttttaatgtacatatttctgtcttgcgtgatttgtatatttcactggtttaaaaaacaaacatcgaaaggcttatgccaaatggaagatagaatataaaataaaacgttacttgtatattggtaagtggtttcaattgtccttcagataattcatgtggagatttttggagaaaccatgacggatagtttaggatgactacatgtcaaagtaataaaagagtggtgaattttaccaaaaccaagctatttggaagcttcaaaaggtttctatatgtaatggaacaaaaggggaattctcttttcctatatatgttccttacaaaaaaaaaaaaaaagaaatcaagcagatggcttaaagctggttataggattgctcacattcttttagcattatgcatgtaacttaattgttttagagcgtgttgctgttgtaacatcccagagaagaatgaaaactggttggaaactaaaggttcattgtgttaagtgcaattaatacaagttattgtgcttttcaaaaatgtacacggaaatctggacagtgctgcacagattgatacattagcctttgctttttctctttccggataaccttgtaacatattgaaaccttttaaggatgccaagaatgcattattccacaaaaaaacagcagaccaacatatagagtgtttaaaatagcatttctgggcaaattcaaactcttgtggttctaggactcacatctgtttcagtttttcctcagttgtatattgaccagtgttctttattgcaaaaacatatacccgatttagcagtgtcagcgtattttttcttctcatcctggagcgtattcaagatcttcccaatacaagaaaattaataaaaaatttatatataggcagcagcaaaagagccatgttcaaaatagtcattatgggctcaaatagaaagaagacttttaagttttaatccagtttatctgttgagttctgtgagctactgacatcctgagactggcactgtgtaagttttagttgcctaccctagctcttttctcgtacaattttgccaataccaagtttcaatttgtttttacaaaacattattcaagccactagaattatcaaatatgacgctatagcagagtaaatactctgattaagagaccggtactagctaactccaagagatcgttagcagcatcagtccacaaacacttagtggcccacaatatatagagagatagaaaaggtagttataacttgaagcatgtatttaatgcaaataggcacgaaggcacaggtctaaaatactacattgtcactgtaagctatacttttaaaatatttattttttttaaagtattttctagtcttttctctctctgtggaatggtgaaagagagatgccgtgttttgaaagtaagatgatgaaatgaatttttaattcaagaaacattcagaaacataggaattaaaacttagagaaatgatctaatttccctgttcacacaaactttacactttaatctgatgattggatattttattttagtgaaacatcatcttgttagctaactttaaaaaatggatgtagaatgattaaaggttggtatgatttttttttaatgtatcagtttgaacctagaatattgaactaaaatgctgtctcagtattttaaaagcaaaaaaggaatggaggaaaattgcatcttagaccatttttatatgcagtgtacaatttgctgggctagaaatgagataaagattatttatttttgttcatgtcttgtacttttctattaaaatcattttatg

SEQ ID NO: 16275 - DNA, 1742 bp, Homo sapiens
gtaagattcttgttgggagcttaagaatagattcctgagctaggcctttggagactctggcatgctgtgtctaggagggagtctgtaaaacaatttttaatgaagaaatttaaaaattacacaaaactagaatagtgcattggtactcaacatccagatctgacacttatcactatcttaccatgtttgcttcatttgtcatttttttgtttgcttaagtatcttaaaatcccatacattgtgttatttcactgctgtgaacactttgggtagataccacgatatcacacctaacagaggcagcagcagtccttcggcttcatctcatagccagtccttaagcaaatttccctgattatctcaaaaatcatcttctagttggtttgttagaatcaacagaatataagtcacatgatgatctcgtttttaacaatcacctcagatgactttgatgttagctactttgagaaccactggaaattattttgccaacttgaaagttcaagttaggataccacaattcttggcacgtttggtggattataaatgtgattttgaaatattagaggaagcatttggggttaatgacaggatatgaatttatattagtaagtttgataagataaaatttcctcagtgaacggagaatctcagccccatgggctctaattgattgggacttgtgtagagcgtggtcacagtttaatccaactggactgtatgctgtggtctcactcatgttgtggcttatttacactgtcacacacactacattgtggatcagttggaaggttcttcatctggtttatttagacctgacctaattgatcattttaccataaattgaattatagtgaaaactgtcttttgggtactgtttctacctaaaattaaaggtatcacaaaatatgtataataatttttaaatgaattttctgaatttatctttagacaaggtaattcttttgaattctaaagaaatgcagttcttggagttgatgagaggttaaattatagatggacaacttagagaacgtattccatcttcatataaatggtctttcataaaacatagtgtatctatgcagtttatataaactacatgatttattatttgagtctatgtattctgacctcagaactatctctgggctacagtattaccaaagtgggatgcctttaaaatgcagtcaaacttcatttgtatgaagtagaaaagaacttgggaaacctttaaaaatatatattgtgatttatgctttaagaaaatgcatacttttttctaatgaagagtagttcataatatataaggggtttaaggccctgaaataacattagtgcttactcattgctctctcatcttgcctccagtcagatgttattggtatagtgaaaagaagaccagattttgaactagatctggattctctttttagtaactcaggcatgttatttaaccttctctgtgccttaggtttttaagtacaatcagtgtacccttcaaacctcacaagatgaaactcagaagagataatggatttggaagcattttgcgtggcttatattatgccacgccagtgttactgttgaagttctgttttgttcgttgttttctgtacagagcgttcagtttactcaggctgaatgttttctgacatatatctccagtatgaatttgtttatgtaaggaagagtttttcaggaagagaaagtagagaagaaaagaatgatgtaactaaatc

SEQ ID NO: 16276 - DNA, 2463 bp, Homo sapiens
ggaaagatgaccgatggagtccaaagccaagtggcttcaccagctgacaagccaccctcctgcagcctgagtttcacagtccactgggttcgttgtcatgcggtgtttgaatggttaagcccttgcagtatttcagatcgggcaaaaaatatcggatgcacatagcagaaccattggtggtatttatagctttgctttgtactcctcactgtttctgcctacgcaaaatatccatgtttcctctgagaaatctgttgtggactgaaagcgctgctggctgtgaaatttaataaagtgtgtatgctttgctagaaaattatttcttggacaataggaacagtcattgatctgtaaatcctggctcttaacagtgagtggccaaggacttgatcagcccatttcttggtccctcagtgctttaaaatttaagtagcactgcattttgtaatgttgaatatgactctagtgacttgtaggaggcacttgtgaggagatgcttgcttcagtgtaaaagatgctcatggcctgagtcagttgagttttctttcaagaaaccacttcagagtgaaatatccagggtttccccgccctggacatgtccagcctgcccaggcagcacacagccctgtaagtccacctcgtgtgggtgagatttcctcctgcgtgatgacctcatcgccatctctgctgtctcattccacagcctccctccctcttctctcctcctctgccctcgcccttcccccttccccatcccctccccctcctcctctgccctcgcccttacccctcccccttccccttctgctcctcctccctcctccacctctttctcctcctccttccctcctcctccctcctcttcccttctctgccatctttctccccgtgcctattgatcccacataggctcattctgggtacaccggctaaaggctttggtgcattgcagcgttttctcccagcagctgtgtgaaagatgcattttctaagctaaggagaattttctcaagagtggcatactcatgccaaatattattgctctgggccatataggctggtcttcctccacactaaaatgggtgtcttgttttggtacttaaaacagtctactccaggcatccagtccttacagaccaaggaagagcatagcgatgcctgttggaattgcagatgcattctggccttctcccccgtcctgaaacattttctttgaggaaggctcttagaacattagatagtctgctgaggttgttggcccagctccatacacccagtagaacagtggaacaactcatgcttcatgctgccaagctgctgtacttcaaaggaaacagatctagcacactgctgcacccctgcttccacactccacacttcaccccgctgcttttctctgacccgcccctggccttgtaagactcacgtaagctaagtccaggatgcctgtggcctgcggcttgattcttccctttaggattcagcaagttaatggcttcctcgctatagaagtgagactttgacttgatgcctcttggtatatcaaaaagatattcatccagaaagtaccaaatgttctgaaagacccgctcttcactccagttttccctagggtgtttctggcagggcgtttttaaaaggcatctacctgagttgacgctaatacttgtcaccacctggaacgtagttatcggtcggcaggctgaacatactccagattccccagaggccacttctgtagcccagcgatgcatctgagcctctctgcgtggtttatgcttgaaaaatagataatgcttttagatggttcactgccaggccatgggccccacacatctcaggccctgtgtgagggagcacactgagatggtgcaggagtgaatgggcatggcttggcctcgctacctcggggacctgttggagttctggcagcagggtgtctgcaggtgggacggcgttctgggcagagtcagaatggtcagaatgaaacagaacagccaactcacccacaggacagcttattttgaggcaaggttttggattttggaggaagcagccagatgaggcggtgagcctccagaaggtcagcctttggagcacgtaagatactgttacagggtccagaaatcgtgttcacatgggggctttgactcttcaaacagcttttgcagatcgtaaattgcatttgcctagtcgtgtgacctcaaaagaagtcagacatatttaatccagaaatagtttcgtttgagggagggcttgcaggtctgtaaatagcatttgctttcctggttagagattgggatgcagaaggagttttcagtatttttttttaaaacactaatgatcattgaagagtatttatgtaaacatacaacgtataatgggtgggggatccgatcatggtgatgtacggggtgaattctcttgccgtgttgcaaatgtgtaaaataaagattatctggc

SEQ ID NO: 16277 - DNA, 1216 bp, Homo sapiens
ttttttttgcgagtggcgggccgactgtgtagtccgctccggcagcgcgctctgcccggcttcctcagtctcctcgccgggagcgtccgggagcagctccgaggccgcggcgaaaccaggtggagtccgaggttcggaggagtatcagaggttaggggaaggccggagaatgggctgggaggctgcgtttcggagcttagggttctgtccctgcgatcgccgcgtctccctcccttggtgggcgcggctcccgggaagcggctcgtctcgtctcccctcacaggccgggttcccgttctggaccttcgccctcggaacacagtgctgttggccgggactccttcccgaggtggacggctccctgttctcattcctggctctgccagaactgtaggaagtgctcagtacactttagggcatgcatggcactccctgggagacagtgctttagggccagaggaaagatcttccctgaaggcaaacgcccgcggagcccacaagtccgggccgcactgaacaagtcaggatgttgccatcggcaattctgcagaaggcagtaacccatctgagagaaagagccgctgtcataaggtctcttgcttgagctgctgggttgagaatggagctggaagagggaactgatctcggagctccttggggatcttggttatgtttgacccttttactttcagggagcagggatgggccaccgagagccccagggagttgacgtggaggaggcttggaagtgccggacgtgtacctatgcagacatttgtgagtggagaaagggcagtggagtgctcagctctacactggcgccccaagtcaaaaaagccaaatgaatagaaggtatgctttcaagaatgttgatccttcctgctcctgttgtacctaagcaaaagaggaccagtctctgagcttggcttttatggagagtgttcttattttggttcttttttttatttccacaacctctaaccacattcagtccaggaccaaggctcagggatgagtgggagagatgggttatactgtccctggagcttcatcatgattgcctgagaagacagatgctcatcatggctggaatgaaggtatccttcagtaaactttgctttcctaagaaaattcttcagtttctgataagtcatccctatttttatcttgatcaaggctttctacagttacataataaaatgaaatgctgtccagg

SEQ ID NO: 16278 - DNA, 1720 bp, Homo sapiens
tttagaatgaatagcccttctgggttttctttttgacaattcttggacttgaggtaaaacaaggaggattgtggccggatttcagatcccaaagccagcctccatcttaggcctttgcctcattgtgccttttaggttttcttacccaccgtctcctgttttgtcttttttttcttttctcctacccctatcttgggacattcagaaactgcctgggtggtttgagaagagacaacccagtttgatctgcaatacaaggatccattcgtaatctctctctcactgatgttattcccccatctgccgtcttggttcatctcaccacagaagggcatttagtcctacccagccatcggctgcgtatgacagcaggatggcacttcccatttctctgtggttagtgctcgagtgaaaacctctttcagctgagtcctctgaggttctgctgttgagtcctgggtggctgatggaatgattgaggaggtctggtcaccctcaagcgccgtcatcgccttgtttccatgggcttctgtcacacaaaatgaagaacagaaatgttaggacttaagagaatgtttggaattcacacctctttgcagtcctttcaaggctgctgctctgtgctgtgtcccatgcatgtgaaagtagagctgtgatggctgctgggacgcttgcaaagatcatgtgtgagaattgagcacaagaccacaaattattactgcttgatgcgcttgttaaaactctatctgccaggaaaccaaattttcttttcttttctttttttttttgagacagggcctcgctctgttgcccaggctggagtgcagtggcgcgatctcggctcactgcggcctccacctactgggctcaagtgatcctcccacctcggcctcccgagtagccgggaccacaggcgtgtatgactggctacgcctggctaatttttgtatttttaatagagacgagtttcaccatgttgcccaggatggtctggaactcctgggctcaggtggtctgcccacttccgcctcccaaagtgttgggattatggccattagccactgtgcctggcacaatttttttttgtaccctcctttatgccaagaatcagtcctaatttctttactatgtgaagtaacttttaaaggtaatagaaaaggccaggcacagtgactcatgcctgtaatcccaggcgccgtggctcacgcctgtaatcccagcactttgagaggctgaggcgggtggatcacttaaggtcaggagttagagaccagcctgaccaacatggtgaaacactgtctctactaaaaatacaaaattagctgggtttggtggcgcacgcctgtaatcccagctacctgagaggttgaggcaggagaatcgcttgaacctgggaggcagaggttgcagtgagccgagatggtgccattgcactccgacctgggcaacagagcgaaacactgtctcaaaaaaaaaaaaaaaagtaacagaaaaaagagtgaaatatattagctatcttttattctgagccaaaacttgacagatgtgggaaatcttcatatagtgtatgaaaatttcattgtacagggaaattattttcctctgtgtcttttcttttactataaagtgattcagaattttactgttactataaaattatgcaaagtattgtgacaaaactgcatcaatttgttgactattaaagtgctccttgaacatt

SEQ ID NO: 16279 - DNA, 2054 bp, Homo sapiens
ttttacttcatgccaacatgagaaaagacaaatcacatttctttaggaaggaatcctaagtgcctagcaatttggacaggataaatggagtttgggagaagagttttgaagccaattgttacctaaaattgataaactcaataaacaagagggttgtgctagcccacagagatcttatggggattgactgagattataaattcatgagaaagtgatttttaacccacaaaaggctatacatatattagtatgttaggtacattcattacagttagcatacactaatcctgtctttaatttacaacttggccttctccattcaagaatttcttttttttctttttttttttttgctataatactattctttctttaaccagtagtttattgagaaaaactttaacatgtccaattttaaaaatattaaatactatggtaatgtgtcctagaatgtcctgtttgtcatctgtttctgtttactacctgctcagttccaacaggtatttaaatcagctagaacactgataaagcctattgcagctttctgagttacctgtagtgagtcaggacaggtagcagagagggaaggaataaatgtcacaaaaaatgactcattcaaaaccaattttggttttagctgcaggcagtgacataaatgcacagttgcttactactccagatttctgtttccttcttttaactctgaagttgatggcttatagtctatagcaaaaacaaaacaaaacaacaaaaaaactatgctgaacataaaacttatagtgggtaagtaaaacttaactataaagaaaataactttagaatagaggaatgttctagttagcttcaaatgcaagaatcagaaaaccccacattccagaagctcatacaagtagctttgtaatcactagggactcacgttccttctgtcttgacattttgccatttttagcatttgcttgcacctcttagtgtgagacttttgcttcagttccagctatccaatccctattccaaccagcagaaaggaggcacgagaaagaaacctccctgtcctttaagttacacatcccatccattgacatctgagtcatttcacagtttattcaatatttgctgagcatctgctatgtgcaagcactgttctaagccctaggcagttatctaagccctgttcttagtgaacagaaaggactctatgaacaaaaatcctcctgttggtggagcttatattttactagatgtgagaacaagtgtgggggaaggggcccactggccagggtttttaagccacatggtcatacttagcttcaagaccaagcagggaaatatagcctttagctgcattctgggaatccagttctaaggaaggaaaggaaagaatggatattgggggcaattggcagtctctgacaacatgaataaagtgtgaagaaaaataggtcaactggtatgttatgtcacttagcagtaaaaaacaactttgcaattacacctctagtctattcctaacagacatgtatgtgtatgcatgtatgtttagtgcatatctgagttcatttctgggtaccatggttggtagactgtgaggaggcatgtagtgagtgaacaagttgaggtattcctgaaaatctctttgtgctggggatagctgacctataaggggtattaggtccagagaagtccaagaagacagatgcttcttttaactgttaaggaagtgactgtaagaagaaaactgggcttgattcatgctgcctcagatgactgtgctagagttggtaggcaaaatttgagaggaggaagatttttcttttagtgcaaaagaactctgtagcagcaggaacactctcacctgttttgcatgctgcagaggaaattttcatcccaagtgaaaggcaaaggcaatctccaagaccctcctgtatgtaattccactaaataaatgccctgtcacgtagatgaagcttaggaaatgctgggctctttttcgttccttcccttgagggacttaatttgaatgcagaaactctgccaaaaaaaaaaaaaaaaaaatt

SEQ ID NO: 16280 - DNA, 1712 bp, Homo sapiens
agagctcactctccaactttattaaatactatttgagcacaggacacattcttaaacattttgaaaaacattaacccaagatgtagaggctactgctagtcgtcattctagaatctgatattttactctgtatttgaaatgaatgattaatgtcctaggaaattagctttagcagatgtccaggtgccacatcaaaaaagtgcaataattattgacagttttttagattaggcatattattggaaaacaactttataaagagtgaacattgtatactctagtaaaacagcatcactttaaaaatattcatttatgaaatctgttacctatagttgaagtcttgagtagtgaacaagggactctaataccaatactcttaatatctggctattttagatcccttaaagggcataattattggaaatttaggtatttcactaaagcatgtatataatattgccaacaagaaaagtaaatctgaagattaagggaacttacttctgcaaactgtcttgcgatagttaagcagaatttaaactctgttttaagcaggaaaccagaaagattattttgcagttgtagaagatttcataacttattaaaacttattaacattttgtgttgtttagatataggcagttgatacatactaacatcccagccttttcaatatcagggttaaattataggaaaactcagtaaaatggtacaaatctgaaagtttgatggtagaaactgaagatttaacagagaactgtgttttacccgagtgccaaaaatgctgtgagcctccttgcacaaaatttataccacttttgcatttttatctatcagtccagatagttgtctcccctccttctcccaggacctctccaccattaaaatgcacaaaccacatggccgatttcaccatttacatttattttcaaaagttactacaaccaaattaattctattagaagaaatgtagacaaattctataaagactatagattgtgacctaagaaagaaatgaggcaaagaaccaaacattgaattaaatgctacatgggtgactaagatctgtttcaagtcagtgataatatagccacttctgggtacttcagtatcagagatcagttctcgtggtttagacagttcctatctatagctgactatccttgtccttgaatatggtgtaactgactattggctctacagttttattgggccacttaagaaatatttccttgaataattattttgagaaaaagtctaaaagtaataaaaataattttaaacacactgtagtaagaaatgactgttggaaaattatgctttcactttctaccatattctcagctatacaaaaccatttattttgaagatttttagactactgttaatttgaaatctgttactcttattgtggaatttgtttttttaaaaaagatgtttctaattggatttttaaaagaagaatggaatttggttgctattttacaatagaacctaagctttttgtggttcttagtgtcctatgtaaaacttagtgtcaaagtaatcaactttgagattttcccttctattctgctttatattaaaagcccattagaaaatgggaacctggtgaatatataatgaattgtaaaatattttaatgtgtaactttttcaactgtgaaactgacttgattttttgatgaaaacagctgctgataaagtattttgtgt

SEQ ID NO: 16281 - DNA, 1587 bp, Homo sapiens
taattttcttagtaaaaagaataacagaatgcatcgtggcaatccttaagcaacattatctatgtggactgcttaaatcagcaaaacaccagaagtttggttaacttgggcaatatgacaagtattactttttgggcaaaactactcattaagcaatttctctagtgtgtcggacacaaataggttctttatttttggcatgtatgcctttttattttcattcaattttttttttttctcagacagacatagtagtaacgactagcattggaaaatacatatcactattcttggaatatttatggtcagtctactttttagtagaatatttttggatagcgttgacacgatagatcttattccatacttctttattattgataattttattttcattttttgctttcattattatacatattttggtggagaagaggttgggcttttttgaaagagacaaaaatttattataacactaaacactccttttttgacatattaaagcctttattccatctctcaagatatattataaaatttatttttttaatttaagatttctgaattattttatcttaaattgtgattttaagcgagctattatggtacggaactttttttaatgaggaatttcatgatgatttaggaattttctctcttggaaaaggcttcccctgtgatgaaaatgatgtgccagctaaaattgtgtgccatttaaaaactgaaaatattttaaaattatttgtctatattctaaattgagctttggatcaaactttaggccaggaccagctcatgcgttctcattcttccttttctcactctttctctcatcactcacctctgtattcattctgttgtttgggatagaaaaatcataaagagccaacccatctcagaacgttgtggattgagagagacactacatgactccaagtatatgagaaaaggacagagctctaattgataactctgtagttcaaaaggaaaagagtatgcccaattctctctacatgacatattgagattttttttaatcaacttttaagatagtgatgttctgttctaaactgttctgttttagtgaaggtagatttttataaaacaagcatggggattcttttctaaggtaatattaatgagaagggaaaaaagtatctttaacagctctttgttgaagcctgtggtagcacattatgtttataattgcacatgtgcacataatctattatgatccaatgcaaatacagctccaaaaatattaaatgtatatatattttaaaatgcctgaggaaatacatttttcttaataaactgaagagtctcagtatggctattaaaataattattagcctcctgttgtgtggctgcaaaacatcacaaagtgaccggtcttgagacctgtgaactgctgccctgtttagtaaataaaattaatgcatttctagagggggaatatctgccatccagtggtggaaatgtggagtaaagaagctggtggtctgcttctgtgctgtatgccagccttttgccttaagttgagaggaggtcaactttagctactgtctttggtttgagagccatggc

SEQ ID NO: 16282 - DNA, 1788 bp, Homo sapiens
aggatttcttcctggtgcagaagctggtgagctgggctctgtttcagggcaaatgagggccaggagctgcctgtgtgactttggggctccctctgccagtgaccaatccctcttaaaaagcagtcaggtcaatgctactgagtagcctcagagagaatttcctaaacaatacaagaaagagaaagataggtctcttttcccttttggttctaagcatcctttcctcacttcagggtagggtggccaagctctggggtctcaatccagaaggaggcctaagtgggcatcagacttaaaataggcaggaggaagatgcggaggagggtggcaagtagaggtgagccattccccagaggaagatgcagggggagggcaccctggggtgaaggccactgagagccagcaagtgcctgcggagctgacctgggggcctctgcccacttcctttgacccagagttgccttccagtaactcagctgttcaagcccacattccctagatttatcttgtcctctctccatattcttctggaaaagcagatgctctgctaatccaaggaattgcatctttccagccctgtctcacaaaatctgggctgtggggagagagaattgtgtggactgccaagggaaaagagtttttaaaaagagcatgccctttcctcttgggattgtagattgtattgggaacagccctggggactagacaaagtgctgatgatgaattcccctacaagggccctgttgtgaggagtcctttgctgtgttttagtaacacgctattccctgattgggcaatactgacgggaagtacacgcccgtgaaattcacggaggcgcccctaatgcctaatgaaatgagcagacctttagtcagtcaaacaaagggtcagagagaattgacagtaaatgtgtaaatggcctaattaatacatgtgtggtagcagagtcaggaggaagacttaggcctttcgcttcctcctcaggttttccagggctttcttgtgagtttcccttgagttcctcccccgacaggggacactgtgacatttctgtatgctcacttctcagccactgctccctggagagaaatgaaattgtttgcctggattaatgaaaagcgtctgtgttgccaggtcagggctggctttggatgtagatggtgcccagaccttttccctcaacttttcagtttgaaaaatttcaaacttagaggaaaatggaaagaacagtagaatgaacacccatccaccccggacttagatttagcaatcgttaacattggctatatttgctttctctttctctatgtctaaacatagacacacacatatacagctctctcttgttctctgattcagctaatcattaaaagtaagtcacagtcatcctgtcacatgactaaaacctttcagcacgtatctcctaaaaaccaagatattctacaaaaccacagtaccattagcacgcccacgaaatttaacctgataaaataattcaggccaggcgaggtagctcacgcctgtgattccagcactttgggaggcagaggcagacggatcactcctgaggccaggagtttgagaccaggctggccaacatggcaaaaccccatgtctactaaaaatatttaaaaaaaactagctggttgtggtggcacacacctgtaatcccagctactcaggaagctgaggcacgagaattatttgaacctgggaggcggaggttgcagtgagccaaaatcgcgtcactgcactccagcctgagtgacagagcgagactctgtctcc

SEQ ID NO: 16283 - DNA, 1888 bp, Homo sapiens
gaggtcagaagataaccagaaaaataccattacaagcaaagaaaattacagaccaatatccatcataaatgtgcaaaaattataaactaaattttagccaaatttaatgatttatacacatacatgcttacacacatggacacacacacgtatcctttacatgcaggtataaagaataatattaatacataatgaccaagtgtgtatcccaggttggttaacattcagaaattggtcaatctaattcactacattaataaactgaaaaaaatcacatgattatctcaatagatacagaagaagcacttaacaaagtccattatttattcctagtaaaaattatcagtaaaataagaacagttgagattttcctcaaactgataagaggaatccatgaaaacctacagctgtcatacttaatggtgaaacagtgaatgctttgtgcctacgatcaggtacaaatcaaagatgtcttcattcatgtcttctttcaccattgtacttgaaaaagaataaaagacatccagagtggaaaggaagaagtgcaactatcttaattcatggacaacatgaccattgtagaaaatctgatagaatctacaaaaaaagctattagaactagtaaacatcaaaaaatttaaaatacatagggataaatctgttataaagatgtgaaagacctgtgtgctaaacactgcaaagcattccagagagaaattaaagaggacctaaataaatggagaaacacttcttgttcatggtttggaagattcactattccagatatcagttctccctaaattaatctatacaatcctaatcaaaatctcagccagcttttcaaaaaatagaaactgacaaaaaccgattacaaaatacatttggaaatacaaaggatctagaactactttgaaaaagcagcatctttatttataatagccccaaactggaagcaacctaaatggaaaaaaaaaaaaaaacaacctgtgattagatcatgtaacgaatactattcagcataaaaggaacaaaaatattatgcaacaatgtggatgaattgcaaatacattatgctaaatgaaagaagtaatctcaaagagcacatactatatgcttccatttatatggcattctgaaaaaggcaaatctttaacagtggagaatgtatcagtagttgccagggtttaggaactggggaaggaactgataaaggagttacctgagagaatttttaggggtgttggaacaggtctaaatttttgttatggtggttacaaagttctatacctttttcaaaagtgatataattcactaggcatggtggcacgttccggtagtcccagctactcggggggctgaggcaggaggatcatctgaacccaggggttgaggctgcagtgagcccgtgatcacaccactgcactccagccaggaaaacagaaagagaccctggctcaaaaaaaaaaaaaaattatgattaaagacagatgttctgcattgtataaggtgaggttatcttatgtctctctctgctactccagcttattctgtagtatctgtattttgttttgcatattgaccttgtgttaagggttctttagaagaaaaggtttaggctgcgtgtggtgtctcatgtctacaaccgctaaggtgggaggattgcttgaggccaggagtttgagaccagcttggggaacatagtgagactccacctctacaaaaaaaatttttttaattagctgggcatggtggtgcatgcctgtagcccttcctacttggaaggctgaggtaggaggatcgcttgaacccaggagtttgaggctgcagtgagctatgataatgccagtgcactccagcctgggcaacgtagcaagatcttgtctctctt

SEQ ID NO: 16284 - DNA, 1625 bp, Homo sapiens
acagcggggcgtcacctcggacatacgaacagcgggcggtgttcccggctccgtggggccgtcttcccggcgagtccgcgacggtcgccgcccacggcgagatgaaatctcgctctgtcgcccaggctggaatgcagtggcgtgatctcggatcactgcagcctctgcctcccgggttcgggcgattctcctgcctcggcctcctgagtagctgggattacaggtgcgtgccaccacgcacggctaatttttgtatttttagttgagacggggtttcaccatgttggtcaggctgttcttgaactcctgacctcgtgatccgcccgcctcggcctcccagagtgctgggatttacaggcatgagccaccgcgcccggcctgttttttttttgttggtttgtttttgagacggagtctcgctctgtcgcccagcctggagtgcagtggcgccatctccgctcactgcaagctccgcctcccgggttcacgccattttcctgccgcagcctcccgtgtggctgggactacaggcgcccgccgccacgcccgtcaaatttttttttttttttttgtattttttggtagtgacgggtttcaccatgttggccaggatggtctcgatctcctgacctcgtgatccgcccgcctctgtctcccaaagagctgggattacaggcgtgagacaccgcgccctgtccggcctgttattatacatatgattgatatctcgtgactccctaaaatgaatacaaccaagctgtgccccgaccaccttggacccacgtcgtcaggatctccggaggctgtgtcatgggcgtccttaactttgggaaataagcctcctgaaatgattaagacttgtcatttttctcgattgacattgataagcactgagagatcctcagtgaaggtaacccggcctgcagcagttcgcctattgatcctcggtattggcttggcaccttattgcccaaactggtaggatgattgctgaaatctgggaccttgttcctccagggatccctgatcttccaacgtttttcggtggggggtctgaggtttatttgctgttaaaaaactccttttttgggagttcccactcgcttcatcaaggaaggcaagcctgcctgcttctgcatcgacagatagccgtcttcagcttgagccccatcactagatgtgtcttgtataactatcccacagctactaagcagctggctgggactcaggatcaacgttggcctgactctgaagcccatgcacctccatagaccacactactcagccaggtttcctggaccttcaaggggctggagtgacacttctgaaataggagcaagatttttttgagaatgtcatcccatccatccattactcttcaccattggaaataattcactccagggaatggttctgaagtctcttgggaaaagcgaaacaatttgagaaaattgctgagcattgggtttaggaaattaatgtccaacattacatttttaatttatcataggagaaatttgaaaacacctataatgcactgatcatatctgcaaactctttgtattttttgtatttgttgactatttatgatttttaatatagacaaagtcaaattactgttcctg

SEQ ID NO: 16285 - DNA, 1503 bp, Homo sapiens
ttttaaggagatgcctacatagaagagtgacagcagctagactaaatgtttaactgctgaactagttcctcaggtatcctggctctagagattgctatgggagattggatgactgttacagatccaggtctgtcttcagaaagcaaaactatctctcaatatacctcagaaacaaagatgtctccatcaagtttatactcacagcaagtgctatgttcttcaatacctttatcgaaaaatgtgcacagttttttcagtgccttctgcacagaagataatattgaacagagtatctcatatcttgatcaggtaacatgtttttgtaaaaaacagtagcataaatcatgttatataatagaatgtatcaaaattatgagaaaaacatttgtcaaacacaagtttgttgtttatgtagtgcccctgagacttagattttcagagaaccttggtgattatctcatctagagatagcaagtctaacttttttgtgtggagcaccttggcctcctcattgtcccaggggctcctccactgagagtccagccatcactttatggatgcagaaacccaagtgccttgctccatgtcacagatttatagcagagactaaaagagccccgtcctcttaactctttgtcctttgggatattgaccattttcttaactatttcaagatagttttctatttttctaaggaaagatttctatcttttgattttttttttactaagttgcccagtaaccaaccttttaaaataattcacatttatttttaatttttgacaaaaattatatatatttgtcatgttcaacataatgtttcataatacacattgtgaaatggctcagtgtgcatacctcccatacttatatcattttttgtggtgagaatttacttgctcagcaatttcaggaatatagtacgtagttattagctgaggtcaccgtgttgtacaatagatctattaaacttattcttcctatctaactgaaagtttgtatcctctgaccagtatctcctcaactgtaaccaactttaagaaaacattttctcctaccaggaattgactacttttggttttccttcattatatgaagaatccaaaggtaaagagacaaagagagagttaaatatagtagctgtactaaattgtatgaatgagctgcttgtgcttcagcggaagaaccttctagctcaggaaaatgtggagacacagaatttgaagctgggaagtgatatggaccatctacagagctgctactcaaaacttaaggaacaactggaaacctccaggagggaaatgattgggcttcaggaaagagacagacagttacaatgtaagaacaggaatttgcatcagctactaaagaatgagaaagatgaggtgcaaaaaattacaaaatatcattgcaagtcgagctactcagtataatcatgatatgaagagaaaagagcgtgaatataataaactgaaggaacgtctacatcaacttgttatgaac

SEQ ID NO: 16286 - DNA, 1740 bp, Homo sapiens
gttaagaagcttcctgcagggggtgagaaattggactcaatgtcctcctgaaaagttcagctacagaaaggctgggtccctttggtacactcctcaccttgatccttagcaccgttgttaagtatactgattaatccaatcagtaagggcctgcggagtgagctgggctctggagtagatgtgattcaagacagaaaagcaggagggtacgccactcagatctcaaggcacttaggatccagttaaaggtactattaagacattatcagctgaagagtcagactgacctaagtttaaatctgggctgagccacaactagaccaggctttctcaacttcggcacccctgacttttttttgtgtgtgtgaaatggagtctcatctgtctcccaggctggagtgcagtggtgtgatctcggctcactgcaagctctgcctcccaggtttatgccattctcctgccttagcctcctgagtaactgggacaataggcgtccgccaccacgcctggctaattttttgtatttttagtagagatgggatttcaccgtgttaaccagggtggtctcgatatcctgacctcatgatccgcccgcctcggcctcccaaagtgttgggattacaggcgtgagcctctgtgccagcctttttgtattttttttttttggagacagggtctggttctattgcccaggctggagtgcagtgatgtgattagggctcactgcagccttgacctcctgggcataattgattctcctgagcttaaatgattctcccacctcagtcccccaagtataagagctaggactacaggcatccagccatcatacctggctaatttttgttttgttttgttttgtagagactaggttttgccatgttgtccaggctggtctcgaactcatgagtttaagtgatcctcctatctcagccttcccaaagtgctggcattgtaggtgtgagctactgcacctggccaactttgccacaaatgaccagataattctttgttgtagggggtgttctgtgaatcacggatgttgggcagcatccctggcctctatctactagattccagtgccttccccgccaattgtgacaaccaaaaatgttgacagacattgccaaaagttcactgagcaaagaattgccaagattgtccgtccctggttggaagccactggactagcttgtatgacttttggcagacaaactaaactcttggtattagttccatcttttttaatgtatgacaacaatacctgctgtaagaatgaaatgaaatagcattaatcaagcttctaccagggagcctggcacaaagtagacagacacatctgagaaagaaccttcacacccaggttagtgggggaggcagggaagcttcaaaaagtgggaagcatttgacgtcgacttgaaggatgagaacatattttccaaaaggactagaagtattgtgattattattattcatcctccttcctctacccttgcaggcctcctctcacttgctggtcactccttcttctctcctgtaaaaatcaaccaaagagactcttctaaatcctcagctcctggaaacaggagatttggttctggcctcacatttaaccctccctgcgcctgctgctccaggagtgcatagactcgccccttgttctggagcaggccaagaatgacccgtttccccaccttgttaagtatgaattggaaatttgtacccatgcagtttccttgc

SEQ ID NO: 16287 - DNA, 1949 bp, Homo sapiens
  CDS (1008)..(1844)
aaattagaactcaagattaaaaagcccactcaaaaccacacaactacatggaaattgagcaatctgctcctgaatgaatgactcctgggtaaataatgacattaaggcagaaatcaagaagttctttgaaatcaatgagaacaaagaaacaatgtatcagaacctctgggatgcaggtaaagcagtgttaagaaggaaatttatagcactaaatacccacataaaaaatctagaaagatctcgaattgacaccctaacatcacaactaaaagaactagagaatgaagagcaaacaaatcccagagctagcagaagacaagaagtaactaagctcagagtggaactgaaggagataagagtcatgaaaaacccttccaaaaaaatcaatgcatcccgtagctgttttttttttaaaatcaatgaaatagaccaccagcgagactaataaagaagaaaagagagaagatttcaaataaacaccatcagaaacgataaaggggataccactactgacgccacagaaatacaaccaaccatcagataataccataagcacctctatgcaaataaactggaaaatctagaagaatggataaattcctgcactcataaacaccctacaaagactgaaccaggaagaagttgaatccctgaatagaccaataacaagtcctgaaattgaggcagtaataaatggcctaccaatcaaaaaaagcccagctcccgatggatttacagctgaattccaccagaggcacaaagaggacctggtaccattctgaaacgattccaaacaattaaaaaggagagatatctccctaacccattttatgaggccagcatcttcctgataccaaaacctgatggagatacaacaaaaaaagaaaactgcaggccaatatccctgatgaacatcagtgcaaaaatcctcagtaaaatactggcaaattgaatccagcagcacatcaaaaaacatccaccatgatcaagttggcttcatccccgggatgcaaggctggttcaacatacacaaatcaatacatgtcattcatcacataaacagaactaaagataaaaaccacatgattatctcaataggtgcacaaaaggtcttcaataaaattcaacatcccttcatgttaaaaactctcaataaactacgtattgaaagaacatacctcaaaataataagagccatttatgataaacccacagccagcatcatactgaatgggcaaaagctggaagcattccccttgaaaactggcacaaggcaaggataccctctctcactagtcttattcaatgtagtattggaagttctggccaggacaattaggcaagagaaagaaataaagcgtattcaaataggaagagaggaagtcaaattttctttgtttgcagatgacatgatcctatatctcgaaaaccccatcatttcagcccaaaagcttcttaagctgataagcaacgttagcaaagtctcaagatacaaagtcaatgtgcagaagtcacaagcattcctatacaccaacaacagacaagaagaaatgcaaatcatgaatgaactcccattcacaattgccacaaagagaataaaatacttaggaatacagctaacaaaggaagtgaaagacctcttcaaggagaactacaaaccactgcttatagaaatcaaagaggacacaagcagatggaaaaacatccaatgctcatggataggaagaatcaatatcatgaaaatggccatactgcccaaaggaatttatagattcaatgctattcccattaaactaccatcgacattcttcacagaattagaaaagactaatttaaaattcatatgaaaccaaaaaaacagttcacattgccaagacaatcctaagcaaaaagaagaaagctggaggtatcacactatccaacttcaaactatactacaagtccacagt

SEQ ID NO: 16288 - protein, 279 aa, Homo sapiens [sequence omitted]

SEQ ID NO: 16289 - DNA, 1589 bp, Homo sapiens
  CDS (104)..(865)
taaaggactgtatctttggtacactggagaaccaaatgatgcccttcgacattttaataaagctcggaaagatcgtgactggggccaaaatgccctttataatatgatagagatctgtttgaatccagataatgaaactgttggaggtgaagtatttgaaaacctggatggagacctgggtaattcaactgagaagcaagaatctgtgcaactggcagtaagaacagcagaaaaacttcttaaggaactaaaacctcagactgttcagggtcacgtacagcttcgcataatggaaaactattgcttaatggctaccaaacagaaatctaatgttgaacaagcattaaataccttcactgaaatagcagcatctgagaaggagcatatcccagcgctcttgggaatggcaacggcttatatgatcttgaaacagactccacgagccagaaaccagctgaagcgtattgcgaaaatggattggaatgctattgatgctgaagagtttgagaagagttggctgctacttgctgatatttacattcaatcagcaaaatatgacatggcagaagacctgttaaaacggtgcctgcgtcataatagatcttgctgcaaagcttatgaatatatgggatacattatggaaaaagagcaagcatatacagatgctgccttgaactatgagatggcatggaaatatagcaatcggacaaatccggcagtaggatacaaactggcatttaattacttaaaagcaaaaagatatgtggattcaattgacatatgtcaccaggttcttgaagcacatccaacttatccaaaaatcagaaaggatatacttgataaggcccgtgcgtctttaagaccttgaaaataatttgaacttaggtgttggtttaacaggaaatgaaagaaatctaactttcagttcttcctgttcaaaacaggatttgattgccttatgtgacaagcccaagatctgtgacagttggagctcaaactaggcagtcttgattccagactgctctgaactagtatttgaaggaactaatgaacatgacatgttaaatgaaagtttggggacgtacactcaggatggaagcagggggacacaacagaaatgaaagaattttctgtagatctgggatctggacacctgccccccgtcatgaataaatgccatcccttcccacgccaaccatatcgatgatatagtggcaggaaggagagtaagggactctggagcttaaacagaccatcacatgggaaggcagtaaacaagatgctaactgatggagtgaaatccccaggagatgcagaaggcaagtgcagctaactgaggcctcaggggcaggagatgcccatcaggatgagagctatgtctttctccagtgatgactctgcttctatgaggtcaccagcagtagaaccatatcttgctggcatacacttgggatggccccgcctcctggacttccatctgtcatcaggagaacataaccatctggagtcagtacagatcatcaatccttccacatatacaagttcattttaaatttttaaaaatataatacaactgagaagtcttcatt

SEQ ID NO: 16290 - protein, 254 aa, Homo sapiens
MIEICLNPDNETVGGEVFENLDGDLGNSTEKQESVQLAVRTAEKLLKELKPQTVQGHVQLRIMENYCLMATKQKSNVEQALNTFTEIAASEKEHIPALLGMATAYMILKQTPRARNQLKRIAKMDWNAIDAEEFEKSWLLLADIYIQSAKYDMAEDLLKRCLRHNRSCCKAYEYMGYIMEKEQAYTDAALNYEMAWKYSNRTNPAVGYKLAFNYLKAKRYVDSIDICHQVLEAHPTYPKIRKDILDKARASLRP

SEQ ID NO: 16291 - DNA, 2009 bp, Homo sapiens
  CDS (1157)..(1708)
attgattcatttaatctgcatgttggcggtgtgaatagtagaaaactcacagttgaaaatgcctcttgtcagccacggagcgcacaggcatttgtgtgcgtaaccccgggtagcgttcatgtgcacctaaagtgtgacgacagcctatgggaaaccaagggaagggtcacctgtagaggtccggacattcggttttgcctttaagacaactattagatcctaagcgactgtgttgtggctgagttaaaaatgtgcctgtttacttgcagagcttcttccattaggtgaacaatctgttgtgattttaatgtgtaagacctttggtaatgtgaggaattgattagatagtgcagcccagtctctagaggatcagatctgtgggattggttggggtggttgggcaaagtccatggtgagttaagaaatgactttggaagtgactctaatgtgtacacaaacaacacacaagcacacaccacacatacatacacacacgaacacatacctccatgctgcatatacacacacaggcatacacacactctaatgtgtacacaaacacacatgcacataccacacatacacacacacacatgaacacatacctccatgccacacagacacacacaggcatacacatactctaatgtgtacacaacacacatgcacacaccacacacgaactcacacatccatgccacatatacacacacgggcatacacacatgcaggcacatacactacacacacacacacacacacacacacaggcacagttgcatataaacacacaaatgtacacacccccacaccacatatgcacatacacatatacacaccacacatattcatagtcacatacacaaacacacatgtgtatacaattattaatatagtcttaaagtcattctgttggttaagaaaatatttcctgaacacctgtttgctgaattttaaagactgtccatttaatttgcttagaccttagataacaagttaggctaaaagtactatatccatcaactctgaaagttctgtatgtttatgtatggggaccagttaaccaatgtatttatttttgatgttttagatattggcaaaacacttgaatgatggtaaaatcaatcagcttcctcttttccttggagagcctgctatggaatttctctgggatttcctgaaccatcaggagggtccccgcataagagatcatttaagccacggggagatcaacttacatgaattttcaaaagaaacaactaatcagttgcttgcattttctcttgtactgctactcagattcgttgatgactgtctgctatcagtttttaaggaaaaatcagccgtagaattgttgattagtcttgcagaaggctatagttctcgctgtcatccggtttttcagcttaaaaaacaggtgctgagctgtgaggagagcatcagggtttgggctctgctgcctttccccgaagaactcactcggcaagccgtcagattagaagataattctgaaacaaatgcctgccactctttgattacaaaaatgacggatgagctgtatcaccatatgcctgagaatcgttgtgtgttaaaggacttggatcgtcttcctactgagacgtggccccagcttctccgtgagctctgcagcacacctgttcccaccctgttctgccccaggattgtgctgggagtgctggttgtgctctgaagcatcagcgaacagtgccgccgtgtgtccagccaggtcaccgttgcctcagagctgagacacaggcagtgggtggaaaggacgctgcggtctcgccagcggcagaactacctgcgtatgtggagtagtatcagactactgtcccctgtgctcagcctgatactgttactcattgcgctggagttggtcaacattcatgctgtttgtgggaagaatgcgcatgagtatcagcagtacctaaagtttgtaaagtcgatcttgcagtacacggagaacctggtggcttacaccagttacg

SEQ ID NO: 16292 - protein, 184 aa, Homo sapiens
MEFLWDFLNHQEGPRIRDHLSHGEINLHEFSKETTNQLLAFSLVLLLRFVDDCLLSVFKEKSAVELLISLAEGYSSRCHPVFQLKKQVLSCEESIRVWALLPFPEELTRQAVRLEDNSETNACHSLITKMTDELYHHMPENRCVLKDLDRLPTETWPQLLRELCSTPVPTLFCPRIVLGVLVVL

SEQ ID NO: 16293 - DNA, 2281 bp, Homo sapiens
tccaatattgactgggatgattgttgcacatatctgaatgtatcaaaaatgattagcttcaactaaatgggttaattatatactatgtaaattatatataaataaatttgtataaaaatataaatgaaactattgcctgcaagtagttccagaaagaagttgacacatttcaagaataacaaatgttattaaacatgtgaaattgatgaatgagaaaatatactatttccatactcttccttaaagatgtatcagtccctaatgtatattcctattatggtgatattatttatgctcagtcaatcattaacatatgcttatgaaaatcttattttacttaaagaggaatactttaaataaattttattcaattgccttagaatttaggcctactcctagacaggaagaaagatttccaagaattcacaatcttctaaaaccattacctatatttattatttatgctcttacataaccctcagtagcacattatttttcttgtacaattgatcagatattatttgaaattaaagtgtctgtccctttcagtcagcgtgtttctaaaatatgacaactaatgaaatcgcatagtaaatgctacaaactaaaggctataataagttgtaacactttttcagaatcacaataaaatttttctggatatgctgttgtgtaaggaattcctcagtgatatgtgcatttgaacttcagctaatatttctattctctctgagtttgggaagttatttgaattcccctactcctaggttttttatttatacacttaatattcattgtttttgcccttcctatgttatattttaacgatttattcactcattgttgtgtttctattccaaacgtttcctaggttggtgaaagagttgataactgtcaaaaaaataagcctgcaattggaatatggaaagagcaacggtcaagtaagacaacattttggcaagtgcacatagaactaatgagtaactgttcctggggctctaggactattagcgcagattctagactgagatgggatctgtgtgaagagttaacatttctagtaggcaatgaatcccagcaaggtcattaaaggaacttgtctgtttctttgtttttatttaataaaaatgttcttctttggatacttcctgcccactaatgaagcaataaggtgggcttgtgaacatatgtgtcttgtatgcacgctcagcaatgtgccttcattatctaaaaaggaccaaaatctattaacttatactattattcagcatatggttttataagagacaggagagactaccatcagcatttccctgtttgaacataaaatattaattcagttttctttacagaaaatttaagagtcagtttcaaacataaatttattgaaagggttagtcttctttgtgaaatataatctgtgttgccaaaaggaaaattcagacattacatccaaaatgtgtagttctcagttctggctgtctctaatatatatgcatttatcaaaatcagtgataatcagtctgctttaaagggtattttttgaaattcctgatatatcatgaagacaaatatgatggttatcacaacttaaaactaaaacctgtctatctcaggagaagataaaaaatgtatgcaaaatgtaaaaagactggcactcctggatgaattatattattgtaccttagagaaattgtgatactgatgtggttatgcatttcagtaagagaaaatggcaaattgaaattaccaaatattcaagacagttctcggaaatctaaattatattatagaatattaatgtcacacagagcactatttctagaattagtctgtgaaaatgtcttcatttaaattcttaaagccagatataaatatttcaaagtaaggttaaaattcagttgaagagtactagtacgatcccaaaataaaaaacggtaaactgaccagatctaatttagaaggaggcagagctagctgggcatggtggctcacgcctgtaatcccagcactttgggaggccaaggcaggtggatcacctgaggtcaggagttcgagaccagcctggccaacatagtgaaaccccatctctactaaaaataaaaaaacttagccaggcatggtggtgcatgcctgtagtcccagctattcaggaggctgaggcaggagaatcgctggaacctgggaggtggaaggttgcagttagccgagattgtgccactgcactccagcctgggtgacagagtaagactctgtctcaaaaaaaaaaaaaaagaaaaag

SEQ ID NO: 16294 - DNA, 1921 bp, Homo sapiens
aacatttatagctttaaaaataccttacgtacttcaataactatgtggaagcactaagaaagattctgtataaaacatcgcaagtttggaaaaaatacatctttacatcttttcctccagcttcattttctcagaggcaggagcaggccagtggtttccatactgcggctcctctaggagccacctgagaaccaaaccaccaatccagcatctcccaccccatcatccagatcctcccgatgccctctcatatgtgggttctgtgacccagaagcctccataatgaaccacaggagaacaccatgggccagccaacagttaggctcttcacataccaaataaaccaccacaggaacccttaacctcatctactgcctgatccaaacatcactgctttgaactcaatggtctttcttgagcctttatgatcaatacatagtgcacttttagtccctctgaagcagattatgttgtcacaattatgactcaactttaatagtttcaaccagaaactgtttaggatccaacatacaagagagtcaactacatttcataatattagcccatttaagagtatttttcaaagtgtgttctgtggatgttaataggtgatactgttccagaagttctgtggcaaactaatccaggacttctcagaacctttaatatatgtttcatatacatttacatttcaggcctctgaaaggcagaatcctcaaatttatttatccatggaagctttttttcccctcagagcaactcacaggactactttgggaaacactggctaagtgttcctaagatctcatgaaaccccttagggaagttttatcccaaacagacccagatcatgtttgtgttagaaacaaaaatttcatcaacagtttaagaaactacttacatgtgccagtattcgttagttacatatgaaaaactcagttcaacaagcgtaagcaaacaaaagcgtgtaccagccgatgtcactggagcccgggctggctgggtctccttccatctctagctctgcttcctcctcctgttaacctagttctcaggaggaaatgacatccttgtggtttcaaagctgctcaggcacgtggccacctttgaaccagggattttgatcgggggactctcattggcccggccccgttgggttccttgtcccctggcccccacgggagtgaggatggcgccatggtggagagcaccaccaggaccacgtggagttagggagagactgtccccctaagaaaaacataggacccctgcaaggcccaaccacctctcccattagaagtttttcagtcaggcacaatgtcaaaagtcagcttagggtggagacaaagtttgcaggacaggtgtcccagaatcatccacataccacctacatatagtaatacccatggccagtgtcataatcaagggccttttcttactttgcttctgaagctggtttatttctggtgctccaaacacaggactctcattaaaatccaccagtatatgcacagatgccttgtgattttccagctttcatggattttaaggccagatgagaaacatttacaacatccagttgttcctagagaggttagcaaatgaaatagaaagctggggatgactgatgattctcaatcgtgaagctgtgtttggtaccgaaatgctcctaaaactcacccgctctgaactactttgggttagggtcccttcctgccacccatccctcaccactccccatggggagatcagttgcaggagaggaattcaaagggctcattcaggatcattgaagagaggctgtttttccgaatcatgatccctagtaatgactattggcttccacatatctatgatcgcttcttaagatttaagaattacttctacccaacctaaatggtgatacctacctaaaatactt
